(19) United States
(12) Patent Application Publication
(10) Pub. No.: US 2024/0404707 A1
(43) Pub. Date: Dec. 5, 2024

(54) MACHINE LEARNING-BASED SYSTEMS AND METHODS FOR PREDICTING LIVER CANCER RECURRENCE IN LIVER TRANSPLANT PATIENTS

(71) Applicant: UNIVERSITY OF PITTSBURGH-OF THE COMMONWEALTH SYSTEM OF HIGHER EDUCATION, Pittsburgh, PA (US)

(72) Inventors: Jianhua LUO, Wexford, PA (US); Aatur Dilip SINGHI, Sewickley, PA (US); Baoguo REN, Allison Park, PA (US); Chien-Cheng TSENG, Pittsburgh, PA (US); George MICHALOPOULOS, Pittsburgh, PA (US); Michael A. NALESNIK, Pittsburgh, PA (US); Michelle A. WOOD-TRAGESER, Pittsburgh, PA (US); Shuchang LIU, Pittsburgh, PA (US); Yanping YU, Wexford, PA (US)

(21) Appl. No.: 18/688,105

(22) PCT Filed: Sep. 2, 2022
(86) PCT No.: PCT/US2022/075886

§ 371 Date: Feb. 29, 2024

Related U.S. Application Data
(60) Provisional application No. 63/239,999, filed on Sep. 2, 2021.
(60) Provisional application No. 63/257,279, filed on Oct. 19, 2021.

(51) Int. Cl. G16H 50/30; G16B 25/10; G16B 40/20; G16H 50/20

(52) U.S. Cl. CPC G16H 50/30; G16B 25/10; G16B 40/20; G16H 50/20

(57) ABSTRACT

Described herein are prediction models based on the transcriptomic, exomic, and/or radiological analyses on tissue samples to predict the likelihood of the original cancer (such as Hepatocellular carcinoma (HCC)) recurrence into the liver transplant. An example computer implemented method for predicting the likelihood of liver cancer recurrence 5 into a liver transplant includes receiving gene expression data related to a liver tissue sample for a subject having a liver cancer, inputting the gene expression data into a trained machine learning model, and predicting, using the trained machine learning model, a risk of recurrence of the liver cancer in the subject after liver transplantation.

### CROSS-REFERENCE TO RELATED APPLICATIONS

[0001] This application claims the benefit of U.S. provisional patent application No. 63/239,999, filed on Sep. 2, 2021, and titled “MACHINE LEARNING-BASED SYSTEMS AND METHODS FOR PREDICTING LIVER CANCER RECURRENCE IN LIVER TRANSPLANT PATIENTS,” and U.S. provisional patent application No. 63/257,279, filed on Oct. 19, 2021, and titled “MACHINE LEARNING-BASED SYSTEMS AND METHODS FOR PREDICTING LIVER CANCER RECURRENCE IN LIVER TRANSPLANT PATIENTS,” the disclosures of which are expressly incorporated herein by reference in their entireties.

### STATEMENT REGARDING FEDERALLY SPONSORED RESEARCH OR DEVELOPMENT

[0002] This invention was made with government support under CA229262, TR001857 and DK120531 awarded by the National Institutes of Health (NIH). The government has certain rights in this invention.

### BACKGROUND OF THE INVENTION

[0003] Hepatocellular carcinoma (HCC) is the most frequent type of liver cancer, and has a general 5-year survival rate of 18% (1), with only glioblastoma and pancreatic cancer having higher mortality (2). Currently, surgical therapy of HCC remains the most effective approach to treat HCC. When HCC is localized and the liver function is adequate, tumor resection or cryoablation therapy may be a treatment option. However, liver transplant is the mainstay of HCC treatment because it treats both the HCC tumor and the underlying liver disease such as cirrhosis or alcoholic fatty liver disease. Thus, it eliminates the risk of new tumor formation from the underlying liver disease.

[0004] The first successful liver transplant was conducted in 1963 (3). Since then, the number of liver transplants applied to treat HCC has been steadily increased. Milan criteria were developed in 1996 to guide the selection of HCC patients for the liver transplant treatment by restricting the HCC single lesion <5 cm in diameter or up to 3 tumor nodules but with no tumor nodule >3 cm in diameter (4). However, Milan criteria was later viewed as too restrictive, and thus denied a large number of HCC patients the transplant treatment. Several subsequent criteria were developed to relax the criteria to include more patients into the liver transplant program (5). The latest Extended Toronto criteria include patients with any size or number of tumors if the patient is negative in systemic cancer-related symptoms or extrahepatic disease or poorly differentiated cancer based on biopsy (6). The post-transplant survival rates from these criteria ranged from 65-85% (7). One of the major considerations of selection of transplant candidates is post-transplant HCC recurrence. Based on various studies, the HCC recurrence rate was up to 20% among liver transplant patients and had a median recurrence time of 14 months after the transplant. The median post-recurrence survival time is only 12 months (8, 9). Thus, a better prediction method of HCC recurrence for the HCC liver transplant candidates is necessary to improve the clinical outcomes of HCC patients.

### SUMMARY OF THE INVENTION

[0005] Described herein are prediction models based on the transcriptomic, exomic, and/or radiological analyses on tissue samples to predict the likelihood of the original cancer recurrence into the liver transplant. For example, in some implementations described herein, prediction models based on the transcriptomic, exomic, and/or radiological analyses on HCC samples to predict the likelihood of the original HCC recurrence into the liver transplant are described.

[0006] An example computer-implemented method for predicting the likelihood of liver cancer recurrence into a liver transplant is described. The method includes receiving gene expression data related to a liver tissue sample for a subject having a liver cancer, inputting the gene expression data into a trained machine learning model, and predicting, using the trained machine learning model, a risk of recurrence of the liver cancer in the subject after liver transplantation.

[0007] Additionally, the trained machine learning model is a supervised machine learning model. For example, the trained machine learning model can be a support vector machine (SVM), a random forest model, a logistic regression model, or a k-top scoring pairs (k-TSP) model.

[0008] In some implementations, the trained machine learning model is configured to predict the risk of recurrence as a probability score. In other implementations, the trained machine learning model is configured to predict the risk of recurrence by classifying the subject into one of a plurality of categories.

[0009] Alternatively or additionally, the gene expression data includes respective gene expression levels for a top-n differentially expressed genes, where n is an integer greater or equal to 10. Optionally, n is greater than or equal to 50. In these implementations, the trained machine learning model is a random forest model. Additionally, the top-n differentially expressed genes can include one or more of HOOK1, EFCAB7, CDC7, NUF2, UBE2T, HELLS, RRM1, SYT12, KIF21A, RACGAP1, PRIM1, PTGES3, YEATS4, CCT2, PARPBP, PPP1CC, KNTC1, TMED2, CDKN3, DLGAP5, BUB1B, NUSAP1, CCNB2, KIF23, FANCI, PRC1, CDC6, TOP2A, KPNA2, NDC80, RBBP8, NARS, BUB1, TOPBP1, SMC4, NCAPG, CENPE, PLK4, CENPU, CENPQ, TTK, FBXO5, ANLN, MELK, DYNLT3, ZNF674, KIF4A, AMMECR1, ZNF449, and BRCC3.

[0010] Alternatively or additionally, the gene expression data includes respective gene expression levels for a top-q pairs of differentially expressed genes, where q is an integer greater or equal to 10. Optionally, q is 43. In these implementations, the trained machine learning model is a k-TSP model. Additionally, the top-q pairs of differentially expressed genes includes one or more of BUB1B and SSH3, MCM8 and OGDHL, NUSAP1 and FNDC4, KIF21A and RAB43, CDC7 and CNGA1, MORF4L2 and ETFB, HELLS and HAMP, PPIL1 and ZCCHC24, MELK and GALNT15, BRCC3 and CCDC69, CCT6A and ASL, CDKN3 and SYT12, RBBP8 and TMPRSS2, KIF23 and LMF1, KPNA2 and SUN2, SMC4 and FXYD1, PPP1CC and FTCD, NUCB2 and NDRG2, PARP2 and IL11RA, VBP1 and AGTR1, TOP2A and TSPAN9, KTN1 and COL18A1, NCAPG and ADAMTS13, STT3B and CD14, SEC11C and C8G, CCNA2 and ADRA1A, CENPQ and UROC1, TTK and PLCH2, FANCI and SHBG, DEK and EGR1, RFC5 and APOF, PTGES3 and TAT, SNX7 and PGLYRP2, CCT2 and PIGR, PRC1 and MGMT, NARS and MASP1, RRM1 and MGLL, TOPBP1 and CTSF, F2 and ITIH4, ANLN and ZNF674, PRIM1 and SULTIA1, RARRES2 and HRG, and CENPU and NNMT.

[0011] In some implementations, the method optionally further includes receiving mutation data related to the liver tissue sample, and inputting the mutation data into the trained machine learning model. The trained machine learning model can be a random forest model, a k-top scoring pairs (k-TSP) model, a support vector machine (SVM), or a logistic regression model. Additionally, the mutation data includes a number of somatic mutations present in the liver tissue sample from the subject. For example, in some implementations, the mutation data optionally includes a number of somatic mutations present in a top-m mutation pathways, where m is an integer greater or equal to 5. Optionally, m is 5. In these implementations, the trained machine learning model is a random forest model. Additionally, the top-m mutation pathways include GO_ENDONUCLEASE_ACTIVITY_ACTIVE_WITH_EITHER_RIBO_OR_DEOXYRIBON UCLEIC_ACIDS_AND_PRODUCING_3_PHOSPHOMONOESTERS, GO_GLUCOSE_BINDING, GO_PALMITOYL_COA_HYDROLASE_ACTIVITY, GO_PEPTIDE_N_ACETYLTRANSFERASE_ACTIVITY, and GO_DOPAMINE_BINDING. Alternatively, in other implementations, the mutation data includes a number of somatic mutations present in a top-r mutation pathway pairs, where r is an integer greater or equal to 3. Optionally, r is 3. In these implementations, the trained machine learning model is a k-top scoring pairs (k-TSP) model. Additionally, the top-r mutation pathways pairs includes GO_SYNTAXIN_BINDING and GO_N_ACYLTRANSFERASE_ACTIVITY, REACTOME_GOLGI_ASSOCIATED_VESICLE_BIOGENESIS and GO_N_ACETYLTRANSFERASE_ACTIVITY, and GO_REGULATION_OF_HORMONE_METABOLIC_PROCESS and GO_PEPTIDE_N_ACETYLTRANSFERASE_ACTIVITY.

[0012] In some implementations, the method optionally further includes receiving a radiology-based parameter related to the liver cancer, and inputting the radiology-based parameter into the trained machine learning model. Additionally, the radiology-based parameter is based on a size or number of tumor nodules associated with the liver cancer. For example, the radiology-based parameter is optionally Milan criteria. In some implementations, the trained machine learning model is a k-top scoring pairs (k-TSP) model. In other implementations, the trained machine learning model is a support vector machine (SVM), a random forest model, or a logistic regression model.

[0013] In some implementations, the method optionally further includes receiving mutation data related to the liver tissue sample and a radiology-based parameter related to the liver cancer, and inputting the mutation data and the radiology-based parameter into the trained machine learning model. Optionally, the trained machine learning model is a random forest model. Alternatively, the trained machine learning model is optionally a support vector machine (SVM), a logistic regression model, or a k-top scoring pairs (k-TSP) model.

[0014] In some implementations, the method optionally further includes providing a treatment recommendation based on the prediction. For example, the treatment recommendation is to perform a liver transplant procedure on the subject.

[0015] Alternatively or additionally, the liver cancer is hepatocellular carcinoma (HCC).

[0016] An example method for treating liver cancer is described. The method includes predicting a risk of recurrence of a liver cancer in a subject after liver transplantation as described herein, recommending the subject as a candidate for a liver transplant procedure based on the prediction, and performing the liver transplant procedure on the subject.

[0017] An example system for predicting the likelihood of liver cancer recurrence into a liver transplant is described. The system includes a trained machine learning model and a computing device including a processor and a memory, the memory having computer-executable instructions stored thereon. The computing device is configured to receive gene expression data related to a liver tissue sample for a subject having a liver cancer, input the gene expression data into the trained machine learning model, and receive a risk of recurrence of the liver cancer in the subject after liver transplantation, where the risk of recurrence is predicted by the trained machine learning model.

[0018] In some implementations, the computing device is further configured to receive mutation data related to the liver tissue sample, and input the mutation data into the trained machine learning model.

[0019] In some implementations, the computing device is further configured to receive a radiology-based parameter related to the liver cancer, and input the radiology-based parameter into the trained machine learning model.

[0020] Alternatively or additionally, in some implementations, the trained machine learning model is configured to predict the risk of recurrence as a probability score. In other implementations, the trained machine learning model is configured to predict the risk of recurrence by classifying the subject into one of a plurality of categories.

[0021] Alternatively or additionally, the trained machine learning model is a support vector machine (SVM), a random forest model, a logistic regression model, or a k-top scoring pairs (k-TSP) model.

[0022] In some implementations, the computing device is further configured to provide a treatment recommendation based on the prediction. For example, the treatment recommendation is to perform a liver transplant procedure on the subject.

[0023] Alternatively or additionally, the liver cancer is hepatocellular carcinoma (HCC).

[0024] It should be understood that the above-described subject matter may also be implemented as a computer-controlled apparatus, a computer process, a computing system, or an article of manufacture, such as a computer-readable storage medium.

[0025] Other systems, methods, features and/or advantages will be or may become apparent to one with skill in the art upon examination of the following drawings and detailed description. It is intended that all such additional systems, methods, features and/or advantages be included within this description and be protected by the accompanying claims.

### BRIEF DESCRIPTION OF THE DRAWINGS

[0026] The components in the drawings are not necessarily to scale relative to each other. Like reference numerals designate corresponding parts throughout the several views.

[0027] FIG. 1 is a diagram illustrating a machine learning model for predicting a risk of recurrence of a liver cancer in a subject after liver transplantation according to implementations described herein.

[0028] FIG. 2 is an example computing device.

[0029] FIG. 3 is a flow chart of procedures for training and validation of genome prediction model. The procedure starts with the identification of cancer cases by the year of liver transplant surgery using 2012 as the demarcation. All cases before the first half of 2012 were used the training set, while cases after the second half of 2012 were used as the testing set. The cancer areas and benign tissues from the non-liver organ of the paraffin block were needle-cored and used as “cancer” and “normal” tissues, respectively. All clinical information was blind to the researchers before the prediction.

[0030] FIGS. 4A-4F is a receiver operating characteristic (ROC) analysis of genome prediction model. FIG. 4A is training set ROC based on top 500 differentially expressed genes between recurrence and non-recurrence samples from the transcriptome sequencing using Leave-One-Out Cross-Validation (LOOCV) strategy with Random Forest method. FIG. 4B is testing set ROC based on the algorithm determined in the training set of FIG. 4A. FIG. 4C is training set ROC based on transcriptome and exome sequencing results using Random Forest method. FIG. 4D is testing set ROC based on the algorithm determined in the training set of FIG. 4C. FIG. 4E is ROC of pooled training and testing cohorts based on transcriptome sequencing using LOOCV strategy with Random Forest method. FIG. 4F is ROC of pooled training and testing cohorts based on transcriptome and exome sequencings using LOOCV strategy with Random Forest method.

[0031] FIGS. 5A-5F is a Kaplan-Meier analysis of genome prediction model. FIG. 5A is a training set Kaplan-Meier analysis based on 500 differentially expressed genes from the transcriptome sequencing using LOOCV strategy with Random Forest method. FIG. 5B is a testing set Kaplan-Meier analysis based on the algorithm determined in the training set of FIG. 5A. FIG. 5C is a training set Kaplan-Meier analysis based on transcriptome and exome sequencing results using Random Forest method. FIG. 5D is a testing set Kaplan-Meier analysis based on the algorithm determined in the training set of FIG. 5C. FIG. 5E is a Kaplan-Meier analysis of pooled training and testing cohorts based on transcriptome sequencing using LOOCV strategy with Random Forest method. FIG. 5F is a Kaplan-Meier analysis of pooled training and testing cohorts based on transcriptome and exome sequencings using LOOCV strategy with Random Forest method.

[0032] FIGS. 6A-6F is a ROC analysis of Milan criteria with the genome prediction model. FIG. 6A is a ROC analysis based on Milan criteria in the training set. FIG. 6B is a ROC analysis based on Milan criteria in the testing set. FIG. 6C is a ROC analysis based on Milan criteria in the combined training and testing sets. FIG. 6D is a ROC analysis of the training set based on Milan/transcriptome k-top scoring pairs (k-TSP) prediction model using LOOCV. FIG. 6E is a ROC analysis of the testing set based on Milan/transcriptome k-TSP prediction algorithm determined in FIG. 6D. FIG. 6F is a ROC analysis of the combined training and testing sets based on Milan/transcriptome k-TSP prediction model using LOOCV.

[0033] FIGS. 7A-7F is a Kaplan-Meier analysis of Milan criteria with the genome prediction model. FIG. 7A is a Kaplan-Meier analysis based on Milan criteria in the training set, FIG. 7B is a Kaplan-Meier analysis based on Milan criteria in the testing set, and FIG. 7C is a Kaplan-Meier analysis based on Milan criteria in the combined training and testing sets. FIG. 7D is a Kaplan-Meier analysis of the training set based on Milan/transcriptome k-TSP prediction model using LOOCV. FIG. 7E is a Kaplan-Meier analysis of the testing set based on Milan/transcriptome k-TSP prediction algorithm determined in FIG. 7D. FIG. 7F is a Kaplan-Meier analysis of the combined training and testing sets based on Milan/transcriptome k-TSP prediction model using LOOCV.

[0034] FIGS. 8A-8C illustrate transcriptomic alteration related to recurrence and mutation pathways of HCC samples. FIG. 8A depicts Hierarchical clustering of HCC samples based on top 500 differential expression genes between non-recurrence and recurrence HCC samples. FIG. 8B is a Heat map of five signaling pathways based on the differential mutation numbers in the pathways between non-recurrence and recurrence samples. FIG. 8C depicts Gene expression alterations and connections based on Gene ontology analysis.

[0035] FIGS. 9A-9F is a ROC analysis of Milan criteria with the transcriptome/mutation pathways RF prediction model. FIG. 9A is a ROC analysis based on Milan criteria in the training set, FIG. 9B is a ROC analysis based on Milan criteria in the testing set, and FIG. 9C is a ROC analysis based on Milan criteria in the combined training and testing sets. FIG. 9D is a ROC analysis based on Milan/transcriptome/mutation pathways RF prediction model in the training set. FIG. 9E is a ROC analysis of testing set based on the algorithm developed from FIG. 9D. FIG. 9F is a ROC analysis based on Milan criteria and the transcriptome/mutation pathways RF prediction model in the combined training and testing sets.

[0036] FIGS. 10A-10F is a Kaplan-Meier analysis of Milan criteria with the transcriptome/mutation pathways RF prediction model. FIG. 10A is a Kaplan-Meier analysis based on Milan criteria in the training set, FIG. 10B is a Kaplan-Meier analysis based on Milan criteria in the testing set, and FIG. 10C is a Kaplan-Meier analysis based on Milan criteria in the combined training and testing sets. FIG. 10D is a Kaplan-Meier analysis based on Milan/transcriptome/mutation pathways RF model in the training set. FIG. 10E is a Kaplan-Meier analysis of the testing set based on the algorithm developed from FIG. 10D. FIG. 10F is a Kaplan-Meier analysis based on Milan/transcriptome/mutation pathways RF prediction model in the combined training and testing sets.

[0037] FIGS. 11A-11F is a ROC analysis of k-TSP genome prediction model. FIG. 11A is a Training set ROC analysis based on top gene pairs from the transcriptome sequencing using LOOCV strategy with k-TSP method. FIG. 11B is a Testing set ROC analysis based on the algorithm determined in the training set of FIG. 11A. FIG. 11C is a Training set ROC based on transcriptome and exome sequencing results using k-TSP method. FIG. 11D is a Testing set ROC based on the algorithm determined in the training set of FIG. 11C. FIG. 11E is a ROC based on transcriptome sequencing, exome sequencing and Milan criteria on the training set using LOOCV strategy with k-TSP method. FIG. 11F is a Testing set ROC based on the algorithm determined in the training set of FIG. 11E.

[0038] FIGS. 12A-12F is a Kaplan-Meier analysis of genome prediction model. FIG. 12A is the training set Kaplan-Meier analysis based on top gene pairs from the transcriptome sequencing using LOOCV strategy with k-TSP method. FIG. 12B is the testing set Kaplan-Meier analysis based on the algorithm determined in the training set of FIG. 12A. FIG. 12C is the training set Kaplan-Meier analysis based on transcriptome and exome sequencing results using k-TSP method. FIG. 12D is the testing set Kaplan-Meier analysis based on the algorithm determined in the training set of FIG. 12C. FIG. 12E is a Kaplan-Meier analysis based on transcriptome sequencing, exome sequencing and Milan criteria on the training set using LOOCV strategy with k-TSP method. FIG. 12F is the testing set Kaplan-Meier analysis based on the algorithm determined in the training set of FIG. 12E.

[0039] FIG. 13 illustrates samples plots based on the scores generated by Milan/transcriptome/mutation pathways k-TSP model. LOOCV was performed. Incorrectly predicted samples were marked by cross-boxes, while correctly predicted samples were marked by solid circles. Red indicates recurrence samples. Blue indicates non-recurrence samples. TN—true negative; FN—false negative; TP—true positive; FP—false positive.

[0040] FIGS. 14A-14B is a principle component analysis (PCA) of 64 HCC samples based on top 500 ranked differentially expressed genes between recurrence and non-recurrence samples. FIG. 14A is a PCA of 38 samples from the training set. FIG. 14B is a PCA of 26 samples from the testing set. “Recur” shading indicates recurrence samples. “Non-recur” shading indicates non-recurrence samples.

[0041] FIGS. 15A-15C illustrates transcriptomic alteration related to recurrence and mutation pathways of HCC samples based on k-TSP model. FIG. 15A is a Hierarchical clustering of HCC samples based on 47 pairs of genes. FIG. 15B is a Heat map of three pairs of signaling pathways based on the mutation numbers in the samples. FIG. 15C depicts Gene expression alteration and connections based on Gene ontology analysis.

[0042] FIGS. 16A-16B are graphs illustrating pathway ranking by based on the adjusted p-value of the pathway impacted by expression alterations. FIG. 16A depicts Pathway ranking based on transcriptome RF analysis. FIG. 16B depicts Pathway ranking based on transcriptome k-TSP analysis.

[0043] FIG. 17 is Table 1, which includes clinical features of HCC transplant patients in an example described herein.

[0044] FIG. 18 is Table 2, which includes multiple cancer nodule predictions from HCC patients in an example described herein.

[0045] FIG. 19 is Supplemental Table 1, which includes machine learning model training and testing validation results from an example described herein.

[0046] FIG. 20 is Supplemental Table 2, which includes mutation counts for training sample sets from an example described herein.

[0047] FIG. 21 is Supplemental Table 3, which includes differential gene expression scores of 500 genes for a random forest prediction model from an example described herein.

[0048] FIG. 22 is Supplemental Table 4, which includes differential gene expression scores of 86genes for a k-TSP prediction model from an example described herein.

[0049] FIG. 23 is Table 3, which illustrates the top-500 differentially expressed genes for random forest modelling according to an example implementation.

[0050] FIG. 24 is Table 4, which illustrates the top-43 pairs of differentially expressed genes for k-TSP modelling according to an example implementation.

[0051] FIG. 25 is Table 5, which illustrates the top-5 mutation pathways impacted by expression alterations for random forest modelling according to an example implementation. FIG. 26 is Table 6, which illustrates the top-3 mutation pathway pairs impacted by expression alterations for k-TSP modelling according to an example implementation. FIG. 27 is Table 7, which illustrates the genes associated with the top-5 mutation pathways shown in FIG. 25.

[0052] FIG. 28 is Table 8, which illustrates the genes associated with the top-3 mutation pathway pairs shown in FIG. 26.

### DETAILED DESCRIPTION OF THE INVENTION

[0053] Described herein are machine learning-based systems and methods for predicting a risk of recurrence of a liver cancer in a subject after liver transplantation. Optionally, the liver cancer may be hepatocellular carcinoma (HCC). As described herein, HCC is a common type of liver cancer. Additionally, HCC oftentimes occurs in subjects with underlying liver disease such as cirrhosis or alcoholic fatty liver disease. And as a consequence, liver transplantation is the mainstay treatment since it eliminates risk of new tumor formation from the underlying liver disease. Unfortunately, post-transplant HCC recurrence is still a possibility. In other words, HCC recurs in the transplanted liver in some patients who undergo liver transplantation.

[0054] Predicting recurrence of HCC in a subject post-transplant, however, is a difficult task. For example, conventional techniques for selecting HCC patients for liver transplantation such as the Milan criteria or Extended Toronto criteria have been shown to have issues including being overly restrictive and/or fail to achieve sufficient prediction accuracy.

[0055] The machine learning-based systems and methods described herein address problems associated with the conventional techniques. As described herein, the machine learning-based systems and methods are capable of accurately predicting recurrence of HCC in liver transplant patients. Such information can be used clinically to guide and deliver treatment (e.g., select candidates for liver transplantation). In some implementations, the machine learning-based systems and methods are based on a transcriptome analysis. In other implementations, the machine learning-based systems and methods are based on both transcriptome and exome analyses. In yet other implementations, the machine learning-based systems and methods are based on both transcriptome and radiology analyses. In yet other implementations, the machine learning-based systems and methods are based on transcriptome, exome, and radiology analyses. As described herein, the machine learning-based systems and methods reveal surprising findings about the altered gene expression and/or mutations that play important roles in predicting the behavior of HCC in liver transplant patients.

[0056] Although HCC is provided as an example liver cancer, this disclosure contemplates that the liver cancer may be another type including, but not limited to, cholangiocarcinoma or angiosarcoma. This disclosure contemplates predicting a post-transplantation risk of recurrence of other types of liver cancer in a subject using the machine learning-based systems and methods described herein.

### Terminology

[0057] As used in the specification and claims, the singular form “a,” “an,” and “the” include plural references unless the context clearly dictates otherwise. For example, the term “a cell” includes a plurality of cells, including mixtures thereof.

[0058] The term “about” as used herein when referring to a measurable value such as an amount, a percentage, and the like, is meant to encompass variations of ±20%, ±10%, ±5%, or ±1% from the measurable value.

[0059] “Administration” of “administering” to a subject includes any route of introducing or delivering to a subject an agent. Administration can be carried out by any suitable route, including oral, topical, intravenous, subcutaneous, transcutaneous, transdermal, intramuscular, intra-joint, parenteral, intra-arteriole, intradermal, intraventricular, intracranial, intraperitoneal, intralesional, intranasal, rectal, vaginal, by inhalation, via an implanted reservoir, or via a transdermal patch, and the like. Administration includes self-administration and the administration by another.

[0060] The term “cancer” as used herein is defined as disease characterized by the rapid and uncontrolled growth of aberrant cells. Cancer cells can spread locally or through the bloodstream and lymphatic system to other parts of the body. Examples of various cancers include but are not limited to, breast cancer, prostate cancer, ovarian cancer, cervical cancer, skin cancer, pancreatic cancer, colorectal cancer, renal cancer, liver cancer, brain cancer, lymphoma, leukemia, lung cancer and the like.

[0061] As used herein, the term “comprising” is intended to mean that the systems, compositions and methods include the recited elements, but not excluding others. “Consisting essentially of” when used to define systems, compositions and methods, shall mean excluding other elements of any essential significance to the combination. Thus, a composition consisting essentially of the elements as defined herein would not exclude trace contaminants from the isolation and purification method and pharmaceutically acceptable carriers, such as phosphate buffered saline, preservatives, and the like. “Consisting of” shall mean excluding more than trace elements of other ingredients and substantial method steps. Embodiments defined by each of these transition terms are within the scope of this invention.

[0062] A “control” is an alternative subject or sample used in an experiment for comparison purposes. A control can be “positive” or “negative.”

[0063] “Inhibit”, “inhibiting,” and “inhibition” mean to decrease an activity, response, condition, disease, or other biological parameter. This can include but is not limited to the complete ablation of the activity, response, condition, or disease. This may also include, for example, a 10% reduction in the activity, response, condition, or disease as compared to the native or control level. Thus, the reduction can be a 10, 20, 30, 40, 50, 60, 70, 80, 90, 100%, or any amount of reduction in between as compared to native or control levels.

[0064] “Pharmaceutically acceptable” component can refer to a component that is not biologically or otherwise undesirable, i.e., the component may be incorporated into a pharmaceutical formulation of the invention and administered to a subject as described herein without causing significant undesirable biological effects or interacting in a deleterious manner with any of the other components of the formulation in which it is contained. When used in reference to administration to a human, the term generally implies the component has met the required standards of toxicological and manufacturing testing or that it is included on the Inactive Ingredient Guide prepared by the U.S. Food and Drug Administration.

[0065] “Pharmaceutically acceptable carrier” (sometimes referred to as a “carrier”) means a carrier or excipient that is useful in preparing a pharmaceutical or therapeutic composition that is generally safe and non-toxic, and includes a carrier that is acceptable for veterinary and/or human pharmaceutical or therapeutic use. The terms “carrier” or “pharmaceutically acceptable carrier” can include, but are not limited to, phosphate buffered saline solution, water, emulsions (such as an oil/water or water/oil emulsion) and/or various types of wetting agents.

[0066] The term “increased” or “increase” as used herein generally means an increase by a statically significant amount; for the avoidance of any doubt, “increased” means an increase of at least 10% as compared to a reference level, for example an increase of at least about 20%, or at least about 30%, or at least about 40%, or at least about 50%, or at least about 60%, or at least about 70%, or at least about 80%, or at least about 90% or up to and including a 100% increase or any increase between 10-100% as compared to a reference level, or at least about a 2-fold, or at least about a 3-fold, or at least about a 4-fold, or at least about a 5-fold or at least about a 10-fold increase, or any increase between 2-fold and 10-fold or greater as compared to a reference level.

[0067] The term “reduced”, “reduce”, “suppress”, or “decrease” as used herein generally means a decrease by a statistically significant amount. However, for avoidance of doubt, “reduced” means a decrease by at least 10% as compared to a reference level, for example a decrease by at least about 20%, or at least about 30%, or at least about 40%, or at least about 50%, or at least about 60%, or at least about 70%, or at least about 80%, or at least about 90% or up to and including a 100% decrease (i.e. absent level as compared to a reference sample), or any decrease between 10-100% as compared to a reference level.

[0068] The term “subject” is defined herein to include animals such as mammals, including, but not limited to, primates (e.g., humans), cows, sheep, goats, horses, dogs, cats, rabbits, rats, mice and the like. In some embodiments, the subject is a human.

[0069] The terms “treat,” “treating,” “treatment,” and grammatical variations thereof as used herein, include partially or completely delaying, alleviating, mitigating or reducing the intensity of one or more attendant symptoms of a disorder or condition and/or alleviating, mitigating or impeding one or more causes of a disorder or condition. Treatments according to the invention may be applied preventively, prophylactically, pallatively or remedially. Prophylactic treatments are administered to a subject prior to onset (e.g., before obvious signs of cancer), during early onset (e.g., upon initial signs and symptoms of cancer), or after an established development of cancer. Prophylactic administration can occur for several days to years prior to the manifestation of symptoms of a disease (e.g., a cancer).

### Example Systems

[0070] Referring now to FIG. 1, a block diagram illustrating a machine learning model 100 for predicting a risk of recurrence of a liver cancer in a subject after liver transplantation is shown. As described herein, the liver cancer is optionally HCC. In FIG. 1, the machine learning model 100 is operating in inference mode. The machine learning model 100 has therefore been trained with a data set (or “dataset”). The machine learning model 100 is sometimes referred to herein as a “trained machine learning model.” The machine learning model 100 in FIG. 1 is a supervised learning model. Supervised learning models are known in the art. A supervised learning model “learns” a function that maps an input 110 (also known as feature or features) to an output 120 (also known as target or targets) during training with a labeled data set. In some implementations, the machine learning model 100 is a regression model, i.e., it is configured to predict the subject's risk of liver cancer recurrence as a probability score. In other implementations, the machine learning model 100 is a classifier, i.e., it is configured to classify the subject into one of a plurality of categories based on the subject's risk of liver cancer recurrence. Additionally, it should be understood that the machine learning model 100 shown in FIG. 1 can include one or more machine learning models. For example, in some implementations, a plurality of features (e.g., transcriptome data, exome data, radiology data, or combinations thereof) are input into a single machine learning model. Alternatively, in other implementations, a plurality of features are input into a plurality of machine learning models (e.g., transcriptome data into a first machine learning model, exome data into a second machine learning model, etc.), and the respective outputs are then integrated (e.g., weighted and summed) to obtain the output 120 of the machine learning model 100, which includes the plurality of machine learning models.

[0071] This disclosure contemplates that the machine learning model 100 can be implemented using one or more computing devices (e.g., a processing unit and memory as described herein). In some implementations, the machine learning model is a support vector machine (SVM). In some implementations, the machine learning model is a random forest model. In some implementations, the machine learning model is a logistic regression model. In some implementations, the machine learning model is a k-top scoring pairs (k-TSP) model. It should be understood that SVM, random forest, logistic regression, and k-TSP models are provided only as example machine learning models. This disclosure contemplates that the machine learning model 100 may be another type of model including, but not limited to, linear discriminant analysis (LDA).

[0072] The machine learning model 100 is trained with a data set to maximize or minimize an objective function. In some implementations, the objective function is a cost function, which is a measure of the machine learning model's performance (e.g., error such as L1 or L2 loss). The training algorithm tunes the model's weights and/or bias to minimize the cost function. This disclosure contemplates that any algorithm that finds the maximum or minimum of the objective function can be used for training the machine learning model 100. Machine learning models and training are known in the art and are therefore not described in further detail herein.

[0073] Additionally, the machine learning model 100 can optionally be operably coupled with a computing device such as computing device 200 shown in FIG. 2. For example, the machine learning model 100 and computing device can be coupled through one or more communication links. This disclosure contemplates the communication links are any suitable communication link. For example, a communication link may be implemented by any medium that facilitates data exchange between the machine learning model 100 and computing device including, but not limited to, wired, wireless and optical links. Example communication links include, but are not limited to, a local area network (LAN), a wireless local area network (WLAN), a wide area network (WAN), a metropolitan area network (MAN), Ethernet, the Internet, or any other wired or wireless link such as WiFi, WiMax, 3G, 4G, or 5G. The computing device can transmit data (e.g., the feature(s) or input 110) to the machine learning model 100 and receive data (e.g., target(s) or output 120) from the machine learning model 100.

[0074] As described above, the machine learning model 100 is trained to map the input 110 (or feature(s)) to the output 120 (or target(s)). As described below, the input 110 is gene expression data (transcriptome analysis), mutation data (exome analysis), radiology-based parameters, or combinations thereof, and the output 120 is the subject's risk of recurrence of a liver cancer after liver transplantation. For example, in some implementations described herein, the input 110 is gene expression data (transcriptome analysis), and the output 120 is the subject's risk of recurrence of a liver cancer after liver transplantation. In other implementations described herein, the input 110 is gene expression data (transcriptome analysis) and mutation data (exome analysis), and the output 120 is the subject's risk of recurrence of a liver cancer after liver transplantation. In other implementations described, the input 110 is gene expression data (transcriptome analysis) and radiology-based parameters, and the output 120 is the subject's risk of recurrence of a liver cancer after liver transplantation. In yet other implementations described herein, the input 110 is gene expression data (transcriptome analysis), mutation data (exome analysis), and radiology-based parameters, and the output 120 is the subject's risk of recurrence of a liver cancer after liver transplantation. The input 110 includes the one or more “features” that are input into the machine learning model 100, which predicts the subject's risk of recurrence of a liver cancer after liver transplantation. The subject's predicted risk is therefore the “target” of the machine learning model 100. The output 120 can be a probability score or a classification.

[0075] In some implementations described herein, the input 110 includes data from a transcriptome analysis. For example, the input 110 to the machine learning model 100 can include gene expression data related to a liver tissue sample. This disclosure contemplates that gene expression levels can be obtained using techniques known in the art. For example, gene expression levels can be obtained by sampling liver tissue, extracting messenger Ribonucleic acid (mRNA) from the sample, sequencing the mRNA, and quantifying the gene expression levels as compared to a control. This disclosure contemplates that an SVM, a random forest model, a logistic regression model, or a k-TSP model can be used to predict the subject's risk of recurrence of a liver cancer after liver transplantation based on features from the transcriptome analysis. For example, FIGS. 4A, 4B, 4E, 5A, 5B, and 5E illustrate analysis of a random forest prediction model according to examples described herein, and FIGS. 11A, 11B, 12A, and 12B illustrate analysis of a k-TSP prediction model according to examples described herein.

[0076] In some implementations, a random forest can be used to predict the subject's risk of recurrence of a liver cancer after liver transplantation model, and the gene expression data includes respective gene expression levels for a top-n differentially expressed genes, where n is an integer greater or equal to 10. Optionally, in the examples below, n is 500 (training and testing cohorts separate). Optionally, n is 50 (training and testing cohorts pooled). Although n=500 and n=50 are provided as examples, this disclosure contemplates that n can have other values including, but not limited to, 11, 12, 13, 14, 15, . . . 495, 496, 497, 498, 499, 500 or more. Optionally, in some implementations, n has a value greater than or equal to 50. Optionally, in some implementations, n has a value greater than or equal to 200. Optionally, in some implementations, n has a value between 50 and 500, and optionally between 200 and 500. In one example described herein, the top-500 differentially expressed genes are listed in FIG. 23. The attached sequence listing provides sequences for each of the genes identified in FIG. 23. This disclosure contemplates that each of the genes in FIG. 23 can have a sequence with 80, 85, 90, 95, etc. percent identity to its respective example sequence. In some implementations, the top-50 differentially expressed genes include HOOK1, EFCAB7, CDC7, NUF2, UBE2T, HELLS, RRM1, SYT12, KIF21A, RACGAP1, PRIM1, PTGES3, YEATS4, CCT2, PARPBP, PPP1CC, KNTC1, TMED2, CDKN3, DLGAP5, BUB1B, NUSAP1, CCNB2, KIF23, FANCI, PRC1, CDC6, TOP2A, KPNA2, NDC80, RBBP8, NARS, BUB1, TOPBP1, SMC4, NCAPG, CENPE, PLK4, CENPU, CENPQ, TTK, FBXO5, ANLN, MELK, DYNLT3, ZNF674, KIF4A, AMMECR1, ZNF449, and BRCC3. In some implementations, the top-500 differentially expressed genes include ENO1, APITD1, MSTIP2, CLIC4, STMN1, TAF12, CDCA8, TRIT1, PPT1, KIF2C, PRDX1, CMPK1, GPX7, HOOK1, EFCAB7, DEPDC1, CRYZ, FUBP1, TTLL7, CDC7, GLMN, RPAP2, CCDC18, TMED5, DNTTIP2, SNX7, LRRC39, EXTL2, PRMT6, STXBP3, GPSM2, LAMTOR5, CHDIL, HIST2H3C, CCT3, PCP4L1, NUF2, CENPL, DARS2, ASPM, UBE2T, PRELP, PIGR, DTL, CENPF, EPRS, LIN9, GREM2, EXO1, ATP5C1, COMMD3-BMI1, ITGB1, OGDHL, CDK1, ZCCHC24, ADIRF, LIPA, KIF11, CEP55, HELLS, SMC3, SLC18A2, PRDX3, EDRF1, MKI67, MGMT, RRM1, EIF4G2, FAR1, NUCB2, HSD17B12, MTCH2, CDCA5, SYT12, SSH3, ANAPC15, DDIAS, RAB30-AS1, SCARNA9, TAFID, ZBTB16, NNMT, APOA1, TTC36, CCDC15, CHEK1, NCAPD3, TSPAN9, RAD51AP1, CIR, CD163L1, KIF21A, TMEM106C, TUBA1B, TROAP, RACGAP1, APOF, ATP5B, PRIM1, PTGES3, NACA, XRCC6BP1, TMEM5, NUP107, YEATS4, CCT2, NAP1L1, PAWR, CCDC53, NUP37, PARPBP, HSP90B1, CRY1, TCHP, GPN3, PPP1CC, RFC5, CIT, COX6A1, DYNLL1, MLEC, KNTC1, CDK2AP1, TMED2, ZNF664, SKA3, CDK8, EXOSC8, CKAP2, DIAPH3, BORA, DNAJC3, RAP2A, TM9SF2, KDELC1, PARP2, BCL2L2-PABPN1, COCH, SCFD1, PPP2R3C, MBIP, POLE2, CDKN3, CNIH1, CGRRF1, WDHD1, DLGAP5, KTN1, PSMA3, SLC38A6, TDP1, TMEM251, VRK1, HSP90AA1, CDCA4, EMC7, BUB1B, CASC5, OIP5, NUSAP1, PDIA3, CEP152, DTWD1 ,MYO5C, TEX9, CCNB2, GTF2A2, USP3-AS1, VWA9, TIPIN, ZWILCH, KIF23, CYP11A1, COX5A, RCN2, EFTUD1, FANCI, IQGAP1, BLM, PRC1, LMF1, LMF1-AS1, SLC9A3R2, CCNF, RMI2, PLK1, SHCBP1, GINS3, NAE1, NUTF2, MPHOSPH6, ACADVL, GPS2, SHBG, ZNF624, PRPSAP2, CPD, PIGW, RPL23, CDC6, TOP2A, ACLY, NME1, MKS1, KPNA2, RPL38, SCARNA16, BIRC5, CEP131, SIRT7, ALYREF, THOC1, TYMS, NDC80, PSMG2, RBBP8, ONECUT2, NARS, LOC100505549, SEC11C, TIMM21, GADD45B, TJP3, LRG1, UHRF1, ASF1B, PGLYRP2, PDCD5, GPATCH1, FXYD1, HAMP, APOE, C5AR2, ETFB, A1BG, CPSF3, TAF1B, RRM2, ODC1, PDIA6, DDX1, CENPO, FNDC4, DPY30, MTIF2, CFAP36, VRK2, KIAA1841, FAM136A, BOLA3, TXNDC9, PDCL3, MRPS9, CCDC138, BUB1, CKAP2L, PSD4, MYO7B, MCM6, NEB, FMNL2, PSMD14, DPP4, STK39, KLHL23, SSB, ITGA6, OLA1, H3F3AP4, RBM45, NUP35, FAM171B, OSGEPL1, HSPD1, NOP58, IDH1, SMARCAL1, STK36, NCL, HJURP, PCNA, TMEM230, MCM8, PLCB1, TPX2, DNMT3B, AHCY, RPN2, FAM83D, MYBL2, UBE2C, PFDN4, DOK5, AURKA, SLMO2, CHAF1B, TMPRSS2, COL18A1, FTCD, USP18, GGT5, POLR2F, SUN2, PARVG, FANCD2, GALNT15, TOP2B, STT3B, PTH1R, SLC26A6, NT5DC2, GNL3, ITIH4, ARF4, THOC7, CMSS1, KIAA1524, DZIP3, ZBTB20-AS3, POLQ, CCDC58, UROC1, MCM2, MGLL, RAB43, NPHP3-ACAD11, TOPBP1, PXYLP1, PLOD2, AGTR1, SERP1, SCHIP1, IFT80, SMC4, ACTL6A, RFC4, MASP1, TFRC, TACC3, HGFAC, NCAPG, CNGA1, DANCR, DCK, H2AFZ, CENPE, CCNA2, ANXA5, PLK4, SLC7A11, SCOC, CENPU, DEPDC1B, IPO11, CENPK, CCNB1, CENPH, CDK7, SMN1, POC5, TBCA, TTC37, ERAP2, TMED7, KIF20A, EGR1, HSPA9, PAIP2, CD14, PCDHB15, CCDC69, HMMR, CCNG1, RARS, NPM1, CANX, RIOK1, PAK1IP1, DEK, TDP2, GMNN, LRRC16A, HIST1H2AL, HIST1H1B, HIST1H3I, HIST1H2BO, ZNF165, IER3, KIFC1, UQCC2, RPS10-NUDT3, PPIL1, GLO1, TOMM6, HSP90AB1, CENPQ, MCM3, EFHC1, TTK, SNX3, CD164, ASF1A, FBX05, CCR6, BZW2, HNRNPA2B1, TAX1BP1, GGCT, ANLN, CCT6A, ASL, TMEM60, HGF, CYP3A7, DNAJC2, NUP205, TRIM24, EZH2, RARRES2, NCAPG2, FAM86B3P, PDLIM2, ADRA1A, NUGGC, MCM4, UBE2V2, PRKDC, NSMAF, SDCBP, SNHG6, TRAM1, LRRCC1, CPNE3, NBN, TMEM67, INTS8, CCNE2, POLR2K, PABPC1, YWHAZ, RRM2B, ATP6V1C1, DCAF13, EIF3E, EMC2, NUDCD1, EIF3H, RAD21, MAL2, DSCC1, MTBP, TATDN1, SQLE, KIAA0196, PTK2, MELK, GNA14, CEP78, IARS, CTNNAL1, ADAMTS13, TCEANC, APIS2, SCML1, SCML2, YY2, APOO, DYNLT3, ATP6AP2, GPR34, FUNDC1, ZNF674-AS1, ZNF674, MSN, PDZD11, KIF4A, RPS4X, ABCB7, UPRT, TAF9B, PGK1, ZNF711, RPL36A, GLA, MORF4L2, NXT2, AMMECR1, RPL39, NKAPP1, UTP14A, SLC25A14, STK26, HPRT1, MOSPD1, ZNF449, FMR1, G6PD, CMC4, BRCC3, and VBP1.

[0077] In some implementations, a k-TSP model can be used to predict the subject's risk of recurrence of a liver cancer after liver transplantation model, and the gene expression data includes respective gene expression levels for a top-q pairs of differentially expressed genes, where q is an integer greater or equal to 10. Optionally, in the examples below, q is 23 (training and testing cohorts separate). Optionally, q is 47 (training and testing cohorts pooled). Although q=23 and q=47 are provided as examples, this disclosure contemplates that n can have other values including, but not limited to, 11, 12, 13, 14, 15, . . . 44, 45, 46, 47 or more. In one example described herein, the top-43 pairs of differentially expressed genes are listed in the table shown in FIG. 24. The attached sequence listing provides sequences for each of the genes identified in FIG. 24. This disclosure contemplates that each of the genes in FIG. 24 can have a sequence with 80, 85, 90, 95, etc. percent identity to its respective example sequence.

[0078] Additionally, in some implementations described herein, the input 110 includes data from an exome analysis. In other words, the input 110 can include data from both transcriptome and exome analyses. For example, the input 110 to the machine learning model 100 can further include mutation data related to the liver tissue sample. This disclosure contemplates that mutation data can be obtained using techniques known in the art. For example, mutation data can be obtained by sampling liver tissue, extracting Deoxyribonucleic acid (DNA) from the sample, sequencing the DNA, and identifying somatic mutations. Somatic mutations can be identified based on a comparison of the liver tissue sample DNA sequences to a control set of DNA sequences derived from a control subject or population that either has no cancer or no cancer recurrence. In some implementations, the mutation data includes a number of somatic mutations present in the liver tissue sample. In some implementations, the mutation data includes a number of somatic mutations present in a top-m mutation pathways, where m is an integer greater or equal to 5. Optionally, m is 5. Although m=5 is provided as an example, this disclosure contemplates that m can have other values including, but not limited to, 6, 7, 8, 9, . . . 26, 27, 28, 29, 30 or more. FIGS. 16A and 16B illustrate example ranking of pathways impacted by expression alterations according to examples described herein. Additionally, FIG. 25 illustrates the top-5 mutation pathways impacted by expression alterations for random forest modelling according to one example. The genes associated with the top-5 mutation pathways of FIG. 25 are listed in the Table 7 shown in FIG. 27. The attached sequence listing provides sequences for each of the genes identified in Table 7. This disclosure contemplates that each of the genes in Table 7 can have a sequence with 80, 85, 90, 95, etc. percent identity to its respective example sequence. Alternatively or additionally, in some implementations, the mutation data includes a number of somatic mutations present in a top-r mutation pathways pairs, where r is an integer greater or equal to 3. Optionally, ris 3. Although r=3 is provided as an example, this disclosure contemplates that r can have other values including, but not limited to, 4, 5, 6, 7, 8, 9, . . . 26, 27, 28, 29, 30 or more. Additionally, FIG. 26 includes a table that illustrates the top-3 mutation pathway pairs impacted by expression alterations for k-TSP modelling according to one example. The genes associated with the top-3 mutation pathways pairs of FIG. 26 are listed in the Table 8 shown in FIG. 28. The attached sequence listing provides sequences for each of the genes identified in Table 8. This disclosure contemplates that each of the genes in Table 8 can have a sequence with 80, 85, 90, 95, etc. percent identity to its respective example sequence. In one example described herein, a random forest model is used to predict the subject's risk of recurrence of a liver cancer after liver transplantation based on features from the transcriptome and exome analyses. For example, FIGS. 4C, 4D, 4F, 5C, 5D, and 5F illustrate analysis of a random forest prediction model according to examples described herein. This disclosure contemplates that other machine learning models such as an SVM, a logistic regression model, or a k-TSP model can be used to predict the subject's risk of recurrence of a liver cancer after liver transplantation based on features from the transcriptome and exome analyses. For example, FIGS. 11C, 11D, 12C, and 12D illustrate analysis of a k-TSP prediction model according to examples described herein.

[0079] Additionally, in some implementations described herein, the input 110 includes data from an imaging analysis. In other words, the input 110 can include data from both transcriptome and imaging analyses. This disclosure contemplates that imaging modalities for detecting and characterizing liver tumors include, but are not limited to, ultrasound, computed tomography (CT), magnetic resonance imaging (MRI), and positron emission tomography (PET). It should be understood that ultrasound, CT, MRI, and PET are provided only as examples and that other imaging modalities may be used. For example, the input 110 to the machine learning model 100 can include one or more radiology-based parameters related to the liver cancer. In some implementations, a radiology-based parameter is based on a number of tumor nodules associated with the liver cancer. Alternatively or additionally, a radiology-based parameter is based on a size of tumor nodules associated with the liver cancer. This disclosure contemplates that a radiology-based parameter can be based on other characteristics of the liver cancer. In some implementations, the radiology-based parameter can be based on a combination of characteristics of the liver cancer (e.g., number and size of nodules). Optionally, the radiology-based parameter is Milan criteria, which are a set of criteria used to assess a subject's candidacy for liver transplantation. The Milan criteria are known in the art and therefore not described in further detail herein. Although Milan criteria are provided as an example radiology-based parameter, this disclosure contemplates using other metrics (e.g., the extended Toronto criteria) to characterize the liver cancer. In one example described herein, a k-TSP model is used to predict the subject's risk of recurrence of a liver cancer after liver transplantation based on features from the transcriptome and imaging analyses. For example, FIGS. 6D, 6E, 6F, 7D, 7E, and 7F illustrate analysis of a k-TSP prediction model according to examples described herein. This disclosure contemplates that other machine learning models such as an SVM, a random forest model, or a logistic regression model can be used to predict the subject's risk of recurrence of a liver cancer after liver transplantation based on features from the transcriptome and imaging analyses.

[0080] Alternatively, in some implementations described herein, the input 110 includes data from transcriptome, exome, and imaging analyses. In other words, the input 110 to the machine learning model 100 can include gene expression data, mutation data, and radiology-based parameters related to the liver cancer. In one example described herein, a random forest model is used to predict the subject's risk of recurrence of a liver cancer after liver transplantation based on features from the transcriptome, exome, and imaging analyses. For example, FIGS. 9D, 9E, 9F, 10D, 10E, and 10F illustrate analysis of a random forest prediction model according to examples described herein. This disclosure contemplates that other machine learning models such as an SVM, a k-TSP model, or a logistic regression model is used to predict the subject's risk of recurrence of a liver cancer after liver transplantation based on features from the transcriptome, exome, and imaging analyses. For example, FIGS. 11E, 11F, 12E, and 12F illustrate analysis of a k-TSP prediction model according to examples described herein.

[0081] It should be appreciated that the logical operations described herein with respect to the various figures may be implemented (1) as a sequence of computer implemented acts or program modules (i.e., software) running on a computing device (e.g., the computing device described in FIG. 2), (2) as interconnected machine logic circuits or circuit modules (i.e., hardware) within the computing device and/or (3) a combination of software and hardware of the computing device. Thus, the logical operations discussed herein are not limited to any specific combination of hardware and software. The implementation is a matter of choice dependent on the performance and other requirements of the computing device. Accordingly, the logical operations described herein are referred to variously as operations, structural devices, acts, or modules. These operations, structural devices, acts and modules may be implemented in software, in firmware, in special purpose digital logic, and any combination thereof. It should also be appreciated that more or fewer operations may be performed than shown in the figures and described herein. These operations may also be performed in a different order than those described herein.

[0082] Referring to FIG. 2, an example computing device 200 upon which the methods described herein may be implemented is illustrated. It should be understood that the example computing device 200 is only one example of a suitable computing environment upon which the methods described herein may be implemented. Optionally, the computing device 200 can be a well-known computing system including, but not limited to, personal computers, servers, handheld or laptop devices, multiprocessor systems, microprocessor-based systems, network personal computers (PCs), minicomputers, mainframe computers, embedded systems, and/or distributed computing environments including a plurality of any of the above systems or devices. Distributed computing environments enable remote computing devices, which are connected to a communication network or other data transmission medium, to perform various tasks. In the distributed computing environment, the program modules, applications, and other data may be stored on local and/or remote computer storage media.

[0083] In its most basic configuration, computing device 200 typically includes at least one processing unit 206 and system memory 204. Depending on the exact configuration and type of computing device, system memory 204 may be volatile (such as random access memory (RAM)), non-volatile (such as read-only memory (ROM), flash memory, etc.), or some combination of the two. This most basic configuration is illustrated in FIG. 2 by dashed line 202. The processing unit 206 may be a standard programmable processor that performs arithmetic and logic operations necessary for operation of the computing device 200. The computing device 200 may also include a bus or other communication mechanism for communicating information among various components of the computing device 200.

[0084] Computing device 200 may have additional features/functionality. For example, computing device 200 may include additional storage such as removable storage 208 and non-removable storage 210 including, but not limited to, magnetic or optical disks or tapes. Computing device 200 may also contain network connection(s) 216 that allow the device to communicate with other devices. Computing device 200 may also have input device(s) 214 such as a keyboard, mouse, touch screen, etc. Output device(s) 212 such as a display, speakers, printer, etc. may also be included. The additional devices may be connected to the bus in order to facilitate communication of data among the components of the computing device 200. All these devices are well known in the art and need not be discussed at length here.

[0085] The processing unit 206 may be configured to execute program code encoded in tangible, computer-readable media. Tangible, computer-readable media refers to any media that is capable of providing data that causes the computing device 200 (i.e., a machine) to operate in a particular fashion. Various computer-readable media may be utilized to provide instructions to the processing unit 206 for execution. Example tangible, computer-readable media may include, but is not limited to, volatile media, non-volatile media, removable media and non-removable media implemented in any method or technology for storage of information such as computer readable instructions, data structures, program modules or other data. System memory 204, removable storage 208, and non-removable storage 210 are all examples of tangible, computer storage media. Example tangible, computer-readable recording media include, but are not limited to, an integrated circuit (e.g., field-programmable gate array or application-specific IC), a hard disk, an optical disk, a magneto-optical disk, a floppy disk, a magnetic tape, a holographic storage medium, a solid-state device, RAM, ROM, electrically erasable program read-only memory (EEPROM), flash memory or other memory technology, CD-ROM, digital versatile disks (DVD) or other optical storage, magnetic cassettes, magnetic tape, magnetic disk storage or other magnetic storage devices.

[0086] In an example implementation, the processing unit 206 may execute program code stored in the system memory 204. For example, the bus may carry data to the system memory 204, from which the processing unit 206 receives and executes instructions. The data received by the system memory 204 may optionally be stored on the removable storage 208 or the non-removable storage 210 before or after execution by the processing unit 206.

[0087] It should be understood that the various techniques described herein may be implemented in connection with hardware or software or, where appropriate, with a combination thereof. Thus, the methods and apparatuses of the presently disclosed subject matter, or certain aspects or portions thereof, may take the form of program code (i.e., instructions) embodied in tangible media, such as floppy diskettes, CD-ROMs, hard drives, or any other machine-readable storage medium wherein, when the program code is loaded into and executed by a machine, such as a computing device, the machine becomes an apparatus for practicing the presently disclosed subject matter. In the case of program code execution on programmable computers, the computing device generally includes a processor, a storage medium readable by the processor (including volatile and non-volatile memory and/or storage elements), at least one input device, and at least one output device. One or more programs may implement or utilize the processes described in connection with the presently disclosed subject matter, e.g., through the use of an application programming interface (API), reusable controls, or the like. Such programs may be implemented in a high level procedural or object-oriented programming language to communicate with a computer system. However, the program(s) can be implemented in assembly or machine language, if desired. In any case, the language may be a compiled or interpreted language and it may be combined with hardware implementations.

### Example Methods

[0088] Provided herein are methods of predicting a risk of recurrence of the liver cancer in the subject after liver transplantation. For example, the method can include receiving gene expression data related to a liver tissue sample for a subject having a liver cancer. This disclosure contemplates that the gene expression data can be received by a computing device such as the computing device 200 shown in FIG. 2. The method can also include inputting the gene expression data into a trained machine learning model such as the machine learning model 100 shown in FIG. 1. Gene expression data is described above and therefore not described in further detail here. The method can further include predicting, using the trained machine learning model, a risk of recurrence of the liver cancer in the subject after liver transplantation. In these implementations, the subject's risk of recurrence of a liver cancer after liver transplantation is predicted based on features from the transcriptome analysis alone.

[0089] Optionally, in some implementations, the method can further include receiving mutation data related to the liver tissue sample; and inputting the mutation data into the trained machine learning model. Mutation data is described above and therefore not described in further detail here. In these implementations, the subject's risk of recurrence of a liver cancer after liver transplantation is predicted features on data from both the transcriptome and exome analyses.

[0090] Optionally, in some implementations, the method can further include receiving a radiology-based parameter related to the liver cancer; and inputting the radiology-based parameter into the trained machine learning model. Radiology-based parameters are described above and therefore not described in further detail here. In these implementations, the subject's risk of recurrence of a liver cancer after liver transplantation is predicted based on features from both the transcriptome and imaging analyses.

[0091] Optionally, in some implementations, the method can further include receiving mutation data related to the liver tissue sample and a radiology-based parameter related to the liver cancer; and inputting the mutation data and the radiology-based parameter into the trained machine learning model. In these implementations, the subject's risk of recurrence of a liver cancer after liver transplantation is predicted based on features from all three of the transcriptome, exome, and imaging analyses.

[0092] Optionally, in some implementations, the method can further include providing a treatment recommendation based on the prediction. For example, the treatment recommendation is optionally to perform a liver transplant procedure on the subject. It should be understood a subject with a relatively lower risk of cancer recurrence is a better candidate for liver transplantation than a subject with a relatively higher risk of cancer recurrence. In other words, as described herein, it is possible that a liver cancer such as HCC recurs in a subject even after liver transplantation. The machine learning-based systems and methods described herein are capable of predicting the risk of recurrence of liver cancer, and such information can be used to provide a treatment recommendation such as selecting a suitable candidate for liver transplantation.

[0093] Optionally, in some implementations, the method can further include performing a liver transplant procedure on a subject. For example, the liver transplant procedure can be performed on a subject for which the machine learning-based systems and methods described herein have predicted a relatively low risk of cancer recurrence.

[0094] It should also be understood that the foregoing relates to preferred embodiments of the present invention and that numerous changes may be made therein without departing from the scope of the invention. The invention is further illustrated by the following examples, which are not to be construed in any way as imposing limitations upon the scope thereof. On the contrary, it is to be clearly understood that resort may be had to various other embodiments, modifications, and equivalents thereof, which, after reading the description herein, may suggest themselves to those skilled in the art without departing from the spirit of the present invention and/or the scope of the appended claims. All patents, patent applications, and publications referenced herein are incorporated by reference in their entirety for all purposes.

### EXAMPLES

### Example 1

### Methods

[0095] All the human samples in the experiment were obtained in accordance with the guidelines approved by the Institutional Review Board of the University of Pittsburgh. All the methods were carried out in accordance with relevant guidelines and regulations. Informed-consent exemptions were obtained from University of Pittsburgh Institutional Review Board.

[0096] Tissue samples. The 128 tissue specimens in the study were obtained from the University of Pittsburgh Medical Center archived tissue deposit center in compliance with institutional regulatory guidelines (See FIG. 17, Table 1). Cancer tissues were identified through Hematoxylin and Eosin staining. The position of the cancer in the slide was matched with the tissue block, and circled. The identified positions were then used to obtain needle cores from the cancer tissues. Non-liver and benign tissues away from the cancer were used as matched normal control. The sample size was estimated by power analysis and availability of the clinical specimens. The processes and protocols followed the guidelines approved by the Institutional Review Board of University of Pittsburgh. All cancer samples were obtained through needle coring of the paraffin tissue blocks.

[0097] Transcriptome sequencing. Paraffin was removed by incubating the tissue cores with xylene overnight. The RNA extraction and the transcriptome sequencing procedures were described previously (10-17). Briefly, total RNA was extracted from the tissue cores using TRIzol methods. DNase1 was used to degrade DNA, and a RIBO-Zero™ Magnetic Kit (Epicentre, Madison, WI) was used to remove ribosomal RNA from the samples. RNA was reverse transcribed to cDNA, and a TruSeq·8 RNA Sample Prep Kit v2 (Illumina, Inc. San Diego, CA) was used for library preparation. The procedure was guided by the manufacturer's manual. The quality of the transcriptome library was analyzed with qPCR using Illumina sequencing primers and quantified in an Agilent 2000 Bioanalyzer. The sequencing procedure followed the manual for paired-end sequencing with 200 cycles as specified for the HiSeq 2500 or with 300 cycles as specified for the NextSeq550 platform by Illumina.

[0098] Exome sequencing. Illumina TruSeq DNA Exome prep kit was used to prepare the exome library. Briefly, the extracted DNA (100 ng) was fragmented in Covaris sonicator to 200 bp length. This was followed by ends repairing, adenylation of 3′ end, and adapters ligation. After the clean-up by magnetic beads, the DNA fragments were PCR amplified for 8 cycles of 98° C. 20 seconds, 60° C. for 20 seconds and 72° C. for 30 seconds. The amplified DNA was applied to hybridize the probes, and the hybridized probes were captured by Streptavidin magnetic beads. After repeating the probe hybridization and probe capturing, the enriched DNA fragments were amplified for 8 cycles of 98° C. for 10 seconds, 60° C. for 35 seconds, and 72° C. for 30 seconds. The libraries were then assessed for quality and quantity in an Agilent 2000 Bioanalyzer. The sequencing procedure followed the manual for paired-end sequencing with 200 cycles as specified for the HiSeq 2500 or with 300 cycles as specified for the NextSeq550 platform by Illumina.

[0099] Bioinformatics analysis for transcriptome sequencing data. The sequencing quality control was first performed on RNA-seq data through FastQC (https://www.bioinformatics.babraham.ac.uk/projects/fastqc/). Adapter sequences and low quality reads were trimmed out by Trimmomatic (18). After pre-processing, surviving reads were aligned to human reference genome hg19 by aligner Hisat2 (19). Gene fragments per kilobase per million reads (FPKM) were quantified by Cufflinks (20). All the pipelines were run by default parameters.

[0100] Bioinformatics analysis for whole-exome sequencing data. DNA specimens from paired data (tumor and benign tissue for the same patient) were collected for whole exome sequencing (WES). Similar as RNA-seq data, each WES data first went through the pipeline of quality control (https://www.bioinformatics.babraham.ac.uk/projects/fastqc/) and filtering (18). Reads that passed the quality control were then aligned to human reference genome hg19 by Burrows-Wheeler Aligner mem function (21). Tool Picard (http://broadinstitute.github.io/picard/) was then applied to sort, index and mark duplicates on the aligned reads. Genome Analysis Toolkit (22) analysis pipeline was then employed to perform the realignment and mutation calling. Eventually, paired-samples (tumor and normal) were matched to call somatic mutation by GATK Mutect2 (22). All the pipelines were run by default parameters.

[0101] Prediction model on transcriptome expression profiles. Genome-wide gene expression profiles were quantified across all the tumor cases. FPKM values were first log2 scaled. Several machine learning algorithms were applied on the transcriptome expression data: support vector machine (SVM) (23), random forest (RF) (24, 25), linear discriminant analysis (LDA) (26), logistic regression (27) and k-top scoring pairs (k-TSP) (28). Quantile normalization across the training and testing cohorts was applied to correct the batch effect for the first four algorithms, while k-TSP is a non-parametric method where quantile normalization is not required. For all these methods, leave-one-out cross-validation (LOOCV) was performed on the training cohort to evaluate the prediction algorithms and select the best parameters (the best top number of genes or paired-genes). Then the best algorithm was applied to the whole training cohort to train a model and apply to the testing cohort. Eventually, the training and testing cohorts were pooled together to generate the best model for the prediction of recurrence of a new case. All the biostatistical analyses were performed by R programming and available R packages: ‘randomForest’, ‘MASS’, ‘e1071’ and ‘switchBox’ (29).

[0102] Prediction model integrating transcriptome expression and gene mutation. All the machine learning algorithms applied to transcriptome analysis were used to integrate both RNA and DNA data. At the RNA level, gene expressions were used as features, which is similar to the model only working on transcriptome expression data. At the DNA level, somatic mutations were called on each tumor-normal pair individually. Known Gene Ontology (GO) and Kyoto Encyclopedia of Genes and Genomes (KEGG) pathways with defined functional gene sets were collected from the public database (30, 31). Total number of genes with somatic mutations was then calculated for each functional pathway and used as DNA-level features.

[0103] For the machine learning models RF, SVM, LDA and logistic regression, both transcriptome expression at RNA-level and pathway mutation at DNA-level were employed as prediction features. Random forest regression prediction was used to predict a probability score for recurrence. The score ranges from 0 to 1, where score>0.5 represents recurrence and score<0.5 means non-recurrence prediction. For k-TSP model, it was applied to transcriptome expression and gene mutation profiles individually. To combine the two omics datasets, scores calculated from the transcriptome expression data and scores from the gene mutation data were weighted and summed for the prediction. The final score ranges from −1 to 1, where a positive score represents recurrence and a negative score means non-recurrence for binary prediction. Similar to the model only involving transcriptome expression data, the model integrating both the RNA and DNA was first applied to the training cohort. The best parameters selected by LOOCV were used as the final model for the training cohort and then applied to the testing cohort for evaluation. In the final stage, both cohorts were pooled to provide a final prediction model on leave-one-out cross-validation. All the biostatistical analyses were performed by R programming and available R packages (29).

[0104] Prediction model integrating transcriptome expression, gene mutation and Milan score. Similar to transcriptome expression and gene mutation integration, multiple machine learning models were employed to integrate RNA expression, DNA mutation, and Milan score. For k-TSP model, it assigned a weight to the RNA score, DNA score and Milan score (−1 for ‘in’ and 1 for ‘out’). The final prediction score is the sum of all three weighted scores. For RF, SVM, LDA and logistic regression, the following were employed as features contributing to prediction: gene expression, pathway mutation, and Milan score. RF generated a probability score ranging from 0 to 1, where a score higher than 0.5 indicates recurrence, and a score less than 0.5 predicts nonrecurrence.

[0105] Downstream functional pathway analysis. When combining the training and testing data, the top 500 differentially expressed genes (DEGs) were selected by the ranking of p-values. These genes were then used for functional pathway analysis. Four pathway databases were collected for the enrichment test: Gene Ontology (GO) (30), Kyoto Encyclopedia of Genes and Genomes (KEGG) (31), Reactome (32) and BioCarta (33). Top significant enriched pathways were selected by FDR=5%. Genes involved in selected pathways were used for network analysis. Clustering heatmap, pathway barplot and network figure were generated by R programming (package ComplexHeatmap (34) and ggplot (35) and Cytoscape software (36).

[0106] Statistical analysis. All the statistical analyses were performed by R programming. The receiver operating characteristic (ROC) curves and Kaplan-Meier analyses were analyzed and plotted by R/Bioconductor packages survival (https://CRAN.R-project.org/package=survival), PROC (37), ggfortify (38) and GGally (https://CRAN.R-project.org/package=GGally).

### Example 2

### Pre-Determination of Training Cohort and Testing Cohort

[0107] In previous studies, it was shown that the alterations of genome and gene expression occur in human hepatocellular carcinoma and are associated with the aggressiveness of the cancers (39, 40). However, it is unclear whether these changes contain predictive values for the clinical prognosis of HCC patients undergoing liver transplants. To examine whether the alterations of gene expressions and genome in the HCC are predictive of the cancer recurrence of HCC in the liver transplant patients, two cohorts based on the surgical timeline were constructed for transcriptome and exome sequencing analyses. The training cohort (38 cases) included HCC samples obtained from patients who had liver transplants from 1988 to the first half of 2012, while the testing cohort (26 cases) included HCC samples from the second half of 2012 to 2019. The results of the transcriptome and exome analyses of the training cohort were combined to develop a classification algorithm as a training set (FIG. 3). The algorithm was then applied to predict the clinical outcomes of the cases from the testing set (second cohort).

### Example 3

### Transcriptome Sequencing to Predict HCC Outcomes

[0108] The transcriptome analysis was performed using Random Forest (RF) (24, 25) model where all the genes were ranked based on their differential expression between recurrence and nonrecurrence samples. The top 10 differentially expressed genes were first used to predict the recurrence status of the cases in the training set using the leave-one-out cross-validation (LOOCV) method. Subsequently, top 20, 30, 40, 50, 100, 200, 500, or 1000 differentially expressed genes were added to train the model and to examine whether addition of genes improved the results. The final model was selected based on the best Youden Index (sensitivity +specificity −1). As shown in FIG. 4A, 500 differentially expressed genes were found to produce the best results in predicting the cancer recurrence for HCC patients. The Receiver Operating Characteristic (ROC) curve yielded an area under the curve (AUC) of 0.87 and a p-value of 2.8×10⁻⁹. The LOOCV model based on 500 genes produced 84.2% accuracy, with a sensitivity of 80% and specificity of 87% (FIG. 19, Supplemental Table 1). When this algorithm was applied to the testing cohort, the AUC of the ROC was 0.806 and a p-value of 0.00049 (FIG. 4B). The accuracy was 73.1%, with 87.5% sensitivity and 66.7% specificity (FIG. 19, Supplemental Table 1).

### Example 4

### Mutation Pathways Analysis to Enhance Prediction of HCC Outcomes

[0109] To examine whether genome mutations of HCC have roles in predicting the clinical outcomes of the HCC transplant patients, exome sequencing was performed on the same HCC samples and their matched non-liver benign tissue samples from both cohorts. Somatic mutations were identified by subtracting the single-nucleotide variants in the cancer sample with the matched normal tissue from the same individual. A total of 30,090 somatic mutations were identified in 64 HCC samples of both cohorts, with an average 470 (15-2657) mutations per HCC sample (FIG. 20, Supplemental Table 2). These mutations were distributed in 6977 pathways based on Gene Ontology (GO) and Kyoto Encyclopedia of Genes and Genomes (KEGG). The difference of mutation numbers between the recurrence and non-recurrence cases in each pathway was ranked through t-tests. The pathway with the smallest p-value was ranked at the top. The top 5 mutation pathways were then combined with the 500 genes from the transcriptome sequencing to examine whether mutation status in the pathways improves the transcriptome prediction. This model was then added with top 10, 15, 20, 25, or 30 pathways to examine whether additional differential mutation pathways improve the prediction rate. The model with the best Youden Index was selected through LOOCV. As shown in FIGS. 4C and D, the combination of 5 mutation pathways and 500 differential expressed genes in the training set improved the accuracy to 86.8% with a sensitivity of 86.7% and specificity of 87% (AUC=0.87 and p=5.2×10₋₂₄). When this algorithm was applied to the testing set, the accuracy was 77% (AUC=0.764 and p=0.0065), with a sensitivity of 100% and specificity of 66.7% (FIG. 19, Supplemental Table 1). When both training and testing set data were combined to create a prediction model based on LOOCV method, the transcriptome model predicted 81.3% correctly (AUC=0.896 and p=2.2×10₋₂₄, FIG. 4E), while mutation pathways and transcriptome combination generated a correct prediction of 84.4% (AUC=0.894 and p=7.3×10⁻²⁴) with a sensitivity of 78.3% and specificity of 87.8% (FIG. 4F and FIG. 19, Supplemental Table 1).

[0110] Using transcriptome analysis alone, the survival analysis in the training set showed that 87% of the transplant patients predicted as non-recurrent enjoyed recurrence-free survival up to 298.8 months, while patients predicted as recurrence had a 20% 3-year recurrence-free survival rate (p=1.6×10⁻⁶, FIG. 5A). When the same algorithm from the training set was applied to the testing set, the patients predicted as non-recurrence had a 92.3% recurrence-free survival up to 60 months, while the patients predicted as recurrence had only about 46% recurrence-free survival in a similar period (p=0.01, FIG. 5B). The combination of transcriptome and mutation pathways analyses showed that the recurrence-free survival rates reached 90.9% for the patients predicted as non-recurrence in the training set and 100% in the testing set, while the patients predicted as recurrence had the recurrence-free survival rates of 18.8% (p=2.5×10⁻⁷) in the training set and 42.9% (p=0.002) in the testing set (FIG. 5C and 5D). These results suggest a mild improvement of the prediction of recurrence-free survival when mutation pathways analysis was added to the prediction model. When both training and testing cohorts were combined, similar mild improvement of survival prediction by transcriptome and mutation pathways model was shown: 87.8% patients predicted as non-recurrence by the transcriptome/mutation pathways RF model experienced at least 3 years of recurrence-free survival versus 85.4% by the transcriptome RF model, while only 21.7% patients predicted as recurrence by the transcriptome/mutation pathways RF model survived recurrence-free for the similar period versus 26.1% for the transcriptome RF model (FIG. 5E and 5F).

### Example 5

### Role of Milan Criteria in Predicting the Recurrence of HCC in the Transplant Patients

[0111] Milan criteria is a radiology-based parameter defined by the size and number of HCC tumor nodules. Based on Milan-in (low risk of recurrence) and Milan-out (high risk of recurrence) assessment, the prediction rate of the recurrence for the entire cohort is 76.6%, with a sensitivity of 78.2% and specificity of 75.6%. To investigate whether the addition of Milan criteria improves the prediction rate of the genome prediction model, the transcriptome/mutation pathways model and Milan score were combined to create a transcriptome/mutation pathways/Milan RF model to predict the likelihood of HCC recurrence of the liver transplant patients. As shown in FIGS. 9 and 10, even though the transcriptome/mutation pathways/Milan

[0112] RF model offered significant improvement of the prediction rates over the Milan criteria, the addition of the Milan criteria did not improve the prediction rate of transcriptome/mutation pathways RF model in the training analysis or training to testing analysis (FIG. 19, Supplemental Table 1).

[0113] To examine whether the other machine learning models were improved by Milan criteria, the transcriptome sequence results were analyzed through k-TSP method, a non-parametric algorithm especially suitable for cross-platform studies. The model provides a prediction score based on the k-top scoring pairs, where a positive value indicates recurrence and a negative score means non-recurrence prediction. The k-TSP model was applied to the training set for LOOCV with different numbers of top gene pairs (5, 7, 9 . . . , 49) and the best model was selected by the highest Youden Index. The transcriptome k-TSP model alone yielded 79% accuracy in the training analysis, 73.1% in the testing analysis and 79.7% in the combined training and testing analyses (FIGS. 11 and 12, and FIG. 19, Supplemental Table 1). The combination of Milan criteria and transcriptome sequencing produced significant improvement over either analysis alone (FIGS. 6 and 7): The Milan/transcriptome k-TSP model generated 79% prediction rate in the training analysis, 80.8% in the testing analysis, and 84.4% in the combined training and testing cross validation analysis. Interestingly, when DNA mutation pathway analysis was combined with the Milan/transcriptome k-TSP model, mixed results were obtained: The Milan/transcriptome/mutation pathways k-TSP model improved the prediction to 89.5% in the training set and 87.5% in the combined training and testing set, but dropped the prediction rate to 73.1% in the testing analysis (FIG. 19, Supplemental Table 1, FIGS. 11, 12 and 13). These results suggest that Milan criteria may improve the prediction of k-TSP machine learning model, particularly the k-TSP transcriptome analysis, when they were combined into an integrative prediction model.

[0114] Survival analysis showed that 94% HCC patients with Milan “in” enjoyed a recurrence-free survival of 3 years or more in the training set. However, the 3-year recurrence-free survival for Milan “in” patients decreased to 80% in the testing set and 86% in the combined data sets (FIG. 7(A-C)). The Milan/transcriptome k-TSP model showed a 90% 3-year survival rate in the training set when the patients were predicted as non-recurrence (FIG. 7D). The testing validation analysis showed that 83% HCC patients predicted by Milan/transcriptome k-TSP model as nonrecurrence survived up to 60 months without recurrence, while 37.5% patients predicted as recurrence survived similar periods without recurrence (p=0.016, FIG. 7E). When both training and testing cohorts were combined, the cancer-free survival improved to 85.7% for patients predicted as non-recurrence, and 22.7% for patients as recurrence (p=6.18×10⁻⁹, FIG. 7F), extremely similar to the survival results produced by transcriptome/mutation pathways/Milan RF model in the same data set: 85.7% HCC patients with 3 years recurrence-free survival when predicted as non-recurrence, while 22.7% patients with 3 years or longer cancer-free when predicted as recurrence (p=6.54×10⁻¹⁰). These may compare favorably with Milan criteria alone: 86% 3-year survival for Milan “in”, while 35.7% for Milan “out” (p=1.5×10⁻⁵, FIG. 10 (A-F)).

[0115] Next, the entire cohort was divided into low risk of recurrence (Milan-in) and high risk of recurrence (Milan-out) based on Milan criteria. The transcriptome/mutation pathways RF model was applied to predict the outcomes. When Milan is “in”, the model predicted 88.9% correctly based on the transcriptome/mutation pathways RF model (FIG. 19, Supplemental Table 1). Interestingly, when Milan is “out”, the model had an accuracy of 82.1%, with 94.4% sensitivity and 60% specificity, including predicting 17 of 18 recurrent patients correctly (FIG. 19, Supplemental Table 1). These results suggest that the genome model may have a significant utility in predicting the clinical outcomes of patients outside the Milan criteria.

### Example 6

### The Impact of Heterogeneity of HCC

[0116] HCC may have significant heterogeneity in terms of genome profile and differentiation even in the same individual (41). A tumor nodule may have different gene expression and mutation profiles from its nearby nodules. To investigate whether the genome prediction model is sufficiently robust to overcome the heterogeneous nature of HCC, 3 individuals with multiple tumor nodules were examined, including an individual (patient #1) having 4 tumor nodules and two individuals (patients #2 and #3) having 2 tumor nodules each. As shown in Table 2, the transcriptome/mutation pathways RF prediction model consistently produced scores indicating HCC recurrence from each of the four tumor nodules of patient #1, matching the clinical outcome of the patient. The transcriptome/mutation pathways RF model correctly predicted the non-recurrence outcomes from 2 tumor nodules of patient #2, while the same model predicted 2 tumor nodules of patient #3 as recurrence outcomes, matching the real clinical results. Of the eight tumor nodules, the genome prediction yielded a 100% (8/8) correct prediction. Overall, the genome prediction model is reasonably robust in predicting the clinical outcomes of HCC samples despite the heterogeneity of the cancers.

### Example 7

### The Signaling Pathways Involved in the Genome Prediction Model

[0117] When the relative expression levels of the top 500 genes were used as parameters, most of the cancers with the non-recurrence outcomes appeared to aggregate together in the hierarchical clustering analysis (FIG. 8A) and principal component analysis (FIG. 14), separating from the samples with the recurrence outcomes. Similar segregation of recurrence and non-recurrence samples was also achieved when using the top 43 pairs of genes from the k-TSP model (FIG. 15A). At the DNA level, the mutations in the pathway of dopamine binding were dominant in the samples from patients with HCC recurrence in the RF analysis (FIG. 8B), while mutations in the pathways of Syntaxin binding, Golgi associated vesicle biogenesis, and the regulation of hormonal metabolic process were included in the k-TSP model (FIG. 15B). The disruption of these pathways may impact the homeostasis and metabolisms of the cancer cells. Thus, these alterations may impact the survival of the cancers. At the transcriptome level, 77 of 86 genes in the k-TSP model overlapped with those from the RF models (FIGS. 21 and 22, Supplemental Table 3 and 4). Genes involving in DNA replication, chromosome segregation and mitoses such as CDKN3, MCM8, MCM6, BUB1B, KIF23 and CDC6 dominated the pathway analyses (FIG. 8C, FIG. 15C and 16). The copy number gain or over-expression of these genes had been previously reported in human cancers (13, 42-44).

[0118] These changes may facilitate the DNA replication and growth of cancer cells.

### Example 8

### Discussion

[0119] Liver transplantation is one of the main approaches to treat liver cancers. It is particularly useful for HCC patients with late-stage cirrhosis or other non-functional liver conditions. Milan criteria have been a useful criterion for gauging the suitability of liver transplant in the last 25 years.

[0120] While most patients inside the Milan criteria experienced cancer-free recovery from the liver Transplant (45), the criteria were considered overly strict, and excluded many patients from receiving the liver transplant treatment (45). The current genome prediction model, whether in combination with Milan criteria or not, represents a new alternative to Milan criteria for the selection of liver transplant candidates. Two potential clinical scenarios can be adopted using the genome prediction model: First, Milan criteria is used as the first line of selection of patient candidates for the liver transplant. The patients with “Milan-in” status will be selected as primary candidates for the liver transplant, while the patients with “Milan-out” status will be screened through the genome prediction model for the suitability of the liver transplant. Second, Milan criteria can be integrated into the genome prediction model to screen all HCC candidates for the suitability of the liver transplant. In either scenario, the model may produce an improvement on Milan criteria alone.

[0121] Overfitting is one of the potential pitfalls of molecular prediction models. To overcome the potential overfitting issues, we had preselected the HCC cases into two unconnected cohorts based on the year of transplant surgery. The testing cohort represents an ongoing prospective analysis. To increase the robustness of the analysis, most samples in one cohort (training) were analyzed through Illumina HiSeq2500, while another (testing) were analyzed through NextSeq550. Due to the differences of the platforms, the read lengths of the sequencing were also different: HiSeq2500 platform was limited to 100 bases per read, while NextSeq550DX was 150 bases. The sequencings were performed in different time frames (2015-2017 for the training set, 2018-2020 for the testing set). Despite the non-connected nature of the cohorts, different sequencing platforms and different time frames, the variation in prediction accuracies between the two cohorts was consistently less than 10%, suggesting a good reproducibility of the model. The robustness of the genome prediction model is not limited to RF method. When other machine learning methods such as k-TSP were applied, Support Vector Machine, Linear Discriminant Analysis, or Logistics Regression, similar results were obtained (FIG. 19, Supplemental Table 1).

[0122] A surprising finding in the analysis presented here is that most of the frequent mutations of HCC such as TP53, CTNNB1 and TERT were not found to play important roles in predicting the behavior of HCC in liver transplant patients. Rather, mutations in dopamine signaling pathway such as dopamine receptors and G-protein coupled receptors were frequent in HCC patients who experienced recurrence after the liver transplant, while mutations in genes involving in glucose binding/metabolism such as HKDC1, G6PD, and endonuclease such as RNASE2, XRCC3, were more frequent in HCC patients who were less likely to have cancer recurrence. The altered functions of these proteins may have an impact on the survival and metabolism of the cancer cells. In contrast, the transcriptome analysis shows that the most altered expression genes are those involving DNA synthesis (MCM8, MCM6, TOP2A and CDC7), chromatin segregation (BUB1 and CDC6) and mitosis (NDC80 and PPP1CC) (FIG. 8C and FIG. 15C). The over-expression of these genes are directly related to cancer cell growth and proliferation. However, most of these genes were not mutated.

[0123] The relative irrelevance of the cancer driver mutations associated directly with the malignant behavior of HCC cells for predicting post-transplant recurrence is understandable. The HCC recurrence occurs after circulating HCC cells in the peripheral blood at the time of the transplantation procedure traverse through the circulation, survive the turbulent flow environment of the cardiac valves, proceed through the pulmonary circulation without attaching to the lungs, and finally lodge themselves in the new liver (46, 47). This may be a complicated process and the pathways operating within the cells have to be able to allow them to withstand the immune and shear/stress forces likely to be encountered. The pathways enabling these capabilities are not well understood, and the findings from the current study are likely to provide useful information as to their nature. The mutation and transcriptome analyses appear to uncover two different facets of the cancer genome: a qualitative alteration without much change in expression levels and a quantitative change without the alteration of quality. Each change may have an impact on the cancer cells and leads to recurrence and metastasis. Future dissection of these pathways may help to gain a better understanding of the cancer behavior.

### References

[0124] 1. Yang JD, Hainaut P, Gores GJ, Amadou A, Plymoth A, Roberts LR. A global view of hepatocellular carcinoma: trends, risk, prevention and management. Nat Rev Gastroenterol Hepatol 2019; 16:589-604.
[0125] 2. Siegel RL, Miller KD, Jemal A. Cancer statistics, 2020. CA Cancer J Clin 2020;70:7-30.
[0126] 3. Brenner DA. Thomas E. Starzl: Transplantation pioneer. Proc Natl Acad Sci U S A 2017;114:10808-10809.
[0127] 4. Roayaie S, Schwartz JD, Sung MW, Emre SH, Miller CM, Gondolesi GE, Krieger NR, et al. Recurrence of hepatocellular carcinoma after liver transplant: patterns and prognosis. Liver Transpl 2004;10:534-540.
[0128] 5. de'Angelis N, Landi F, Carra MC, Azoulay D. Managements of recurrent hepatocellular carcinoma after liver transplantation: A systematic review. World J Gastroenterol 2015;21:11185-11198.
[0129] 6. Sapisochin G, Goldaracena N, Laurence JM, Dib M, Barbas A, Ghanekar A, Cleary SP, et al. The extended Toronto criteria for liver transplantation in patients with hepatocellular carcinoma: A prospective validation study. Hepatology 2016;64:2077-2088.
[0130] 7. Sapisochin G, Goldaracena N, Astete S, Laurence JM, Davidson D, Rafael E, Castells L, et al. Benefit of Treating Hepatocellular Carcinoma Recurrence after Liver Transplantation and Analysis of Prognostic Factors for Survival in a Large Euro-American Series. Ann Surg Oncol 2015;22:2286-2294.
[0131] 8. Jain A, Reyes J, Kashyap R, Dodson SF, Demetris AJ, Ruppert K, Abu-Elmagd K, et al. Long-term survival after liver transplantation in 4,000 consecutive patients at a single center. Ann Surg 2000;232:490-500.
[0132] 9. Poynard T, Naveau S, Doffoel M, Boudjema K, Vanlemmens C, Mantion G, Messner M, et al. Evaluation of efficacy of liver transplantation in alcoholic cirrhosis using matched and simulated controls: 5-year survival. Multi-centre group. J Hepatol 1999;30:1130-1137.
[0133] 10. Yu YP, Lin F, Dhir R, Krill D, Becich MJ, Luo JH. Linear amplification of gene-specific cDNA ends to isolate full-length of a cDNA. Analytical Biochemistry 2001;292:297-301.
[0134] 11. Luo JH, Yu YP, Cieply K, Lin F, Deflavia P, Dhir R, Finkelstein S, et al. Gene expression analysis of prostate cancers. Mol Carcinog 2002;33:25-35.
[0135] 12. Yu YP, Landsittel D, Jing L, Nelson J, Ren B, Liu L, McDonald C, et al. Gene expression alterations in prostate cancer predicting tumor aggression and preceding development of malignancy. J Clin Oncol 2004;22:2790-2799.
[0136] 13. Ren B, Yu G, Tseng GC, Cieply K, Gavel T, Nelson J, Michalopoulos G, et al. MCM7 amplification and overexpression are associated with prostate cancer progression. Oncogene 2006;25:1090-1098.
[0137] 14. Yu G, Tseng GC, Yu YP, Gavel T, Nelson J, Wells A, Michalopoulos G, et al. CSR1 suppresses tumor growth and metastasis of prostate cancer. American Journal of Pathology 2006; 168:597-607.
[0138] 15. Yu YP, Yu G, Tseng G, Cieply K, Nelson J, Defrances M, Zarnegar R, et al. Glutathione peroxidase 3, deleted or methylated in prostate cancer, suppresses prostate cancer growth and metastasis. Cancer Res 2007;67:8043-8050.
[0139] 16. Yu YP, Ding Y, Chen Z, Liu S, Michalopoulos A, Chen R, Gulzar ZG, et al. Novel fusion transcripts associate with progressive prostate cancer. Am J Pathol 2014; 184:2840-2849.
[0140] 17. Luo JH, Liu S, Tao J, Ren BG, Luo K, Chen ZH, Nalesnik M, et al. Pten-NOLCI fusion promotes cancers involving MET and EGFR signalings. Oncogene 2020.
[0141] 18. Bolger AM, Lohse M, Usadel B. Trimmomatic: a flexible trimmer for Illumina sequence data. Bioinformatics 2014;30:2114-2120.
[0142] 19. Kim D, Paggi JM, Park C, Bennett C, Salzberg SL. Graph-based genome alignment and genotyping with HISAT2 and HISAT-genotype. Nat Biotechnol 2019;37:907-915.
[0143] 20. Trapnell C, Williams BA, Pertea G, Mortazavi A, Kwan G, van Baren MJ, Salzberg SL, et al. Transcript assembly and quantification by RNA-Seq reveals unannotated transcripts and isoform switching during cell differentiation. Nat Biotechnol 2010;28:511-515.
[0144] 21. Li H, Durbin R. Fast and accurate short read alignment with Burrows-Wheeler transform. Bioinformatics 2009;25:1754-1760.
[0145] 22. McKenna A, Hanna M, Banks E, Sivachenko A, Cibulskis K, Kernytsky A, Garimella K, et al. The Genome Analysis Toolkit: a MapReduce framework for analyzing next-generation DNA sequencing data. Genome Res;20:1297-1303.
[0146] 23. Cortes C, Vapnik V. Support-vector networks. Machine Learning 1995;20:273-297.
[0147] 24. Amit Y, Geman D. Shape quantization and recognition with randomized trees. Neural computation 1997;9.7.
[0148] 25. Bauer E, Kohavi R. An empirical comparison of voting classification algorithms: Bagging, boosting, and variants. Machine Learning 1999;36:105-139.
[0149] 26. McLachlan GJ. Discriminant analysis and statistical pattern recognition. Applied Probability & Statistics 2004:1-526.
[0150] 27. Tolles J, Meurer WJ. Logistic Regression: Relating Patient Characteristics to Outcomes. JAMA 2016;316:533-534.
[0151] 28. Shi P, Ray S, Zhu Q, Kon MA. Top scoring pairs for feature selection in machine learning and applications to cancer outcome prediction. BMC Bioinformatics 2011; 12:375.
[0152] 29. Afsari B, Fertig EJ, Geman D, Marchionni L. switchBox: an R package for k-Top Scoring Pairs classifier development. Bioinformatics 2015;31:273-274.
[0153] 30. Ashburner M, Ball CA, Blake JA, Botstein D, Butler H, Cherry JM, Davis AP, et al. Gene ontology: tool for the unification of biology. The Gene Ontology Consortium. Nat Genet 2000;25:25-29.
[0154] 31. Kanehisa M, Goto S. KEGG: kyoto encyclopedia of genes and genomes. Nucleic Acids Res 2000;28:27-30.
[0155] 32. Jassal B, Matthews L, Viteri G, Gong C, Lorente P, Fabregat A, Sidiropoulos K, et al. The reactome pathway knowledgebase. Nucleic Acids Res 2020;48: D498-D503.
[0156] 33. Rouillard AD, Gundersen GW, Fernandez NF, Wang Z, Monteiro CD, McDermott MG, Ma'ayan A. The harmonizome: a collection of processed datasets gathered to serve and mine knowledge about genes and proteins. Database (Oxford) 2016;2016.
[0157] 34. Gu Z, Eils R, Schlesner M. Complex heatmaps reveal patterns and correlations in multidimensional genomic data. Bioinformatics 2016;32:2847-2849.
[0158] 35. Maag JLV. gganatogram: An R package for modular visualisation of anatograms and tissues based on ggplot2. F1000Res 2018;7:1576.
[0159] 36. Shannon P, Markiel A, Ozier O, Baliga NS, Wang JT, Ramage D, Amin N, et al. Cytoscape: a software environment for integrated models of biomolecular interaction networks. Genome Res 2003; 13:2498-2504.
[0160] 37. Robin X, Turck N, Hainard A, Tiberti N, Lisacek F, Sanchez JC, Muller M. pROC: an open-source package for R and S+ to analyze and compare ROC curves. BMC Bioinformatics; 12:77.
[0161] 38. Yuan Tang, Horikoshi M, Li W. ggfortify: Unified Interface to Visualize Statistical Results of Popular R Packages. The R Journal 2016;8:474-485.
[0162] 39. Luo JH, Ren B, Keryanov S, Tseng GC, Rao UN, Monga SP, Strom S, et al. Transcriptomic and genomic analysis of human hepatocellular carcinomas and hepatoblastomas. Hepatology 2006;44:1012-1024.
[0163] 40. Nalesnik MA, Tseng G, Ding Y, Xiang GS, Zheng ZL, Yu Y, Marsh JW, et al. Gene deletions and amplifications in human hepatocellular carcinomas: correlation with hepatocyte growth regulation. Am J Pathol 2012; 180:1495-1508.
[0164] 41. Fransvea E, Paradiso A, Antonaci S, Giannelli G. HCC heterogeneity: molecular pathogenesis and clinical implications. Cell Oncol 2009;31:227-233.
[0165] 42. Yu S, Wang G, Shi Y, Xu H, Zheng Y, Chen Y. MCMs in Cancer: Prognostic Potential and Mechanisms. Anal Cell Pathol (Amst) 2020;2020:3750294.
[0166] 43. He DM, Ren BG, Liu S, Tan LZ, Cieply K, Tseng G, Yu YP, et al. Oncogenic activity of amplified miniature chromosome maintenance 8 in human malignancies. Oncogene 2017;36:3629-3639.
[0167] 44. Santarius T, Shipley J, Brewer D, Stratton MR, Cooper CS. A census of amplified and overexpressed human cancer genes. Nat Rev Cancer 2010; 10:59-64.
[0168] 45. Pavel MC, Fuster J. Expansion of the hepatocellular carcinoma Milan criteria in liver transplantation: Future directions. World J Gastroenterol 2018;24:3626-3636.
[0169] 46. Rejniak KA. Circulating Tumor Cells: When a Solid Tumor Meets a Fluid Microenvironment. Adv Exp Med Biol 2016;936:93-106.
[0170] 47. Krog BL, Henry MD. Biomechanics of the Circulating Tumor Cell Microenvironment. Adv Exp Med Biol 2018; 1092:209-233.

1. A computer-implemented method comprising:
receiving gene expression data related to a liver tissue sample for a subject having a liver cancer;
inputting the gene expression data into a trained machine learning model; and
predicting, using the trained machine learning model, a risk of recurrence of the liver cancer in the subject after liver transplantation.

2. The computer-implemented method of claim 1, wherein the trained machine learning model is a supervised machine learning model.

3. The computer-implemented method of claim 1, wherein the trained machine learning model is configured to predict the risk of recurrence as a probability score.

4. The computer-implemented method of claim 1, wherein the trained machine learning model is configured to predict the risk of recurrence by classifying the subject into one of a plurality of categories.

5. The computer-implemented method of claim 1, wherein the trained machine learning model is a support vector machine (SVM), a random forest model, a logistic regression model, or a k-top scoring pairs (k-TSP) model.

6. The computer-implemented method of claim 1, wherein the gene expression data comprises respective gene expression levels for a top-n differentially expressed genes, where n is an integer greater or equal to 10.

7. The computer-implemented method of claim 6, wherein n is greater than or equal to 50.

8. The computer-implemented method of claim 6, wherein the top-n differentially expressed genes comprise one or more of HOOK1, EFCAB7, CDC7, NUF2, UBE2T, HELLS, RRM1, SYT12, KIF21A, RACGAP1, PRIM1, PTGES3, YEATS4, CCT2, PARPBP, PPP1CC, KNTC1, TMED2, CDKN3, DLGAP5, BUB1B, NUSAP1, CCNB2, KIF23, FANCI, PRC1, CDC6, TOP2A, KPNA2, NDC80, RBBP8, NARS, BUB1, TOPBP1, SMC4, NCAPG, CENPE, PLK4, CENPU, CENPQ, TTK, FBX05, ANLN, MELK, DYNLT3, ZNF674, KIF4A, AMMECR1, ZNF449, and BRCC3.

9. The computer-implemented method of claim 6, wherein the trained machine learning model is a random forest model.

10. The computer-implemented method of claim 1, wherein the gene expression data comprises respective gene expression levels for a top-q pairs of differentially expressed genes, where q is an integer greater or equal to 10.

11. The computer-implemented method of claim 10, wherein q is 43.

12. The computer-implemented method of claim 10, wherein the top-q pairs of differentially expressed genes comprise one or more of BUB1B and SSH3, MCM8 and OGDHL, NUSAP1 and FNDC4, KIF21A and RAB43, CDC7 and CNGA1, MORF4L2 and ETFB, HELLS and HAMP, PPIL1 and ZCCHC24, MELK and GALNT15, BRCC3 and CCDC69, CCT6A and ASL, CDKN3 and SYT12, RBBP8 and TMPRSS2, KIF23 and LMF1, KPNA2 and SUN2, SMC4 and FXYD1, PPP1CC and FTCD, NUCB2 and NDRG2, PARP2 and IL11RA, VBP1 and AGTR1, TOP2A and TSPAN9, KTN1 and COL18A1, NCAPG and ADAMTS13, STT3B and CD14, SEC11C and C8G, CCNA2 and ADRA1A, CENPQ and UROC1, TTK and PLCH2, FANCI and SHBG, DEK and EGR1, RFC5 and APOF, PTGES3 and TAT, SNX7 and PGLYRP2, CCT2 and PIGR, PRC1 and MGMT, NARS and MASP1, RRM1 and MGLL, TOPBP1 and CTSF, F2 and ITIH4, ANLN and ZNF674, PRIM1 and SULTIA1, RARRES2 and HRG, and CENPU and NNMT.

13. The computer-implemented method of claim 10, wherein the trained machine learning model is a k-TSP model.

14. The computer-implemented method of claim 1, further comprising:
receiving mutation data related to the liver tissue sample; and
inputting the mutation data into the trained machine learning model.

15. The computer-implemented method of claim 14, wherein the mutation data comprises a number of somatic mutations present in the liver tissue sample from the subject.

16. The computer-implemented method of claim 14, wherein the mutation data comprises a number of somatic mutations present in a top-m mutation pathways, where m is an integer greater or equal to 5.

17. The computer-implemented method of claim 16, wherein m is 5.

18. The computer-implemented method of claim 16, wherein the top-m mutation pathways comprise one or more of GO_ENDONUCLEASE_ACTIVITY_ACTIVE_WITH_EITHER_RIBO_OR_DEOXYRIBON UCLEIC_ACIDS_AND_PRODUCING_3_PHOSPHOMONOESTERS, GO_GLUCOSE_BINDING, GO_PALMITOYL_COA_HYDROLASE_ACTIVITY, GO_PEPTIDE_N_ACETYLTRANSFERASE_ACTIVITY, and GO_DOPAMINE_BINDING.

19. The computer-implemented method of claim 16, wherein the trained machine learning model is a random forest model.

20. The computer-implemented method of claim 14, wherein the mutation data comprises a number of somatic mutations present in a top-r mutation pathway pairs, where r is an integer greater or equal to 3.

21. The computer-implemented method of claim 20, wherein r is 3.

22. The computer-implemented method of claim 20, wherein the top-r mutation pathways pairs comprise one or more of GO_SYNTAXIN_BINDING and GO_N_ACYLTRANSFERASE_ACTIVITY, REACTOME_GOLGI_ASSOCIATED_VESICLE_BIOGENESIS and GO_N_ACETYLTRANSFERASE_ACTIVITY, and GO_REGULATION_OF_HORMONE_METABOLIC_PROCESS and GO_PEPTIDE_N_ACETYLTRANSFERASE_ACTIVITY.

23. The computer-implemented method of claim 20, wherein the trained machine learning model is a k-top scoring pairs (k-TSP) model.

24. The computer-implemented method of claim 14, wherein the trained machine learning model is a support vector machine (SVM), a random forest model, a logistic regression model, or a k-top scoring pairs (k-TSP) model.

25. The computer-implemented method of claim 1, further comprising:
receiving a radiology-based parameter related to the liver cancer; and
inputting the radiology-based parameter into the trained machine learning model.

26. The computer-implemented method of claim 25, wherein the radiology-based parameter is based on a size or number of tumor nodules associated with the liver cancer.

27. The computer-implemented method of claim 25, wherein the radiology-based parameter is Milan criteria.

28. The computer-implemented method of claim 25, wherein the trained machine learning model is a k-top scoring pairs (k-TSP) model.

29. The computer-implemented method of claim 25, wherein the trained machine learning model is a support vector machine (SVM), a random forest model, or a logistic regression model.

30. The computer-implemented method of claim 1, further comprising:
receiving mutation data related to the liver tissue sample and a radiology-based parameter related to the liver cancer; and
inputting the mutation data and the radiology-based parameter into the trained machine learning model.

31. The computer-implemented method of claim 30, wherein the trained machine learning model is a random forest model.

32. The computer-implemented method of claim 30, wherein the trained machine learning model is a support vector machine (SVM), a logistic regression model, or a k-top scoring pairs (k-TSP) model.

33. The computer-implemented method of claim 1, further comprising providing a treatment recommendation based on the prediction.

34. The computer-implemented method of claim 33, wherein the treatment recommendation is to perform a liver transplant procedure on the subject.

35. The computer-implemented method of claim 1, wherein the liver cancer is hepatocellular carcinoma (HCC).

36. A method comprising:
predicting a risk of recurrence of a liver cancer in a subject after liver transplantation according to claim 1;
recommending the subject as a candidate for a liver transplant procedure based on the prediction; and
performing the liver transplant procedure on the subject.

37. A system comprising:
a trained machine learning model; and
a computing device comprising a processor and a memory, the memory having computer-executable instructions stored thereon that, when executed by the processor, cause the processor to:
receive gene expression data related to a liver tissue sample for a subject having a liver cancer;
input the gene expression data into the trained machine learning model; and
receive a risk of recurrence of the liver cancer in the subject after liver transplantation, wherein the risk of recurrence is predicted by the trained machine learning model.

38. The system of claim 37, wherein the memory has further computer-executable instructions stored thereon that, when executed by the processor, cause the processor to:
receive mutation data related to the liver tissue sample; and
input the mutation data into the trained machine learning model.

39. The system of claim 37, wherein the memory has further computer-executable instructions stored thereon that, when executed by the processor, cause the processor to:
receive a radiology-based parameter related to the liver cancer; and
input the radiology-based parameter into the trained machine learning model.

40. The system of claim 37, wherein the trained machine learning model is configured to predict the risk of recurrence as a probability score, or predict the risk of recurrence by classifying the subject into one of a plurality of categories.

41. The system of claim 37, wherein the trained machine learning model is a support vector machine (SVM), a random forest model, a logistic regression model, or a k-top scoring pairs (k-TSP) model.

42. The system of claim 37, wherein the memory has further computer-executable instructions stored thereon that, when executed by the processor, cause the processor to provide a treatment recommendation based on the prediction.

43. The system of claim 42, wherein the treatment recommendation is to perform a liver transplant procedure on the subject.

44. The system of claim 37, wherein the liver cancer is hepatocellular carcinoma (HCC).

The application's sequence listing, which the Patent Office published only in electronic form, follows.

SEQUENCE LISTING (963 sequences)

SEQ ID NO: 1 - DNA, 18092 bp, Homo sapiens
  source 1..18092: mol_type = other DNA
gtggggccccagagcgacgctgagtgcgtgcgggactcggagtacgtgacggagccccgagctctcatgcccgccacgccgccccgggccatcccccggagccccggctccgcacaccccagttcggctcaccggtcctatctggggccagagtttcgcccgcaccactacagggccgctggggagtcggggccccccagatctgcccgcctcaagtccgcgggacgtcacccccctttccacgctactgcagccgtcgcagtcccacccctttccgggaggtgagggaatgagtgacggctctcccgacgaatggcgaggcggagctgagggggcgtgccccggaggcgggaagtgggtggggctcgccttagctaggcaggaagtcggcgcgggcggcgcggacagtatctgtgggtacccggagcacggagatctcgccggctttacgttcacctcggtgtctgcagcaccctccgcttcctctcctaggcgacgagacccagtggctaggtaatgattggggaagggctgagcaacgggcaggcggcgcagggcttttctgggcttgtggggctcttttccctccgagggaggcggcgcgcccgcaggcccagcgtggcggggtcgggggcacgtgcaagccgcctccctgggtgggaactggcgcccccgctcaccccgaggcccggggcgggggcgcaatgccaggcgcacgtgctgggcccccgatttctttggaggggaaagtgcagatcaacacgtgattaccgactgcggggccgagtcactgtcagggaaggtcgggagctgcacacgcgagctgcttagcacagcgggagttgggagtggaagttgcttttccatcgtagccaagtgtaaggtttttgggatagacgcagacttagcggcggtggccactcaggccaggcccttcctaaaatggaggagggcggcgatagtggagatggccacgaggctgcggccccctcccccaccggtagcccccgcctctcgcccgcgctcgcggcccgcgcttctgcctagtaagcggtgactcatttaactccgagaaggcacctcttgaggaacctacagcagagccgttagatcattggcaagtcctccaggcgacctcgcccaagttgggcaagagcggctccccggctggccaccaaaaatcgggcctgatctgatttggtttttttttttttttgagttttgctattgttgcccaggctggagtgcaattgcgcgatctcggatctcggttcaccgcaacctcggcctcctgggttcaagcgattctcctacctcagcctcccgagtagctgggattacaggcatgcgccaccacgcccggctaattttgttttttttttgttgttgttgttgttttagtagaggcggtgtttcaccatgttggccaggctggtcttgagctcccgacctcaggtgatccgcccgcctcggcctcccaaagtgctgggattacaggcgtgagccaccgcgctaggccaagaaggatgtattttaagaaagcttcctgttcaatgttcccctgctctgtgcgcttctctgggcggtagggtccattgcttcacttgcctttcaggcccacccgggccctgactgctccattcatttaccgtgtccctaattcggggttccatccaggcagctaaaaaagctgtgaatggtccgggcgcggtggctcacgcctgtaatccgagcactttgggatgccgaggtgggcctcctcaggatcacctgaggtcgggagttagagaccagcctgaccaacgtggtgaaaccccgtctctactgaaaatacaaaaatcgaccaggcgcggtggctcacgcctgtaatcctagcactttgggaggccgaggtgggtggctcacgaggtcaggagatcgagaccatcctactctactaaaccccatctctactaaaaatacaaaaaattagccgggtgtggtggtgggcgcctgtagtcccagctactctggaggcggagcctgcagtgagtcgagatcgtgtcactgcactctagcctgggcgaaagagcgcgactccgtctcaaaaaaaaaaaaaaatcacctgggcgtaatggcaggcgcctgtaatcccacctactcgggaggctgagacaggaggctgaggttgcagtgagccaaaatggcgccattgcactccagtctgggcgacaacagcgaaactccgtctcaaaaaataaaaaaaaaatcacactttattttcacatcctaagacgtttgtctttttttttttttctgagacggagtctctctgtcgcccaggctggagtgtagtggcgcgatctcgactcactgcaagctccacctcccgggttcacaccattcttctgcctcagcctcctctcctgacctcgtgatccaccctcctcggcctcccaaagtgctgggattacaggcgtgagccaccgcgcccggccaagactttctttcgtcttaagtcactaaaatgaaaacaaaagtactgaggcaccctaataaaattgcctttaaaagtatgactgaaatactcaaagtataccacagtggtggcctggagatggggcagggggatattgactggaaatggcctgagataactttttgcagtgatggaaatgttactcgggtatataatttgccaaaacgcaaaattaaatctaaaaatatgtttaaacaaatttgcctttttggaacctagtaaaaagtaagtacctttttttggctaatgaataaaactccattgttacatagacaacaaagccacagaagtgacttcagtaaataattttgaaagttaaaaacctgccacttgccacctcaggacattccagagaagatgttggaggggagcccaggtagataatggctttaaacactaagttcctctcacccacctcagttctataagttgttcagttagtttctttggagagcgccaaggaaaaaagtaagaatgggtttttctttgaggaattggtatttgttgttcattgctggaaattcttgtatttttttttttaaggtggtgttaaaggaagccccttcccttgaagtatcctggtgttcaaagaatctttcctctatttacaaattataaaaccccgttgggaagaaataattagatgtcattattggctggtcctggtggcttacccctataatcatcctagcatgctttgggaggccaaggcaggggaggatcgcttgagcccaggagtttgagagcagcctgggcagcatagtgagaccgccatctcttaaaaaagtaactaaaataaaataaagatgttatcattaatgacataacaacactgaagacccaagtactgtgaaattggaaagtcccaggaagtggcagtagccaagatcacacggtccaaggacttcattgttcctgacttccaaactcagaatttctgatcaaatacctactaagtgaatattaatctgaagaattatgtccaaacttcattcactattttgttttaattctgctacaagcaaggttttcccctggtcccgccaccctctttttggccctaggtggttttgcttgtgaccttcatgtctgttcttggttcctttccattcccatgccagccctcattgttcactcatgacaatagccagtttcagacagctcctgggccactctgcgtcgagcaacacattcatctttctatttggatttgattctccctgggcacacacgtttgtgggctttttctctctctttttttttttttcttttttcttacagaacaagacctcaattgctagggtttaacccatttatgccagaggttgcaaatctttttttgtgaaaaatcagaccttggcaatgacttgagcagtcggataaaagtaactcccacgcccttagcgttccagtaatggaatactaggcataaaaaggttaaggccttccgcagctaggccctaactacttaattaggagaattctcactgctttccagcaggcttttccccccaccctagccagctttcctacatccagtatttagtccagtgctgattctctctagtccacgaacctcggaagtgattccttgaatgagtgaggaaatgcagcattatggcttatggaaaacatgaactgtgtgtttcttctacagaagttcaccatgtctattctcaagatccatgccagggagatctttgactctcgcgggaatcccactgttgaggttgatctcttcacctcaaaaggtatgtgccacctccttggtttccatggttccttccaccgtgcttcattttaaaaattttctacaaatgctggagccttaggaaaaaaaaaatctgttaaagcttttctttctgtctgcacatgctagtaggttgtgattcctgactgtgagggttggggaatttttaggcatggagccagtgtcttgctgtttctcggcttatttttttctttttctttttctttttttttttttttttttttttgagatggagtcttgctctgtcacccaggctggagtgcagtggcatgatttcagcttactgcaacctctgcctcccaggttcaagcaattcttctgtctcagcctcccaagtagctgggactacaggtgtgcaccaccacacctggctaatttttgcatttttgggagagacgggggtttcaccatattggtcaggctggtctcgaactcctgacctcactcaggtgatctgcccgcctctgcctcccaaagtgccggcattataggtgtgagccaccccgcctgatcctgccagctccttggcttaaaaccacataagttggctcctaagtcagtgaagtaaggaagtaaggtgataccacaagaccttgtccctaaaggggcccatcactagttgttggctgacagcttgctgtgaccaaatgcaggatacagtgtgataggatggtatctcttgataaggggagggatagcaggtgtgaatatagcacctttatctctgtgactagaaatcagtcttcagcaaggatcaaggacagtttttacctgtaggctttggaatagtctggaggctctcatttttacctggctgtcaatccctataggaggagttttcttatgaaaaattagagaattgtgaaactccttcctttaagaagaaaatccagtgcctttgtagctctgtgttacctccagcacatggcgcgatggacagagtgggtgaggttggcaaaggagcttcaggcagaatcactcagcggtgctaaactcacagagaactgccagtcggagctgagtcaccatctgtgagtcacaggcctagcagtggaaccccagcccttcccttccccttgcacctcccctccccctcaggaagaaaggatccttgaggcctgacttcgttgggcaaaagaatgcctgagttggctgcttgctgtgtgggctctcaagcactgtggggtttctcactggctttatggggaaccctgagggttctcacaggatgccaagaattcccttcatccagtaagagtggtttgcttagtcaatgggtggaactttctacttggatattaatgaactttaagcaacaaaagaccccagatgctagaagattgttgggagttggacattttgaaattgaaatgaatggaactttctcttgtgtgtcttaatccttttcaaaaaacatgaaatgatggacttgctcagaacctttcatctctctctctccctgtctcatcaacttttttagagcagttttaggttcacagcagaagcaggcggaaggtgcagaggtacataaacccatgagtacccactgcctctgcacatgcgcagcccccccattgtcagcatccccactagagtggtcaacatgcgtgaacacgttatcatcaccaaaagtctgtagactccaagcctcttgttttcatcttgtctttgcctgatccagtgtagggtggatatgtagggagccagggcagctttcaagaaggaagtatgacctgttgatagcgcacactgcagtgcagcagggaacactgctgggtcctttgctagaaatatcttgttggtttctctgcaacatcttccttgacaccatctgttcttttgcctccaccaaagattgcccttgttacaggtataggtttcaccagatggctggtttcagtatctgcaagattacttggttcagttcttacatttattaaactgcgcattttattatctttattccttccccccacatccatcctgtttgccagtttccagttgggcatagaacccctaaaatagcatttagcattgtccaaactgaaacaaatgagctagatactcctcctgagccagttaaattaccctaattttatgcttaacatcaatatagtacctgtctgggcatggtggctcatgcctgtaatcccagcattttgggaggccgaggtgggcagatcacctgagatcaggagttcaagaccagcctggccaacatggtgaaaccccatctttactaaaaataaaaaaactagccgggcgtggtggcaggctgctgtagtcccagttgctggggagcctgatgcaggagaatcgcttgaacccaggaggtggagattgcagtgagccaagatcacgccatacactctagcctgggggatagagcgagattctgtctcaaaagaaaaaaaaagtaccagaacgtcttcaatgccctgtgtggctcgcattggatttctcttgggcagtgctgctggagtaatccacagggcaccaatgcgagcttgtgagggatgcatatttgcctgggtcagaatctacattttaacaagacctccaggtggcatgtaggctctgctgtagaacactttctttctgctagaggaattagtcatctttgcagtaagttctgcagtacaggatcataaacatgtgaaaggcatgaagaacagcccagagcgtttaattcacacagctggtaggaggaagaaacagctccctaatgacaaatgcatctgtgggcgggaggggacttgggattgtgctggaactggatttctgaattgctactacatcttttttcctctcatccaggtctcttcagagctgctgtgcccagtggtgcttcaactggtatctatgaggccctagagctccgggacaatgataagactcgctatatggggaagggtaagccttagaacccacagcccatggcctccctgcttccagccccattcctggccttgcccagtcctgtcctctctgggtggcacttgcacttgcaggtttatggcaggtaaacctgctgtgacccatgatgttgatggaagcagtgcaccaccttgtggacaggaaagttggtgtgtggattccggggttcccgagcctgcatgctctgggtcgagagttccaatgcttgcttctattgcagtttgttcccaatctgcgaaatactccttcacggttaggacaggaacccaagcatgagaacagggcctgttaactaaagaaaagtttccccatctcccaggagggttctgtgggccctccagagatcatcagcctcttcacgggctagaaaggatccagggaaggtctaaccaatgacctgccctgaatggtgagctgcaggtgtgtcatttagtgtgattttcctgttgactgactcataggagccctgctctgtggcagagctagcctctggctgtattcaaattgacttagtgtgtgtgcaacattgacctttctagagatagaacatgtggccaaattacagaaaagcacatagggctagatcacgcattctcagtggggcacccggaaaactccaaaaaggctgcagggaggggacaatgatgaaatcaggttgtgaaacactgggctggtgtcgcagtggtggtgctgggtgttcagtcccgctttaatgctgtaagaagcactctacacacacgaacatgttaccatttgaccgttgtttaatggcgtacgtggggacttagccggagcaggatgatgctgtgccttgatggtaatgagtgctcagtaagtaagcatttgtggaagattgaacgcatggcccctgaaatgctctcctctgctttcctgccccctcactgtctctcactcgcagtccttaatcaccggttctcttctgagtctctctcatttttccttcttcatcctctgctgggcaggcgtctccagacccattaagtatattaatgagttcctggcaccagccctgtgcactcaggtaactgattgaacagcctttagtctgcagttggcgtttccagtgcatggtcttgcaaactaacctccagtcagatcgttctgagccagctgctgttttgtgtggctctaaccctctggggtcctaggtaggagcactcagactgggccggaaagtcctccgattctggggggaaaggggagagggggaagaggtcccacagaaggtcccttggtgggcttccgcgtcggcctcaacagtggttctctctaacaatgctgctcaagcctgttttaaagttaatgtcagtaatttgatttgattgttccttccaggtgtctcaaaggctgttgagcacatcaataaaactattgcgcctgccctggttagcaaggtaggacctgcctcctgataactaatgtgtctaatgccaccagagcgtctcccaggcccaggggctttcctgtttatggaagagcttattctgagagctgtagaagcctattggattccctgtcacgcacgagaacaatccatgcatgacataattctaacctgcccgctgcctcaccccacttttgggagcagatggaattgcatcagaagaatgagacacttcgagccctgaggtttcttcccccctgcaactctctggacctttgaagaaattaagatccagattttaagagtggctctcaggggtgtttgtggtagtgtccatggtgactaatttctcatgaactttggaattatttactataattctactgactttaacagtggagttcctgttaagtaaaatctggaaatctcagtatgtcaaacataaaagagctgctggaggtgaagtagggctggggacccagcaacccacccgactctgcaggttttatctcatttaccctcccttcggcccgtccctccgtaattcctgtggcgctcatcagatgggactggtttgaaaacccctgtctaaaaacactccgggccaggtgcagtggctcacacctgtaatcccagcactttgggaagctgaggtgtgtggatcacttgaggtcaggagttggagaccagtctagccaacatggtgaaaccctatctctactaaaagtacaaaaattggccgggcatggtggtgcacgcctgtagtcccagctacttgggagtctgagacatgagaatcgcttgaagctgggaggcagaggttgcagtgagcagagattgtgccactgcactccagcctgggcaacagagtgagactctgtctcaaaaaataaaaataacaaagctctctaggcccagtccaagcccagccacagcctccgtctattcttgaatctagtccctctcctccatgaattcattctgtacacgagggaaaaggaggagttcctttgttgtctctgtccctgactcgttggtttaggcctggcttttgtggcactctgtaattactccctgcccgaccagcccccagacaaaatgtcttgttaccgttctgtctgcaccaccccctgccagtctcccggacacctccacacataccttgttctctgtcccttcatacccctgcatagtgtgactcacacgatgagcaggatcccctgacttttttttaaccccctagagaaacataccaaactgttagtgagaattgacctctgaagctgtgtgcttgggtaactgcctgcctgttgcagtgatgccttgacaaagctgtgaaagacaccaaattgctcatacagcatgatgggatcagagttgattttctttgcatatttttttatatcaagcacatcatagataaaaataatgccttgttattaatatattagtttaaaatggaatgctgatttttggctgggtgcagtggctaacgcctgtaattccaacactttaggaggactttaggaggctgaggtgggcagatcccttgaggccaggagtttgagaccagcctgggcaacatggcaaagcccatctctataaaaaaaaaatataaaaattagccaggcatgatggtgcatgcctatagtcccagctgagtttggaggatcatttgagcccacgaggtggaggttgcagtgagctgagatcgtgacactgcattcctgccttggcaacagaatgagactctgtcttaaaaaataaaaattaaaaaattaaaaagtaatactgatttttattggattactttgagccagttctcagtacgtcagttttgttactttatagtctcatcaaaaattcattttgatccatcattagacgctttgctaaatgatttcggactacctgcagaaatcatgcctcccatcagaggatgaagatttgccatctttgcagttagccaagagtgagcagcagagcctgcctttcaagggctcagcctgcttgagtgaacagtgagctttgcttatttattgcctatgaaagccatgttcctgggtagcagtggtctacatagcacatacctgacagttctcttgggtgtaaagtcactttgggctccctgggtagactattaaccttttgttacaaaagcattgtctgagagtgccatctctgttgcattgttgggtgaatgcctgataaccatcaaagcaagcagaaggcagttttttgtctccccactgatttttgtcctccactttttttgcttataaaacaaacatcacagaattgattttgatattacacagttccaaagtcagattccatggtaggggagcaaaggctatgcagataagagtggccccaacccctcattctcccctctccctcgtagaaactgaacgtcacagaacaagagaagattgacaaactgatgatcgagatggatggaacagaaaataaatgtgagtggcctgaggtggcgtctttactggggaagatcatgaagtctcctgaagattttaaaacctttcaggaagaggcccatgatcttagtgatgagctacatgagcctgtggtctcttcccatttctttgctttactcttaagaaatcacacttttggccaggtgcggtggctcacgcctgtaatcccaacactttaggaggctgaggcaggtggatcacgaggtcaggagatcgagaccatcctggccaacgtggtgaaaccccgtctccactaaaaaatacaaaaaattagccaggcctggtggtgggcgcctgtagtcccagcaggagaatggtcccgggcggagcttgcagtaagccaagatcctgccgctgcactgcagcctgggcaatagagtgagactctgtctcaaaaaaaaagaaaaaaaaaaattttttttgaatatcaggtgcaaaaccaggtgacaatagcctgtcagtttggttactcagaagagctttgctccttataatgaattcagcaattcctactgttggctggagttgggctctgtcttagaggggaaaagcagtggtgagtccacatagaatgctatttgtatttctagtaacagtgaaatggaggtgtgatgggggaggagatggtgcagaatacaaccctcagggcagtacagcaggagaaaagctggtgaatcagaaatgacttcattccactcggttctcttctgttctagctaagtttggtgcgaacgccattctgggggtgtcccttgccgtctgcaaagctggtgccgttgagaagggggtccccctgtaccgccacatcgctgacttggctggcaactctgaagtcatcctgccagtcccggtgagtggtttattggaacttcccaagcaaggagttgggggtttcagcttgctgttggggacccgagacctcctatgccttgatatcctaacacatgtgactctcccagcacagctctgccccttgttaagtgtgaccttgagcaggtaactcaacttgcctgtgccccaggtcctttatctgcaatggaggctcggggaggaaatgacagcagtactttccttgctaggctgtgagcattacctgacatagtcacaagtgtttctcctggtgatgatgaatttgcagttatcaaaatagacctggcgtgaactggttgcagtagcgcacacctgtagtcccagctaatcaagaggctgaggcaggaggatcacttaaacccaagagtttgagaccagcctctaggcaagaccagtatagtgaaaccctgtctctaaaaacatgagtcagagacctggtgagcatttcacagcaccctggcccctctggtgctcctcaagaagcaagtcttgggctcatctgtgagctagattgggatggtaggaccagaggggcttactgccctgtggggctctctggacccagtgccatgcttctctgctctgctctccccaggcgttcaatgtcatcaatggcggttctcatgctggcaacaagctggccatgcaggagttcatgatcctcccagtcggtgcagcaaacttcagggaagccatgcgcattggagcagaggtttaccacaacctgaagaatgtcatcaaggagaaatatgggaaagatgccaccaatgtgggggatgaaggcgggtttgctcccaacatcctggagaataaagaaggtaaaggcgctagggaaccgcccccccacccagccctgcagcgccagctccctctgttggggggtcgtccacacctgccactgtggaaatctattctttccacctgtagtttgtaaagatcaagacccttcaaacggttttaaggaggaaaaggggagcttcattttattttacttatttttttctttttttttttttttttgagatggagtctctgtcgcccaggctggagtgcagtggcgcaatctcggctcactacaacttccgcctcctgggctcaagtgatacctactagtttggggagccaagtgtctgtccgtctgtcctgctggcagggcagcttagccatggacagcagaccctgagcctgagctctcaacggcacagcctggcgggaggatcctgccatcccgggctgcctccactgggctttctcttggaccccgcttctgctctatttaaggcctgtgccttgggacagctgatctcagctgcttactgtaactgtatcttggccaggacagctgttcctgggcactaaatttgggagcatttgtcagtgagaagggctgctttcttggaaagagagctgaatttcccattttgtatgcaccaagaactctgacccatggtttcttgccccaaagcagaaaaaaagtaactgatgtcagaactactggttggggcctgaacacctgttgatctttgtgttacagtccctgtgtagcagctgttgaagggaagttttctctgtacctacctgttttccaaacctgttgtcaccatctcttcccaggcctggagctgctgaagactgctattgggaaagctggctacactgataaggtggtcatcggcatggacgtagcggcctccgagttcttcaggtctgggaagtatgacctggacttcaagtctcccgatgaccccagcaggtacatctcgcctgaccagctggctgacctgtacaagtccttcatcaaggactacccaggtgagtgttccccgagtgccatctccctttcctgccactgacctgcagcagggcagctggagcatctggctggctggtgatggctgcaaggaggggatggggagggagtgtctgaacttccagctcccgtaggggattcaccactgggtttgcccccagttgtgcatacacagggcttcacagaggttcttgtgtagctaaggagctcgggtgccagcagcgacattgcataataagttgttcacagtcaggagcagaggcagtctgtgctccattagacaggtgagggaaccaagccttcagaatcagaacagccacttggtactgagatgtatcatgcttcctgtgagctgggaatattcattttaggctgtgtgtgtgcacaggatagagactgtgaccacctttctacaggagaggaagctgatggctggctgaataatctgcccgagagcacacagcaaatggtggggcaagaattcagaccaggaaatctgactccagagtctgtgtgtttaaccactaccctaaataacttggtcaaggttgagccaagacccaaactcaggtcttctcacttctgagtctgtggctccattctgattttcagtggcactaaactcaaacaaccctagacaaaaagtgtcctcttcttacaggtcttaaacaaaatttttgaggctgggcatatggtggctcacgcctggaatcctagcacttggagaggctgaaacggcatcacttgagcccaggagtttgagatcagcctagggaacatagcaagactccattgctacaaaaaaataaaataaaataagtagctgggtaggttggcatacccctatagtcccagcgactcaggaagctgaggtgggaggatcatttgatcccaggatttcacagctgcacttagctatgattgcacccctgcactcaagcctgggtgacagagtgagattttttttgttttagatctatagatacccaggattgtgggtgacttttgtcccctgctgcaggagtaggctggggcacattgtttcaaggatcagttggggagctgtccccatcctatgcttttgggcattgtgaggccaggcgagcagcaagtcaagggggaagcaaggctgggcattgcggtggagcacactgggaggatcacactgatgaagcgtgtccctcctttccttagtggtgtctatcgaagatccctttgaccaggatgactggggagcttggcagaagttcacagccagtgcaggaatccaggtagtgggggatgatctcacagtgaccaacccaaagaggatcgccaaggccgtgaacgagaagtcctgcaactgcctcctgctcaaagtcaaccagattggctccgtgaccgagtctcttcaggcgtaagtgtcttcccaggcgagcagctttcccgcagctacggcttgtgaatcagaaaagggcccttttgttctggtgatggggaatcctgctggccagaatgtaggactcgctggaattttaacaggttttgtgtttgaactcaggagccttttaaattaaacaattggggcctgtaatcccaacattttgggaggccaaggcaggaggatcacttgagctcgggagctcaagaccagcctgggcaacatagcaagtagttgtattctgtgaagagctctgtcagagaacactaatctttctcccatcaagggaggctgaacccagtgtttcaactatgacaggagggctaagaaggtcctgggggtggaagagttcaggggagggtgagggttctcctctgtgctcttgacaaagcccaggcatggagggctttagccattaacagcccctccactgctttcctgctggcaccgaggggtaatggcattgggggttatggaaccagaaaatgggatcatgccatctgggttgttccttggcttccaggtgcaagctggcccaggccaatggttggggcgtcatggtgtctcatcgttcgggggagactgaagataccttcatcgctgacctggttgtggggctgtgcactgggcaggtaagaatgagcgtctcctcctttcttctctgacctcaacttcctaggaagacccaaaaccagtgaggctccatgtctgtccccgttttgctcatgtcccctgagtcagtgctcttgtttctgaggctgaacagaatgggggcatgagcgccctgcctgtatgttgtggcccccactttcctagcatcagatcctctagaaattctctctctgacaccacaccctctccctgccagaaatgcctgcaaagcttgtccgctgtaagcaaatggcctttcttttctcctagatcaagactggtgccccttgccgatctgagcgcttggccaagtacaaccagctcctcaggtaaggagggctcctgagaacaaggggcctgtggttcactaggtgggggcctgcactcagtgtaggcactgccctcccccaggagctcctggctctgggaacatgtacaggtgcaggtgcacagtgcagacagccaggccctgagcaggcttaggtcaggacagagttaggcctagactccccctacccacccactgcagcgccaccagaggcaggagcctgttccacacagtgctgccctcttctggtgagaaagaatgggaccccctttgacagctgatgcatgactttcttagagctttcagagagctccttcatatgatctgtttcagcgcatttaacccctgtttgtggatgtggagccagggctgggagggaggaagaaaaggccgaagggcacatggctgggtttccacttgtgagcgctgtggggctgttctggtctccctttcctgtctgtgtccttgggaagcccctgaacaccaggagacttgtccccccgcccgccaccccgctaagttctcccatattaccccttcattcaaactgtatcctggaaattttcaaacatatacaaaaaagcaggtgaacagtagacgcagggcttttttgttgttttgtttgtttgagacagggtcttgccatgtcactcaggctggagtgcagtggggcagtcatagctcactgcagcctcaaactcccattctttttttgctggggaattttatttttatttttttgagagggatctcactctgtcgcccaggctggagtgcagtggctcagtcttggctcactgcaacctctgcctcccagattcaagcaattctcctgtctgagcctcccgagtagctgggattacaggtgcccaccaccatgcctggctaattgttttgtatttttaatagagacggggtttcaccatattggtcaagctgacctcgggtgatcctcccactgtgcctggccccaaaatgtgttggcctttttttttttttttttttttaacatcaagatccaaacagctcacacattttgtcttttaataaggtcactctccttttctccccatgccatttatttgttgtcccttcaatattttttaaaaaacaaaagcattagaatttttatattccaagaaatggcaatgctgacattttactttgctcctctgcaacactgacggggagaggagaggaagagaaggggcggtgggtggagggcacctagcatggtgagttgggatgaggagaactaaatacttttctatatctggcttctcagagaagcacaagtttagagggtttaaagaaggtggacaaactggagagttctgtgttctcaacttcccaggagtggggctgtgtctttgaccacatctaggatgggaaaacttaaaacttgaggtctgacttttcttttttcctccccatctctttacctttctccttcccaagaattgaagaggagctgggcagcaaggctaagtttgccggcaggaacttcagaaaccccttggccaagtaagctgtgggcaggcaagcccttcggtcacctgttggctacacagacccctcccctcgtgtcagctcaggcagctcgaggcccccgaccaacacttgcaggggtccctgctagttagcgccccaccgccgtggagttcgtaccgcttccttagaacttctacagaagccaagctccctggagccctgttggcagctctagctttgcagtcgtgtaattggcccaagtcattgtttttctcgcctcactttccaccaagtgtctagagtcatgtgagcctcgtgtcatctccggggtggccacaggctagatccccggtggttttgtgctcaaaataaaaagcctcagtgacccatgagaat

SEQ ID NO: 2 - DNA, 12713 bp, Homo sapiens
  source 1..12713: mol_type = other DNA
gagctcctgataatgtgtactgcgttacatgatctgtaaatcgtgggctacgcatcctctacacccgactggaacacgctttgcacctatgcgcacacgtgtttcgcggagagtggtgctcagcgttgtgccaggcgctgaatcaggctctggggtgcagcagtgacctcggtggtcatgtccccgcgtcgcccggccacctccgcagagcaagctgagcagggggctggctggaggccgacggcggaatcccctcaacggagcgccgccagggggcgcgcgaggcagggcggagctgcgtactttgtccgcccgcgcggcccgtcgctcgcgccgcggcgggaaaatccgacctggccgcgcaccaccgccccttctcggccctcctgcgtttgcccagggtcggcccgcagtgatggaggaggaggcggagaccgaggagcagcagcgattctcttaccaacaggtacaggaaaacgggggtcgggctgggctggggcaggacggcgtcgagtttctggacagaaaagtacccggcagcccccggcggcttctcatcggcaccccgcccccgggcgccccccgcggctgcgcatgcgttggcttaactgccgcgggtggtgctgggaggcggtttccgcggcaacgcggctggaccctggcctgcgctggctggggaggaagcggttctaggggagcgtgcgggcgccggggtccggcggcgagaggccaccttctggccttgcgatgaatcctcggtttccccttctcagatggggttttcgtgagggtacaacgtcggcattagacattccaggtgacgcccgtacgcggtgggcggttcgggccggagctctggaacgctggccctggaggcgtcgacccctcgttactgatgcagggacgcggtgcggaccagtcaggcccagagctcgtccttagatgtgggttcgaatctctgccccgccaacttgtgatcgtatcgactcggcccagacgcaattttcttctctgcaaaatcgtcataagaataatcacttgtcagggtagctgcgggcatcccattcgttcctttcatcagcgccgggcatatggggcgtcagaggctgagaacgttgccgtgaagaggcttaaaagcaagacccggagtggcgaccttaaagaggacggactgaagaaacgcgggaatgagctccagacgcgggagtttcctctctacaaagttacactgcagcagctgtctaccctgccccttgtcttttgagaagttcaaaccttcagaaaagttgcaagaacacggtacagaatgcccagatgcccgtcaccttgattcaccactagttagcattttgctctgtttgctcccatgcttccctcccagccccgcgattggagaattaattgcagatattttgacacttcgcctttacattttaattctttagtacacatctcccaaaaacaaggcattggctgggcgcggtggctcacgcctgtaattccagcactttgggaggccgaggtgggcagatcacttgaggtcaggagttcgagaccagactggccaacatggaaaccccctctcaactaaaagtacaaaaattagccgagtgtggtggcaggtgcctgtaatcccagctactcgggacgttgaggcaggggaatcgcttgaacccgggaggcggaggttgcagtgagccgagatcgcaccattgcactccagcctgggtgacagagcgagactccatctcagaaaaaaaaaaaaaaaaggcattctcctactacatcatttcaataaattgtcccactcaggaagtgggacaattaattttgataaaactctattgaatgtgcattgtcaagtgcccccacttgtcctaaagatgtttcttttaactgtcttttttccttcatccaggattcagttaaggatggtgcattgcatttagtcatctttggtcctgcctaccctgtttttttttggttggtttttgttttttttgaaacgtagtttcactcttgttgtccaggctggagtgcagtggctccatctcgcctcactgcaacctccacctcccaggttcaggagattctcctgcctcagcctcctgagcagctgggattacaggcccctgccaccacgcccagctaattttgtatgtttagtagagacagtttcaccatgttggccaggctggttttgaactcctgacctcaagtgatctgcccgccttggcctcctaaaatgctgagattacaggtgtgaaccactgtgcccggcctgttcttagtccctagaacagagcctggctctcaatagaccaacaaatgcttactgatgaagctgcaaagatgggctgagaaatttgcccctcagctgtgattagcttgtagacgatttccccccattcatgtaaccaactgttctaggcacttggtaggcagcagtgaacaaaattgacagggtcctgcccttgaggagtttagtgatttagcctctaagtgcagtgataccccagcccagccagggggaggggaggaggaggaggaggaagatctgagaaaaattcctggagccaagagcattcagaagaattcatgtcctgtaccctgacccccacccatacctaaaaaagatgaccttgagccgggcagggtgttgtgggcctgtagtcccagctactcaagaggctgaggcaggaggttcacttgagcccaggagttcgaggctgtagtgtgcagtgatcacacctgtgatcttcgtgcctcccaggttgatgcctctttggcttctcctaccagaggcctcagcttacctagtcttgtgaggtctgaaattcaggaaagtagatgccctcctcatctgtctggcctctatcctgagttcctggacttgggttttggcagttcctcctcctcttgcctatgcgttgaacacttgctggtagattttatgcccttgtgggttcagctgtcatcacgtgcagctcagctgtgtcttcggccccgaggcggagtacccacaggtgggctcaacagaactctgtcgacacgtggctgagaccattgcttagcttgtcttgcaattgaggctcatcctcccctctcggtaattttctgcaaggggtggagagatctttttcagtattgaaaaggtttgccaaggagcagtgagggccccgtggaggtggcctcccaaccctccaaatcgagaggggtgggtgtgccctcttgagcctttcccgtgttgtacttctgtcctctgtgacgtgcaggcctggggctgccaggggcttgcagcagagggatgggatccttctgtattgttgattaactgccttaagggcaaagttccctgcccggtttttcattgtttcccaaacacctagcatatgcccttactgagttggagctctgcagatagtttggaataagtgagtgaaaccactcagggccttggcaggcatcagtctgacctgtctccccactgacttgccatctaatttcttatctttacctgacataaatcataaccattaacaaggaagtaatgtttccacaagtcgcactccagtgggtctcattaacttattagtacacttgaaaagccactcagccattatggaaagcgccagagggattgggctgagcagaccctctccttggtcttcattttttaaggcgtgaaaagctcttatttgcagccttacccgtgaaatattttgatgtttttccccagaggctaaaggcagcagttcactatactgtgggttgtctttgcgaggaagttgcattggacaaagagatgcagttcagcaaacagaccattgcggccatttcggagctgactttccgacagtgtggtatgaagcttcggcctccccagccatgtctgtaaaccccaaaggttgatttcacctgggagcagtgcgtgggtgggagctgtggcgagtctgaccagcagaccaagaatattatcatcctcatgcgttcttcgtgaaacacttctcttcttggctgtgagatgtggatattttatgggaagaactatttttttcctattacactaacactggggcattaacgcctttattttattgttttaaactgccctgatggctagaacattagacattaaattctttatttcagtgctttataacgtttttatatcacccatagtttctttgacagctgagcttgtagcattggtatttgcttgacttcagaggggaaatgaaagacctcacaagccttaactgtagcagaagttaaaggatagtttctagaaaccaaaggcatagtcacaattaacggaagacttgccatgaagggtgaagggctctgggaaggacaaggagatcgtcatgaataaaaagctacaggctcttatggaatggtggggctgctggaaatgcctcctttcacctttaagagggtttgttatattagtcaagtcactgtactggctgtagaaatcaaggcttcactttttctgcttctgaaattagatgggagggtgcctaaagtgtgtatcttttttttctctttcagaaaattttgccaaagaccttgaaatgtttgcaaggtgggtagagaacttgattatccgacactgcgtctgtgtagctttttggggcctctccatctggtgggttatttcaggagagctttagctattcagttttccgtgtgttttgtggaggcttgtctctaatcatggttctgcaagaacatgacgcctccttcaatcacggtgattcacacttatttgaacattttttgaagttttccaagtattttttgttaaagaacccaagttattcagtcccaagtgaaaaaggtgtgaataccatctccaggaccctgaatgctggtgcctgtattaaaaaccatgtcttcgggtggtttgattgctcagggtttgagaacatggtgcctgggggtggccgcccctctgcggagggagctgcagcgtgtccacggtggtaattgcttgcaggtgtacacagaatggcaggcaggggttttcatttgccgcatttgttccgagtaagacgcactccttggaaagtgggtgacttgctttcagctgctaaagcctcagcttttacaggtgatttatgctccgctcttcaattagtaccgcaggtaattgaaaacaattgcaccaaattgcttttatgaagcaatttgaatgacgaaggcctgaaagggcgaaagtgttctaatttgctgccacttggattcggtgccagcctctcccacaccccttacttttcaccttgttcccgttagctctttgtttctcgggtgcgtgttttgaatgaattaaagcagtgggttctcggagggcaagctctcaatctgtcctattcctgtggatattcgtccctgaaaaccgcttagcatcttcagcttggccaaaagggataaggtagtaggaagggataccgatagctcatgtggcttagtcattgctgattcaggcagatgccccttatgtgtggccctcctccccggtgaaagatattaatacctttacttgttatttattagctgtgggaaaaaaaaatgaaaaatttaaatacttaaaaataatatatatatatatacacacacacacacacacacatatacataaatatttatattagagacacagcgtcttggtatgttgcccaggctggtcttgaactcctgtgctcaagcaatcctgccttgggctcccaaagtgctgggattacaggtgtgagccaccatgcccagcctgaaaatacttctgtaaaaattctatttaaaaaatgaaattagaaagagcatggtaacacattaggctttcggatattctgtgttttttaaagtatataagaggttgatttttttttttttttggagacagagtctcactctcgcccaggcgggagtgcagtggtgcaatcttggctcactgcaatctctgcctcctgggttcaagtgattctcctgcctcagcctcctgagtagctgggattacaggcatgtaccaccacatctggctaatttttgtatttttagtagagatggcgtttcaccatgttggccagggcggtcttgaactcctgacctcaagtgatttgcctgcctcagtctcccaaagtgctaggattacaggcgttgagccaccgcgcccggcaaacagttgattttcttttgctgggtactggtggggaaaggggtatgtgcgtgcatgtgagtgtgtgtgtgtatgtgtgtgtgacttagaccataagctccacaaggaagggcgacatcttttatgtaaaagtgtttgtggaggccgggcgccgtggctcacgcctgtaatcctagcactttgggaggctgaggcgggtggatcacctgagctcaggagttcgagaccagcctgggcaacagggtgaaaccctgtctcctaaaatacaaaaaaaaaaaattagctgggcgtggcagcatgcgcctgtaatctcagctactcaaaaggttgaggcaggagaattgcttgaaccagggaggtggaggttgcagtgagtcgagatcgtgccccttcactccagcctgggtgacagagtgagactctgtctctttaaaaaaaaaaaaagaaaagaaaagaaaaaaaaaagtttgtggaaacgctttgtctgagaactgagtgagtgcagagtccagtgatgaggctccaggagtctggggtgcagccagaggcagggaagcaccccctcttcttagcacaacccacaagtacaggtttcctttgaagactcatcttgtgtgaattccagtttgctttcatacaaaaaagcattgttttatccctgaataaaattgatattcctggaaggtcagctttggttatcttgtggatttgagttgtccctgtcacacttctctactcccaagactatcattaccccagtttgagaaagatggactgtttcaagtcaactatatgttacatagtctctgtaggctggcctgggaacctaatgagtattcgtaacattgtttcattaggacaaatttattttcttgtttcttgtttctttttttttcttgagacaggatctctctgttacccaggctggagtgcagtggcaggatcatagctcactgcaacctagagctcctgggctcaagtgatcctcccaccttggcctcccagagtgttggtattacaggcatgagctgagccactgtgcctggcatcttttttctttttggtgagcttgttatgagaaatttctatgagaatacacatttagattcttatttcttatttctttttttttttttggagcaggagggaaacttgagagcaggggctgttttttttttgttttttgttttttgtttttagatggagtctcactctgtcgcccaggctggattgccatggcgcgatctcaactcaccgcaacctttgcctcctgggttcaagtgattctccagcctcagcctcccaagtagctgggattacaggcgcctgccactatgcccagctaatttttgtgtttttagtaaagacggggtttcaccatgttggccaggttggtctcaaacttatgacctcaggtgatccacccacctcggccagccaaagtgctaagattactggcatgagccactgtgcctggccaattttttttttttttttttttttttgagacagagtctctctgtcgcccaggctggagagcagcagctcaatctcggctcactgcagcttctgccttgcggattcaagtgattctcctgcctcagcctcccgagtagctgggactacaggcaaatgccaccacacccactaatttttgtggttttaatagagatggggtttcaccatgttggccaggcttgtctcaagctcctgacctcaggtgatccgcctgcctcggcctcccaaagtgctgggattacaggtgtgatccaccatgcctggccagagaatacacaattaaattctaaataatcaattcactagcagactttggaaagcaactgccaatctgaatttttgttttgttttgttttgtttgttttttgagacggagtctcactctgtcacccaggctggagtgcagtggtgtgatctcggctcactgcagtctccgtctcctgggttcaagcgattcgcctttctcagcctcccaagtagctgggattacaggtgcccaccaccatgcccgggtaatttttgtcgttgtagtagagacagggtttcactgtgttggccagtctggcctcgaactcctgacctcaaatgatccacccacctcggcctcccaaagtcctgggattatagacatgagccgccacacctggcctgagttgtgaatttctttatttagctttgaaatctctagtctcctagtattgttaacaatcaaacattttgaagaagatagatattctataggaaatacattctggaaacttttgggaatcgtctttaaagcccgtgttacaaagcgtgttatatgaaaaattgcttttgattttccctagctagagtaattttctggagttggaggtttgacttaggagagtctgtgatatgcagtggcgggcagaggatgccctgcccctccattgagggccttagtgcagagatagcagaggccaagctgaagtggtggagaggactgagatcgttgtttcctaaacgctttctcgtaaacagataagttcactatgtaaacagttcattgtgcttattccttttactgtactttaagaagaatgtaaatacagacagagcagcctggttgtgaggttgagactaggccaccctgtccatgtgcacttaacattctccacccagaacgtctgtggactgacctcattctttgtggctgcttttatgtcacctctgtcttttttctcccctgtgtcctggtccttgcaggttgctaattagaaaattatctcttgaagtgggtattaatgtcatgacaagcagatattgtcaatcacgatgagatgacacgtgatatttgtctatttagcagaatgtaaaggattaatttggccaaattatggagaataatttctgtgttgaatttatcttttaacttagcagttgttcagtgaggactcaccatgtgtgctggccagtttgctagttattaaggatgcaaagattcctatttattcctgcttacaaagtacctgtgtattttgtggggaagttagaaatggaagaagggtgtaatcagagtaatatattattgaatcgagcttattatctcaaattacctttcctagcaaagataaaaggactagaatgagaatttgagtccaacttgtgagcaagaagcagactccagtttaaagggtgttctttgtggctgggcttggtggctcacgcctgtaatcccagcactttgggaggcagctggatcatgaggtgaggagttcaagaccagcctggccaagatggtgaaatcctgtctctactaaaaatacaaaaaaattagtggggcatggtggcgggcgcctgtaatcccagctacacagaaggctgaggcagagaattgctttaacccgggaggcggaggttgcagtgagccaagatcgtgccactgccctccagtctgggcgacagaacgagactctgtctcaaaaaaaaaaagaagaaagaaggatgttctttgttctacctgggttattgcggagggaatgcattaactacttgttgggaatggggccttaggaggtgcctgcatatgctttttcctgttaagttagcccttggagaacatcaggatcttgacctaagtaaagccatcctttgtggaggttctctttgttcttctatttaatgtctatttaagcaggtgccctctgtatcatgaggcccattttctctgcactagagttgtacactgaccttcttgatttttctgtggccttagctgtggccaagcaagccaggtttggaagggcgctaagcccccagcctcctgtctgtgctcttatgcttcgggtacccttggccctaagcggaggtggagagatgggcctccgcattctccatctctttacttaattggggtcttaggaacttcactaatttttgtgtcacttttgcttaatgccctttatctaaaaggatgggctacttagagatccctgctagtttgaagtctgaccgtgaacttctgtgtttcatcaaaactttaaataataccaaacattttggtgacttgcttctgccctttctgcagacatgcgaaaagaaccacaattaacactgaagatgtgaagctcttagccaggaggagtaattcactggtgagagatgaatttctttcctcactcccctttcccatcggaatacattattcccaatcaatcacttgaagccatgaagttattccccagggcaccttgcattagaaactagaggtggctgaaccattcagacctgcctgtaatttacagtcttgctttcattatgatggatcttgctaagccaatttgaaattttctaatcagcactctctggattttacaatttgcctgtttttgtaatacctcaaaactttggtcccatgtttcatttacaacatgatgtcagagactggtcacaggccaatctgcagggatagttttgttattgtattcacagttctccgaataggccaggtatggacggagtttccgtatggctggatatgcaggaaaacacattttccatattttcaagtctagaaatcatttgaccaagcctccgttgttcaggtgaagacccagagatactctggtcatcccaggctagtggctttggccagtagcagagccaggacagcggggagctttcctgactgagtgtaatgctagacattaaagcacgtgatggctgtgatagaatgtgggccccacaagagcaggggcttttgtctctttgttctctctccatctgtgttgcctagaacgcacctgtgtgcctggcacacaggaagggctcaataaatagttgttgagtgaatgaatttgtatagcagtttacaggggcttttccagatactattttacgtatattatttaatgctcacaactttttttttctttttttaaattttggacatgcagtctctctctgttgcccaggctggtcttgaactcctgggctcaggcagtcctcccgccttggtttccctatatgccaggattacaggcatgtgccacaactttttttttttttttttttttttgacggggtctcactttgtcacccaggctgagggcagtggcgcatcattgctcactgcagtccccgtctcctgggctccagtgatactttcaccttagcctctcaagtagctgggactacaggtgcatgccaccacacccggctatttttgtatgttttgtagagacggggtttcaccatattgcctgggctggtctcaaactcctgggctcaaatgatctgcttgccctggactcccaaagtgctgggattccaggcatgagccaccgcacctggctacaactctttttttttttttttttttttttgagatggagtctctctctgtggcccaggctggagtgcagtggcgtgatctcggctcactgcaaactccgcctcctgggttcatgccattctcctgcctcagcctcccgagtagctgggcctacaggcacccaccaccacacctggctaattttttgtatttttagtagagacggggtttcaccgtgttagccaggatggtctcgatctcctgagctcgtgatctgtctgcctcagcctcccaaagtgctgggattacaggcgtgagccaccgcacccgacctctggccacaactcttaataacacaacttattggctaggtgtagtggctcatgccaataatcccagaactttgggaggccaaggcaggatggcttgagcccaggagtttgagaccagcctgcccacatagtgagaccctcatatctacaaaaaatttaaaaaaaaagaaaaaaaaaattgaagctgcgtttaattcttagaaatgtaacccaggctttggcttttctacccaaattctttgagtcagaggtggttgtggagggtttagtttcgtttgtttgtttatttaggtttataaaatggttacagccagatataaatacagattttttttttatagctaaaatacatcacagacaaaagtgaagagattgctcagattaacctagaacgaaaagcacagaagaaaaagaagtcagaggatggaagcaaaaattcaaggcagccagcagaggctggagtggtggaaagtgagaattaaagtccctcgccgcttggaaagtgcagccttctacaggtagagccacctagaaatgcatatggctgcaaaggaaactttgaagggttaaatagagatttaaaaaaataaaataaaaaggctgggctagggtgctttttgtgctgaattctccacattgttaactgccaaagctagttttagagaatgagaaagtcttaagcaaaatactcccaggtctcactccagaacataaaaatggtgtgtgatcaaatggtatatattagaaattacatctgttgtaattaaaattgtgtgagcaattaaacatggttgactttttcaagcaaaaatcagttcatcttttgatgtaattttctaggctaaatggcaatctctgaaagatgaataaagctatatttatttagcttttc

SEQ ID NO: 3 - DNA, 4846 bp, Homo sapiens
  source 1..4846: mol_type = other DNA
aacttcccggatggggctgtggtgggtcacagtgcagcctccagccagaaggatggggtggctcccactcctgctgcttctgactcaatgcttaggggtccctggtgagtgcccccaaccttgatccccatctgccttcaggaggggcttggccccattctcctattctgggatgagaaaaaagtcagggagccagaggctcagtgggcatggggcagtgaccttggcctcttgagcacagctgggaagccctaggaacacatagacatggcccacttaggcctctattagcacgtctgctctagcactgaagcagtgttaggaccacacagatgcacgcacacagcaggcagtgacccctcctgagcctgatctacccctctaacctagcgtatgcctttgtgcaggtgagagcccagctttggagtctgaatgcctagccagggcccctggctgggtaatgtgatggctctgagccttagcattctcatttgagagatgagatggggcaagctccatcacccactgctctcacagagcgtgtgtgttagatctgagcccggtgcctgggccactacacagaggcaccggtgataactaccaagtctgggcctgcttcccaggggaaattttttgacaagtatctgtgcaggggggctagactggcccttgaaagtgcatacagggtccatcccagaagccttgtagctttgatcccctgaatgaacaaactgtggacatgccaatacacattactgacatgtatgcccacctgacctgcacccactctgcagggcagcgctcgccattgaatgacttctaggtgctccggggcacagagctacagcgccgctacaagcggtggtgcccgggccttggcaggaggatgtggcagatgctgaagagtgtgctggtcgctgtgggcccttaatggactgccggtgagtggccactgggcatagataagactgggggcaggggagcctgggccgtggcgttaccttgtgccttcttctctccagggcgttccactacaatgtgagcagccatggttgccaactgctgccatggactcaacactcaccccacacgaggctgcggcattctgggcgctgtgacctcttccaggagaaaggcgagtgggggtggagaggggcagggtgggagacaggggacctcagcccaagttgatcttctgtctcttgctcccagactacatacggacctgcatcatgaacaatggggttgggtaccggggcaccatggccacgaccgtgggtggcctgtcctgccaggcttggagccacaagttcccgaacgatcaccagtgggacaaacaccttccctccgtcccggcctgggaccttcccccagcacacactatagtgatgctctgggccctcaggtacatgcccacgctccggaatggcctggaagagaacttctgccgtaaccctgatggcgaccccggaggtccttggtgccacacaacagaccctgccgtgcgcttccagagctgcggcatcaaatcctgccgggtgggtaagcggcgccgggtcaagctgggagagtggagggacaagcccacgcccatccacgaacccactggctctttgtctccagccgcgtgtgtctggtgcaatggcgaggaataccgcggcgcggtagaccgcaccgagtcagggcgcgagtgccagcgctgggatcttcagcacccgcaccagcaccccttcgagccgggcaagtacgcgtaggcggtatcggcgccctgggggccgggctagggaaggtccaggactccaggggcagggctccgtgtagggcaactgggcggggccagataagccagagtcccagggtcttcttcacgccccattaccgcccccaggttcctcgaccaaggtctggacgacaactattgccggaatcctgacggctccgagcggccatggtgctacactacggatccgcagatcgagcgagaattctgtgacctcccccgctgcggtaggcggcggggaccaggcctgggagggtacctgggaaccttggggaggggcgtggcttggccggggaggtcagaggggctgggcgtgacctgagagcatatcccgtggagtaccgtacacctgggaaaggcgggtttggtcccagccccagagggatctcagctgtcgctcggggccggacctatctcggtccatctaagggtccgaggcacagccccgccaagaggccacaagtgtcagctgcttccgcgggaagggtgagggctaccggggcacagccaataccaccaccgcgggcgtaccttgccagcgttgggacgcgcaaatcccgcatcagcaccgatttacgccagaaaaatacgcgtgcaagtgaggtgggggggcgggcgttgggacgtgctgctgcgggtgagacgggaggagggtagtcacgggcttagggctggaggctggcgggctagggctgagtgcagcgcctgcttagagaccttcgggagaacttctgccggaaccccgacggctcagaggcgccctggtgcttcacactgcggcccggcatgcgcgtgggcttttgctaccagatccggcgttgtacagacgacgtgcggccccagggtgaggcccaagcttgggggctacagagccggggctggaagcctggaaccggagggccggggcggggtctcggcctgatggctgcccgcaccggccgcagactgctaccacggcgcgggggagcagtaccgcggcacggtcagcaagacccgcaagggtgtccagtgccagcgcgggtccgctgagacgccgcacaagccgcagtgaatccctggtgctcccggccccgccagggccctaaccctggggcggcatgctttgatgtctgggaccagagcctggaaatggttgagactaccctgccacgacttcgctcccgctcccgcctcggttcacgtttacctccgaaccgcatgcacaactggaggagaacttctgccagacccagatggggatagccatgggccctggtgctacacgatggacccaaggaccccattcgactactgtgccctgcgacgctgcggtgagcactagtgacgcttgccccatgaccctgcctcagccctcaccaccaaaggctggctcccttaaccgcagtgaactttgtctttcagctgatgaccagccgccatcaatcctggacccccccaggttaggagttgggccagttatgggtcaggccctttagcccacgacatccacacagtctgggtttcatccagcccaccccatcctacagaccaggtgcagtttgagaagtgtggcaagagggtggatcggctggatcagcgttgttccaagctgcgcgtggctgggggccatccgggcaactcaccctggacagtcagcttgcggaattggtgaggcacaactgcctgtctcccacagagaggagctgaggttgtgtcctctgtggttatgccactgggggctgggaatctatccctgcccccagaggtcctagccagaagatggcaggtctagcatctgtcccaggagtctgttccctgtcctaattccccactcctctaggcagggccagcatttctgcggggggtctctagtgaaggagcagtggatactgactgcccggcagtgcttctcctcctggtgagcctcccttgtgtttggggacccagtctcatcccaccttcccctttccccaggcaagctaacaagtgagccttggggcaacggactgagagtcacaaatgacctagcagagcttctctcccagccatatgcctctcacgggctatgaggtatggttgggcaccctgttccagaacccacaacatggagagccaggcctacagcgggtcccagtagccaagatgctgtgtgggccctcaggctctcagcttgtcctgctcaagctggagaggtatgtggacaacctgggagggtgtgaggtggggctgagccttgtggcctcagaccctgagtgcccccattcttgctaaagatctgtgaccctgaaccagcgtgtggccctgatctgcctgccgcctgaatgatatgtggtgcctccagggaccaagtgtgagattgcaggccggggtgagaccaaaggtaagagcatagtgcacaggactgctggtggccaggaggcccagccctggatcttcctccaggaccgtctccttctccccattcccctcactgcaggtacgggtaatgacacagtcctaaatgtggccttgctgaatgtcatctccaaccaggagtgtaacatcaagcaccgaggacatgtgcgggagagcgagatgtgcactgagggactgttggcccctgtgggggcctgtgaggttggtggcagggccctgggccagccctggaagggtatggggggctagaaatgaactattttatcatgaagcaggctagtcatggctgtggcccagggccctcatcagttctcctacctgccagggtgactacgggggcccacttgcctgctttacccacaactgctgggtcctgaaaggaattagaatccccaaccgagtatgcgcaaggtcgcgctggccagccgtcttcacgcgtgtctctgtgtttgtggactggattcacaaggtcatgagactgggttaggcccagccttgacgccatatgctttggggaggacaaaacttgtaagtacagtcaaggacaagacttgtactcaaggctgagatttaataaaattcatatttttactacttcaccaaggactttcttaaatgaaaatggtttttccccctacaagtaaacagtaataaagaagagaattattccta

SEQ ID NO: 4 - DNA, 32744 bp, Homo sapiens
  source 1..32744: mol_type = other DNA
tattttccccggagagtcccgaggcgccgcgccttggccctgcctacagcccgaggccccgcccccggcgcccctcccagccgtttgaagcggctcgggctgcggctggctcagagtggcgcggggggcgtggggcggtgctgaggagctgaagccgtggccagctcgacgccggacagtccagcgagcagcacggcgggaaccggcagccggagcagtcccggagcagaagcagcagcagcagcagcagccctcgccgttcgcggagcgcagccgagccggccatggcgttgtcgatgccgctgaatgggctgaaggaggaggacaaagagcccctcatcgagctcttcgtcaaggtgagcgctcgcctcgcggtcccgcccggcagatcccccggctccctcccggctgcggggagcggcgtcccggggctctcctgaggcgcccccgctcggcgccagcacccgtcccgctgcgggcacccgcgcccccggcccattgtctgggggccgcccgcgccttcccgcctccgagggcccgtcgaggggtccgggttggggacccgggcggcggccaccgtctccagcgcgtaggcatcggcggacgccagaccagcgtcccgcgcccgggtgggtcgggaagagcccacgggcgggacttgcctgccccggggccccagcgccgggcgcgcgcgggtcctgtcaccaccccccgcccgggcgccggggcccggccccacccgctccccagcgctccggtccgccgcccggagcccgaactgcggcccgccgcccgatgagctttcaaacgaacttctttgaacgcgtttttgaaaaagcatttgctccccactggtctgaaacggaaactttaattttcgatgcaatcttaaacaaatttaccaaagagcaggtgctcttggaccttcggaaaagaccgagattcccaacttgtgtttttctgtcttgggcatttactggctttctcgtttctcaagcgcggagtgttctgtatgatgcaacattttggcttctccccccggcgttgctgcttcgggaaggattgtgtgtgcccttttgttttgaaagaaattgagggagagaattcttaacttgcttgggctttaaagggttggttttcccttgtgtcttcagctttcatgtgtggaatttatttgcttacacatactacccctcttcctttgcttttctctttaatactttttattttagcaaaggagagagtcgaagttataaacatctggatccagctccttccctcaaaacttaaaaaaaacactttgagcttcttccagccacttaaaaagccaggctcattcagagctaggcaacataccggaaagtaaatggtcatctagaactattgggttcttttttttccccgagtttttactttaaagaaaggacatttcaggatgtgtttaagagatagagaagggctgggcgcggtggctcatgcctgtaatcgcagcactttcggaggccgaggtgggaggattacttgagtccagcctgaacaagatggcgaaaccctgtctctacaaaaaaattcaaaaattagctgggagcgatgttacgcgcctgtactactctggaggctgcggtgggagaactgcttgagcccgggaggtcgaggctgcagtgagccacgtcgcaccactgcattccagcctgggcgacagagcaagaccctgtctcaaacaaaagagatggagagaagaaataatctgcatttacctctgcagtcttcagtaatgactggaacagtgtttgccttaggattttctttcaattgtcaattttcgattttttttttttttttttttttggtccagggaactgaaacagcagacaggtatagaacccccaaaatatcaaagcgtttcggttactttgagtggcagatatagtactttgagatgcgtagaatgtaggaaggaacctgaaatacaagaaaggaaggaggccgggcgcggtggctcacgcctgtaatcccagcactttgggaggctgaggtgggcagatcacgaggtcaggagatcgagaccatcctggccaacatggtgaaaccccatctctactaaaaatacaaaaattagctgggcgtggtggcgcgtgcctgtagtcccagctactcgggaggctgaggcaggagaattgcttgaacccgggaggcagaggttgtggtgtgcggagattgcgccactgtactccagcctgggcaacagagtaagactccatctcaaaaaaaaaaaaaaaaaagaaagaaaggaagggtggtgggtggaaaacagcatggagaagggaaacaagtgggccagagatgagttaaaaaaaatttttactgagtgaggaataggaaggaatttccataaactcaaaaaaagtgcatccatgaataatctgtaaaacatgatacttaacggtgaaactttagaacagtattaaacttagaataagctactatcgggccgggtgaggtgactcacacctgtagcattttgggatgccgagatggggagatcacttgaggccaggagttcgagaccagcctggccaacatggtgaaaccctgtctctactaaaaatagaaaaattagccaggcatggtggtgggcccagctattcgggaggctgaggcatgagaatcgcttgaaccggggaggcaaaggttggagtgagccaagatcaagtcactgcactccagcctgggcgacagagtgagacttcgtctcaaaaaaaaaaaaaaaaagataaagctattatcagttatggctctattcagtattctattattctattggaggagctaatcaaagaagacaagaaaaattaagtatctgaattaggaagagatcagtgattaatgccctgcttactattaatttcatctttcagttagaatagcagaggggcgtgtgcagttttccaaacttgagtcacttgcatcccctttctgtttttcatatttgtgttgagaaccactgaaaatcatccttcctaccactagttgtaagcctttctcattgggcttggtggcagagaatcagggttcaagtcacagttctttactccttggttgggtgaccctaggcagtttgttttcactctttaagccttgtttgtctcatttgtgaaataagaaatgttttctgctacccagtgattcaacataggcaaactttgcactgatacagatcaggttttttgtttttttttttttttttttttttaatgagatggtgtctcgctctgtcaccctggctgctggagtgcagtggcgcgatctcggctcactgcaccctctgcctcccaggttgaagtgattcttctgcctttgccttccgaggagcgcatgcaccactacgcctggctgatttttgtattttagaagagactgggttttaccatgttggccaggctggtctcaaactcctgaccttaagtgatctgcctgccttggcctcccaaagtgctgggattacaggcttgagcctctgtgcttggcccctagaccagtttgtttgaaaggggaaaaaaggacaggtaaaatgtggtaaagggcattcttgatctcttctcaaaacctacgtgtgggaaatgcaaatgggggaaatacccttgtaaatatagttattttgaaagcagtggaccaggtgtggtggcacactcctgtaatcccagccttttgggaggcggaggggggtggatcacttgatgttgagaccagcctgggcaacatggcgaaaccgcatttctactaaaaatacaaaaattagccacgcatagtggtgcatggctgtaatcccagctactcgggagactgaggcaggagaattgcttgaacctgggaggcggtggttgcagtgagccgagatagtgccactgcaccccagcctgggtgacagagcaagactccatctcaaaaaataaaaattaaaaaaaaaaaaaagaaagtagagagggtgcagaggctgtggttgtccagagtggtatgttgaacagtgttaacctgccaagaggtatctgagtttgtaaaagaaaactatttacagttgaagcacatagcatgtatggaaattagaaatttggtggtggcgctaggggaaaggccaagagatgtaatggggctttgagcctacctgtctagctagcactgagcttcacatttaagagagagagatgagcaccttctcaaatagtatgactgaactcacagctgcatttccttccttgtgagtagtttttggagttgtctgcctgtgagcccattaactccctgtcatctatataacagcaggatggtttttttggtttgtttttgttttgttttaccctcaacatctggaggatagataggatgccctctcaaaagtaaaaaaggcagctgggctgtggtggctcacgcctgtaatcctagcactgtaggaggccaaggaggatgaatcttttgagcgcaggagttctagaccagcctgggcaacatggcgagaccctgtctctacaaaaactattaaaaaaattgccaggcacagtggctcacgcctgtaatcccagtactttgggaggctgaggcaggcggatctcttgagcctaggagttcgagaccagcctgggcaacgtagcaaaaccccatctctacaaaaaatataaaaaattagctgggtgtggtgatacatgcctgtggtcccagctgaggtgggaggattcctttagcctgggaggcagaggttggctgtgagccgtgatcgtgccactgcactccagcttgggtgagaccctatctctaaataaataagtaagtaactaagctgggcctggtggcccacgcctgcagccctagccctagaggctgcgggtgggaggattgtttgagcccaggagttcgaggctgcagtgagcttatgatcatgtacctgcactccaatctgggtgacagaacaagaccctgtctcgggaggaaaacaacaaaggcttataatggcaatcatcctcaacagtggagatgctctctaccccactcaggagcctggtaggtgtatatatttccagctgggaaccaccaacagatacggtatatttgagaccttttagcaagggcataaggtcccttgtaatctgggtttctttctttctttctttctttctttttttttttttttttaagacggagtttcgctcttgttacccctcagcctcccgagtggctgggactacaggtgtgcaccaccacacctggctaattttgtatttttagtagagacaaggtttctccatgttggtcaggcttgtctcgaactcctgacctcaggtgatcagcctgccttggcctccaaaagtgctgggattacaggcgtgagccaccgagcctggcctactgcctgagtttctaatccaatatgtccagttactaattgtgtatcccaggatacatcacttaaacctgtctgtgccacatctgcacagttgggatattagtagaacagtcctatgggataaattaatatatgtagtatgcaacaatcttagaacaatgtctagtacacagtaagcaaataaatgctagttgtgtataattttgtatgaatatatatttataggcagatctcccctactagatagacagtaaattccttgaggatagggtgtgcatatggttcagagtgcctgcaacttaagaggatgccaaatgtttgaaatgagattgtgcccttctttcagagaattctgttgttgagcattttgttgtcaatgtatgtctctaccatgctttggaattagaaaccacttactgagatcccgatggttggagcatcaaagcatggttcttcatcctgatttctctagcctccagtctccaaacccagtgtaattttatgtactcacctcttttttttctccatttaatacttccagtcttttttttttttttttttttgagatggagtcttgcactgttacccgggctggagtgcagtggcacgatcttggctcactgcaacctctgtctcccgagttcaagcgattctcctgccgcagactcccgagtagctggggttacaggcacccgccaccatggccagctaattttttgtatttttagtagagatgaggagctaatttgtatttgtagtagagacggggtttcactatgttggccaggctggtcttgaactcctgacctagtgatccacccgctcggcctcccaaagtgctgggattacaggcgtgagccaccgtgccagtcttttatatatttactagtgtttcttcttggctatgtccagaatttggggaaccaagatttttgtttgggtaaaactaaatattaactcttgaaccacaaatgagagtaatagagatggggtttctccatccagcttggccaacatggcgaaaccccgtctctactaaaaatacaaaaattagccggtcgtggtggcgggcgcctgtaatcccggctactcgggagtctgaggcaggagaatcacttgaacccgggaagcggagattgcagtgagccgagattgtgccattgcactccagcctgagggacaagagcaagactctgtctcaaaaacaatcaaatcaaaaaacagaaagtaatccctttgcggagttcagttttatgggctggaatttaaacttgttgttgtgccactgtgaactgggatgatcactgtcagcaagtagtcaccaagctgctgggattggggtggtgtttgtaaaaagttaatctggtgcagggtggcataacacataagagtctgtttcttttgagatatttggcagaggttcctaatgtgcttggactctggagccacactgcttgacttgaatctggcttctagtatgtcaggcaagtttttaagctctcagtgcttcagtttcctaacttctaatatcaggataataataatagcaattttatatggttactgaggggattaaaactgttaatctgtgcatattagttagggtagtttaagttgctgtaataagttatccccccacaaacagtggttcaaatatgatggaagtttatttctcacccctcagtccaggagaatgtcttagatgttagggtggctttcctcctcagagtcattaagggacccgggctctttctagcttatttgtccactaactcccagagcattgtcctcttctgaattgtcaaagttggtgggtgacaagtactgtctgttgccagtggggggtggaaaatatggaggaagcacatcttaagggccccagctcagaagttctacctgttacttccggtcacattctattggagagaacttaatcacatagcttcatctgcaagagaggctggcaagtgtggtctaaccgtataccatcctatgtaaagctttaggaagagtgcttgacacatagtaaacacctgcttttgtcatcgataatagtttattattattatttttttttgagacggagtctcgctctgtcgccagactggaatgcagtggtgcaatcttggctcactgcaacctctgcttcccgggttcaagcgattcttctgcctcagcctctggagtagctgggactacaggcgcgtgccaccatgctcagctaatttttgtatttttagtagagatggggtttcaccgtgttggtcaggatggtctcgatctcctgaccccatgatctgcccgccttggcctcccgaagtgctgggattacaggcgtgagccaccgcgcccagcctaatagtatattatttttaaatgtgggctctattagtaggatcagggagttctgtaaatccttgaaattacagtaaaaaattctaatgtgaggctttttttctggaaattcctaaaccaaggctaagaaccactgttctaaaagaagtaaatagtggaattcttagagtcaagaatactttatataagcaaggtataaaagaagggcttgggctagatgatcacaaaggtctcttctagttattattaactatgacttaaagaatgtaccggcatgaactaagtgctaatactgagttaagtactatggaagatataagaaattattaaacagttaatttctttaggtttacaaattttattggaaagaaaacaatacaagatggtccatgcttaaagagtcaagtggggctcacattaagtagggctaggagacatggggaaagatggaaggaggcttaaacttgaccttgaaaaaggaggtgaataggtgggttcggaatagccaagaatgggaatgtgagttttgacattatgtggaaactccttatgcaggaaacaattggtagattgatacctaagaaggaaccaggagtgattcagatctatagtgccagggagacaagttatttaaaagttgaggatgagacttttaaaacctaacttgggtttttgttaatgtatacattttcctaacttttttcattctccccacactttcctgtgtttttggattgctgtctgtttaataacttttcagtggcacttgggaaggtgcaaatggattgtacagatggactgttttgacagtttaaagtgggaattctttatattgtttcaaggacaggcttcaaacttccccccgtctttgttttttctaacagaaaaaaatgaaataaattttctataggaaatgatgctgaaaactgttctggtaattaacaaaagctaactcaatattcagacaatattaccttgaatctaattgatttgccattcatttgaggtttccggggggaaaattcaggagacagaaatgaatgtaaagtatgaagttaatgaaaacctattattttaactttttgcctgagctgttcctgaagacctaataatgctacttttggcaaaggccaaatttgatgattttggtttaatgtaaaaacctgtgagaaaggagcctagaatggggaagaggcaggaggctttgagcctaggagactgagcacacgaaaagcttaacagagtatgaataatgataggaaagaggcaattgggagaagaacctggctgtcaggaaatgtcacagttggtttgggaagatgcctgcagaggtgcctagaagccagtaagtaaggatggtgagccatccttttccgcttcctgtttcgttagagctgtggagcctccgtgttctgatgtcccctgagtagggaattgtgagtccataaaaggaaaatgtgttaggcaggatgggaagtgtgattaaggcatgagttaagattttggtcaagtagaggagtaagctaggatgggtttgcctgttttagacgcttgcatagagaatggaaagggactttctgaaggaaaatgacattaggtcatggttacctattgtccaaggatgatttaagacatgtaaatgtaatttagggcatcagctagtgaattttctcatggcttttaattatattgtctatttcgagacttgcctcttatctctcagtggtcagttccagatattggtataagaaataagaaataacaatgataggcccactgccatggctcacacctgtaatcccagcactttgggagaccgaggtgggtggatcgcctgaggtcaggagttcaaggccagcctggccaacatggtgaatccctgtctctactaaaaatacaaaaattagctgggcgtggtggtgggcgcctgtaatcccagctactcgggaggctgaggcaggagaattgctttaacctgggaggcggaggttgcagtgagctgagattgtgttactacactccagcctggacgacagagtaagactccgtctcaaaaaaaaaaaaaaaattataggctgggcaaaatagtgagtcctcatctctataaaaactaaatttttgtatttttagtagagatggggtttcaccatgttggtcaggcttgtcttgaactcctgacctcatgatctgcccgcctcggcctcccaaagtactgggattacaggcgtgagctaccactcctggccccatctctactaaaaatacaaaaattagctaggcatgatggtgcacgcctgtaatcccagctactcaggaggctgaggcaggagaatctcttgaacccgggaggcggaggttgcagtgagctaagatcacaccactgcactccagcctgggcgacagtgagactctgtctcaaaaaaaaaaaaaaaaaaattagtctggtgtggtggtggtggtgagtgcctctagacctagctttggcaggctgaggccggaggatcacttgagcctagaagttcaaggctgcaatgagctatgattgtgccactgcactctggcctgggtgaccgacggagatcctatctcttaaaaaaaaaaaagaaaagaattatccatataattagccttatatggtttctgttttttcctttatttaaaataaaaccaaaaaacaaaattaaaaaaaaaataataaaaccaggataatatgttagtctaatttatgaaagtgacaacttagtgcagataaataagactgtatttgaaaactgtatcaaatgtagactaggagtatcttaaattttaactttttttttgagatggagttttgctcttgttgcccaggctggagtgcagtggtgcgatctcggctcactgcaacctccgcctcctggtttcaagcgattctcctgcctcaacctcctgagtagctgggactacaggcacgcaccaccatgcccagctaattttttgatttttttttttttttttttttgagacggagtcttgctctgtcgcccaggctggagtgcagtgacgcgatctctgctcactgcaagctccgcctcctgggttcacgccattctcctgcctcagcctcccgagtagctgggactacaggcgcccgccaccacgcctggctgattttttctatttctagtagagacggggtttcaccgtgttagctaggatggtcttgatctcctgacctcgtgatccgcccgcctcggcctcccaaagtgctgggattacaggcgtgagccaccgcgccctgctaacattagtgttttgaaaaagtaactattagaaccagggccaggaacggacctgagttcaacatgcatatattttgtacctttaagcatcctttcataggtttctttgcttttcttgaagttgaaatacaagctgtttcttgaagctgaaataaactaggagtatgacaggttttctttctctttttttggtaacaaaattattacttccaacttacatgtgaataactcattcttatgaaaagatttagttctcattataatatagttgtaaaaatgtcaatcacttgtaataacttaagtattgaattttaccactgtgcagcatagctatttatttgtgtatgtgggagaagaaaaaagagaatctgaacaaatattgaagaatacaaaaccaaacaatcagatgaaagctgaggtaattaagaactttttttttttgaaatggagtctcactctgtcgcctaggctggagtgcagtggcgtgatcttggctcactgcaacctccgcctcccgggttcaagcgattcttctgcctcagcctcctgagtagctgggattacagacacccaccaccatgcctggctagttttttttttaatgtttttttttttgagacggagtttcgctcttgttgccgaggctggagtgcaatggcacgatctctgctcaccgcaacctccgcctcctaggttcaagcaattctcctgcctcagcctcccaagtagctgagattacaggcatgcaccaccacacccagctaattttgtatttttagtagagatggggtttctccatgttggtcaagctagtctgtacctctagacctcaggtgatccgcctgcctcggcctcccaaagttctgggattacagatgtgagccaccacgcctggcctagtttttgtctttttagtagagacggggtttcaccatgttgggtaggctgatcttgaactcttgaccttaggtggtctgcctgccttgacctcgcaaagtgttgggattacaggcatgagccactgcacgtggtcttaagaacttttaaggatttgtgaattctctgcatgttttcttctgctaacaaccagttactttattttggaagtagagaacaggtggtggattacgagagtgaatattcattaaaaactaaagatggaccaggcgtggtggcacatgcctgtaaccccagcactttgggaggctggggcaggaggatcatttgagcccaggagttcgagaccagcctgagcaacatagtgagaccctgtctctacaaaaaaactaaaggtgaaccaaactagattattgtgctacctaggaaaacagaaaaagtggtagctgtgaaaacagactaattaggaaaaaaaagaaggtgattacacttaagaaattaaatttaagccttgaccataacacacacccaagactgaaatgaatttttttctttttcttcccttcttttttcttttctttctttttttttgagacacagtcttcctctgtggcccaggctggagtgcgctggtgcaatcacggctcactgcaaccccaacctcctgggctcaagtgatcctctcacctcagccttccaagtagctgggaccacaggcgcatgccaccatgcttggctgctttttatagagatggggtttctcagtgttgcccaggctggtctcaaactccagggctcaagcaattctcccacctcagcctctcaaagtgctgtgattacaggtgtgagccaccgtgcccagccctatttagcctttctctgttttagtttaaatattggtcctaagtttgaaaaggtaatgtcatttccttctgctttctagtatattcattgtgtgtattatgctctttttaaaaaagtgtcttttttccagttataaaagctatatgtatttactctagacaacttagaaaacaatagaaaagcataaataaaataaaaattacttataaccccttgactagagatagttgttgctattgtatgtcctagtcttttttttttttttcctcgttctttctccctggctggatgcagtggttcaatctcagctcactgcaacctctgcctcctgggtttgagcgattctcctacctcagcctcccaagtagctgggattataggcgcctgccaccacacccagataatttttttttttttgaggcagagtctcactctgtcacccaggctggggtgcactggtgcgatctcggctcactgcaacctccacctcctggttcaagtgattctcttgcctcagcctcccgactggctgggactagagacacgtaccaccatgcctggcttatttttgtatttttagtagagacagggtttcgccgttgttcgccaggctgatctcgaactcctgacctctggtgatctgcccgccttggccttccaaaagttctgggattacaggcatgagccatcatgcccggcccttagtctttttcttaataagtttgcatgaattattatttatttatttttatttttatttttttatttttgcttgcatgaattattgagaatttatatataatattttaatgctgttcatgacagaagacttgaatgagtgaaggatgagcactgatctgatatgtaacatgtattgaattaagtgagttggtttaaagaaaatttatttaggttttataaaagaaactcagattttgcctatatcttctttagaacatttgatctttggtggaagaaagcaggtcatgaaagtatgacatgaaatgtgccatcacctagaatggatattgattaaatggtttgaaggtagatcctcctcttgtgctctttaggagaaatctattctaaaaatgaaagttatttttcagtattaatttcttccttcaatatctatgtaataggtaagatatgtccattttatagttcaagtataataagaaaccagtctttgcctaggaacagttgagcacagtataggggatcataatagaagcaaacatcaattgaatactttccatgcactaagtgctggagaggtaaaggagtaagaatgagccccttgtgttcaaggagctctattataaccaagtagacagtcagatggtgagtaaatgagccatggttgttggtggtaggttcttagcaccatctttttcctatacaatacgtgacttttttttttttgtctcatgcacttttttattctagctgaaatagaagcttaagaaatgatttaagtgggaaattaaatgagataattgatttagagatgagttaaatgtttgtgttgtattctaacagtttaagggttgctagtattactgactctattacactgcttattatcagttgtttaaagaaacttttgaccaggcatggtgactcacgcctgtactcccagcattttgagaggccaaggtgggtggatcgcttgagtccaggagttcaagaccagcctctgcaacgtggggaaaccccatcgttttgtgttttgcaaaaacacaaaaatctgggtgtggtggcacgtgcctgtattcccagttgcttgggggctgaggcaggaggatcacctgaaccttgggaggttgaggccacagtgagtagtaatccataatcgtgtcactgccctccagcctgggccacagagtgagaccgtgtctcaaaaaaaaaccaaaccaaaacaaacttttatcttttccctcaataattagttgcatgttatatctgctaattttgatctatctaaaataaaatggatacttcttgcctcaaattttaaataggggccagatgtggtggttcatgcctgtaatcccagcactttgggaggctgaggcaggtggatcagttgaggtcaggagtttgagacagcctggccaacatggggaaaccccgtctctactaagactacaaaaaattagccaggcgtggtggcgggtgcctgtaatttcagctacttgggaggctgaggcaggagaattgcttgaacctgggaggcggaggttgcagtgagcctagattgcaccactgcactccagtgacagagggggactccatctcaaaaaaaaagaaaaaagaaaaagaaaagaaaatcttaaatagatcctgctttccctagttgtttattgaattagatacaaagtctttgatctggcattgatctaacttgtatttccactcttaacccccaccgcagctgcagatatgcctcatattgtatctagattggtcttaaacatgctctgcacttctctgccttcatggaagacttttgctgatatttccttcacttgatacacttttggcttttccaccctctccctgcccccaatttctgcttgccagaataatatctgttcttctttcattcatttatttaacaactattgagacactgttgtaggtgcttggatacacctagtgaacaaagttcttgtcattatggcagtcatattcagttgagggaggcaaacgataaatgctggtgattaaatgctgtgaagaaaatgaagtaggttaaggaaattttttgaagtaggttaaggagtattgacaatgatagggggtgctattttcagtttaacggggcattccattatccctgtggagaatgacaattaggaaggcaaggtcagaagcagggagactaattagaggtgacttttccagtaatccaggcatgagatgatggtggcttggaataaggtgggaagttgctggattctggatatattctaagatggagacaacagaatttcctgagggactggatgtggaatgtgagagaaagaggagttaaagatgattctgagatttttgttctgaacagccagaatgatggagttgtcattaactgaggtggaaaaggctgtgggaagggctagttctgatggggaggagatcaggagtttagttttttgacgtgttaaattcaaatttattaatacctcatagaacctatcatctacttggagaggcatatgttaaagaaacatataaataaggacagtaggttattatatcaaagaaaagaacagggcaacttgagaaagaatggcaggaaacccaatttagatggaggctcagtgagagcttttctgagaaaatgacatgtaggatgagtagtaattagaatgaggggaaaagcgttctaggttgaaggaatcagcatgtgtaaaggctggaaataatcagttaagggtgtgactggaaaacagagaacaaaagtgagcagtagagtgagggattgacaggggccacatcatggagggccttgtatgtcatgtgaattttgtccttagtagaaatggcagttctcagatgggtttaagtgagggagcttcaggattagagttgcatcttaatatgagtagcctggctctgtggaaaatgaatttaagggaggcaagagtggcaataaggacaactatttggaggccattgccatcaagaaaggtgatggtggcttggattaataaggtgatggagagaagagaatggatttgaggtagattttggaagtggtgtcaataggaggatgttaaggaggtatgtgagagagaaaagtgtgagaaatgacttgggtttgtaattagagccactggtcaagagttgccgttcatggagagggaggaggagcagacagagttcaagttttgacttgttgagtataagatggctgagatgtcaagtggagatgttggtagaaagttggacctacagatctgttcagaaagaagtctaggcagggtagagatatttgggacttgatgacatacatatatgtatatatgacatacacacacacatagaatatttggtatttaaagtgtatgaggctggatgtggtagctcacacctataatcccagcactatggaaggctgaggtggaagatttgcttgaggccaggagtttttgaccagtctgggcaacatagcaagaccccatccctgcaaaaataaaaataaaaaatcagctgggcgtgatgtcacatgcctatagtcctagctacttcaggaggctgaggcaggaaggttcacttgaacccaggagttagaggctacggtgagatatgatcatgccactgcactgcctgatgacggagtgagactctctctaaagaaaaaaacaagtgtatgagatcattgtgtggatgagtaaagagtgaggaaaatgcctagaagcaagttctgaggaactctaaacacttaggggttgggtaatggaggagaagctagacaaggagaacaaagaggaactgtgggggaacagtagtgagtggtgagaggaaaactactagagtgaggtaggaagaagctaggagaggtttgtaaggagggagtgaccagttgtatcaagctgagtgtttgttggatttaacaccctggaagttactggcaaccttcgtagtaacagctttggtggagtagtggtggtgggaagtcataatacagcgggtagaagaatgaaataggaagtaagagactggagtcagtgtgtaaagccaactctaacaagaaacttggctatgtagaagacacaggttgatagctgcaaagggggatacatatgaagggaaggctttaaaaagtatgagctgtaagagctgggttgaatgctgatttattagagaaagaagtggaaaattaaagagagacatggtttaatggatgtccttcaaggaatctcccaaatggccacctattccactaggtccccctcagtggtatgtattgcttcttcgtatgaattttcatacaaccttccctcctacttctttacttgaggccaagtaaactctgtgaggaagaaattttgttcttcatctttgtataagccagactgtccaacactatgtttttttgaagaaccagctaagacaggttcttccttttcctgacccccacactctgcaagtgcaaaaaccattttgttggtctctactaaagaaagaattggctgggcatgctggctcactcctgtaatcccagcactttgggaggctgtggtgggcagatcatctgaagtcgggagttcgagaccagcctgactaatatggagaaaccccgtctctactaaaaatacaaaaattagccgggcgttgtggcgcatgcttgtagtcccagctacttgggaggctgaggcaggagaatcacctgaacctgggaggtggaggttgcagtgaatcgaaatcatgccactgcactccatgacagagtgagactccgtctccaaaaaaaaaaaaaaaaaaaaagaattaagttcaaatctatagtctggcattcaagtctatgaccttcatagtctagctctaattaattggacaaatttatctcctacttctcctgggtcttacagtccagctaaattgaactcttctttgtttccatatgagctatcttgtttccctgaagcaacctttcccatctcttccattcccatttgtttaaactccataatcctgtaaatctccatttaaatgtgtctgcctttgttaatccttcaagattcatatttcatgcctcttatatgactcttcggttatctattttgttgatagttttgcatgtatgtcttatctttgctataataaagtaagctccaggagagtagattccttgtcttattcatctttgcgtccaccacgatatttagtagattgtctgcctcataataggcattcagtaagtcttattgaatgagtaaatgcacttaagtatagttgatagaccttaacctactgctagtaaattatagttggctaaaaatattctttataagtgctgtgctttggaaaaggatcatctgcttagcagcactgtttggtgggtagttgttgcccaggctggagtgcaatggcacaatctctggctcaccgcaacctccgcctcccgggttcaagcgattctcctgcctcagcctctcgagtagctgggattacaggcatgtgccaccacacccggctaattttgtatttttagtagagacggggtttctccatgttggtcagggtggtctcgaactcccaacctcaggtgatccacctgccttggcctcccgaagtgctgggattacaggtgtgagccaccacgtccggccaaggctcacacttataatcccagcactttgggaggcgaggcaggtggattgcatgaccagcctggacaacatggtgaaaccctgtctccacaaaaaatgcaaaaattagctgtgtattgaggcacacgcctatggtcccagctacttgggaggctgaggtgggaggattgcttgagcccaggaggcgaagtttgcagtgagccaagatagtgctactgtactccaccctgggcgacagagcaagaccctatctcaagggaaaaaaaaaaaaattcatactctggtatcttctggcatttcacagaagggcatctggattcctgccaaaattgattcttttgtcttttattaaaaataatctttcaagcaaatttgagattcaccactaaagccctaaatttgtttttatttactttgtgttttaactctctctcactgcaggtttgttgttgttgttgttgttggttttttggtaagtacagagactacaaatttaaaaaatctttcattaaacatgtctttactaagtgcctactaggaactgctctaagctctgggaagcaagaaaatgtaccctcaggtgtcagtaatgaatgagctataaggaaggcgtactatacacaattatcttagatgggataatattttccactagagttattgtaactcactgcctgggaggccttttcacttctaggaagatctggttttcctatatttagaatagatactgttcccattgactgttttctgttggatttcttaaatgcatgagatagaagaagtatatatggaaaagcatttcatatttaattgaaataatatatacatttatggagtgctttctatgtgccaggcactgtgttgactacatctatgaaatattaactcatttgattgttactcaataaaatgtttgctgaaggaatatatagaagcttttatttttttccgtgcacaggcttaatttcagaggaggttgggaggaaaagaagaactaaaagatcacatgattgggaaaaagcaaatgcctaacaagaagccagagaaataggtcgagagggtgatgcaaatgactgggctcagttcatattttagattgaaataaacagatttacttgtttttccttgcaaagtaaaaaagttttaagggagagtctgcaactgtgttttgaccctgagcatgtggcttgatagccattaagattaggagtgttgagagcagctattgtcctgatgactcagcaggaacccctgtgttagattataccgttgcctccgtattgcatgtaaaaagttctttatatcttttgaaatatttgagatcatagatcccaaaatcagagccagggatgattgtttacttgaagtatcatttgtatttttctttccttctttttcttctttctttctttcttttttttttttttgagacagagtctcgctctgtgacctaggctggagagcagtgacgccatcttggcttactgcaacctccaccttgtgggttcaagcaattctcctgcctcagcctcccaactagctgggattacaggcgcccaccatcatgcccggctaatttttaaaatttgtttaaattttaattttagttttttttcttttgagatggagtctcgctctgttgccaggatggagtgcagtggcgcgatctcagctcactgcagcagcctccacctcccgagttccagctattctcctgactcagcttcctgagtagttgggactatagacgtgccaccacgcccagctaatttttgtatttttagtggagacagggttacaccatgttggccaggatggtctcaatctcttgacctcctgttccacccaccttggcctcccaaagtgctgggattacaggtgtgaggcaccacgcccggcctatatttttaatagagacagggtttcaccatgttggcgaggctgattttgaaatcctgacctcaaatgatccacctatcttggcctcccaaagtgctaggaatataggcatgagccactgcaccttttttcttttttttagatatcaggtcttgctatgttgcccagacggttttttttttttttttttttttttttttttttttttttttttttttttgagacggggtctcactctgtcacccaggctggagtgcagtggcacaatctcagctcactgcaacctccgtctcctgggctcaagtgattcttgtgcctcagcttccctagtagctgggactacagacatgtgccactgcaactggctaatttttttgtatttttagtagagacatagtttcgctatgttggccaggctagtcttgaactcctggcgtgaagtgatccgcccaccttgccctcctgaagtgctgggattataggtgtgagccaccacgcctagccagtatttctgtctaggtgctgaaatagtttcttttggaattgaagaccatttgaattaatatttcaagtaggcaattgagtcatcataatggaagactggatctttagtattatgctgttagagtatgcagtgtccagtcttttggcttccctgggccacactggaagaagaattaccttgggccacacaaaaaatacactaacaatagctgatgagctaaaaaaaaaaaaaaaaaaaaaaaagaaaaagaaaagaaaaaccaaaaaaaccttataatgttttaagaaagtttatggatttgtgttgggcttcattcaaagtggtcctgggccacatgtggcccacggacctcaggttggacaagcttgatgtagtggctaagagtgtggactcccgagccatgtggcctgtgtttgaatcctagttctacccttcactagttgccttggtgtccccactggggtaatcttgggcttttgtaaagattataagagttaatataagaaaagcccttagagtctaactcatagtaagccttgtttgcttactattttgcctttaggaatgcagaattaagaccatgttggcttggcctatggttagtttattatattcaatataccatatgtggtttcaaccttcaggattagaagcatctgccagactgccactaccaccaggtgggaacttttcattctttatcaaaagagcagggttagtacaaaaaaagttcaaggttaagcttgagtttgctcttgaattaacttcagtgaaccctgatcctgttgacacttactaggtaactaaaggacagtcagattggactctgccatcttagtccatcggcctcagcagctcttgctggacttgtagctaaagcttgagagtccattagtagtgagaatgtttttctttttttcctctctctcttttttgttaatgtgaaagtgcaaaagtaaagaggaataatctatgacataggatcttattggttctgtacaaatactcttaattaaaaatttttaattaaaattatatatatatatattttttttggcatggagttccgctctgtcgcccaggctggagtgcagtggcatgatctcggctaactacaacctctgcctcccaggttcaagcagttctgcctcagcctcccgggtagctgggattacaggcgcttgccaccacgcttggctaatttttgtatttttagtagagacgggatttctccatgttggtcaggctgatctcggactcctgacatgaggtgatccgccctccttggcctcccaaagtgttgggattacaggtatgagccaccacgcccagccaaaattttcatttttttaagatatggggatcttgccatgttgcccaggctggtcccaaattcctgaactcaagtaatccccttgtggtggcgtcccaaagtgctgggtaaaagtacttttgaattatggattttggcttcctgtgctaccaaatttcactatttcttgatttttgtggtattcacctttacaactgaacaggtcatatattaactagcctttatctaatgctttctttaaaggaaatgtagacgtgcttatatttttaacacatctacatttctcttaaagagaagagattaagctctttttatttaatttgtctggaagaagttgagatagtgtagatctacaggttttatatttagtaatttttaaggagtaaaaatgaagtcttctaatttttctagactctatctaagattattgtttttagactttttcatcttataccacaatgagatgataaagcttaaaacattaacatgtcggccgggtgcggtggctcacgcctgtaatccctgtactttgggaggctgaggcggtcagtcaggagttcgagaccagcctggccaagatggtgaaaccccatctctactcataatacaaaaattaggaggcatggtggcatgtgcctgtagtcccagctactcgggaggctaaggcagaagaatcacttgaacccaggaggtggaggttgcagtgagccgagattgtgccactgcactccagcctgggcgacagagtgagactctgcctcaccaaaaaaaaaaaaaaaaagaaaaagaaagaaaactttagcatgtctgtaattggtagatataatctctatcatttatttaatgataattaaaaatagcggggcatggtggcacatgcctgtggtctcagctactagtggggctgaagcaggagattgaggctgtagtgagccactctgattgcaccactccactccagcctgggtggcagagtgagactctgtctcaaaacaaaagaaaacaaacaaaaaaacataatgtaagaatcatgaagtgactttaaaatctttattttataataatgttataagttttctgaagctacttaatttatcactatacagaataaacagatatataaaaaatgatcagtaagtttttgtttccctactaaagccagaataatggtcatgaggtaatagatagcattgggtgcttactatgggccaggcacagtgtgccagccgtttgcatgtgttagctaatttaatcctcatataaactttgaaataggtgctatcaatactgtttaacacatgagaattagagagatcattgtttgggtatggttgcagggccagtaagtagcagtactgtgatttgtactaacgtctttgggatttcagaacctgaatcaataactttgtttatgttatttttctctatttatttgaaacttgaatgctttcctaacagaatttcttatgttctgttttcagtcaccctgaaaaaaaaattctgagaatatttaaggatatttctaaaacatactaacaactagtgagcctagatggttcattagatgactttggttgctttcagttctcttggtaaaatttgaaaggcaactaaaatttccattacctcacctcgttgcattttgggggcctggttaattagtattttataaagcactttagagggtttatttataaacttgttaaggaacctgacttgaatgtcttttttttttttaaggcagagtttcactgttgcccaggatggagtgcagtggtgtcatcacaggtcactgccaccttgacctcctgggctcaagtgatcctcctcctttagctccctgagtagctgggacttgcagtgccaccatgcccagctaattttttttaaattaatttttttgtggagatgaggtctcactgtgttgcctaagatggtcttgaactcctggactcaagttatcctcccactttggcctcccattacaggcatgagccattgtgcttggcctcacatattttgattttaggattgttttccaattgagaaatgtctaaatggttcaagtttaacaaaaatcatatactaatttgttaattatttttctgtgagttcttttctttctgccctctccctttctcccttcctcccccttcagaggttggtagaaaaaaaaaaaaaaggcaaggaagtttctttttgtggagagaggaaatgactgttggttcaagactttatccatattaggtataaactaaatatagacgtgtaatccaggagtgaagtcacatctataaagtttcttaagcaaagctaatgagatcagccagtgcttttggatctgttttttccccccttgcttttggctcacttaccaaactgattagtcttatagtctgcctgcctttgcttctttaaaaaaagaataaaaaaattataaggaatctttctgtaaaacaagcacacaaatttttaaaaagttgctttgtatatgaagcatagtcacttatgcctccctttgaggggaggttataaataaattagcttctttaatttcttgaccttgtcattttcctcacaccaattcttcttcttttttttttgttttttgagttggttttatccttgagtctttgtcacatatttttactgtgaggctggactcatctttgtaagttgtaagaaacgtgttttacttagtattttcttggtttattccatttttaaccattaaagcagatctcagtatggctaaatggtaataggatttcttctgattggctggttagagagattgtaatagaacggaatgatggaataaatctgcttctggtcacagcacatgtccttctcaaataaggactttgaaaagtcccccaaagcattcttacaataattatttccaactcttgtgttccttcttagagccctttgcaagcattcctaaacactcaagcccttacgaacgtgctatgcttctgaagagaagaactatatacacacatctgtggcgcatcttactataaatactttggaatacaactaattgtgtaaaaagtttagcttaacatatttcggggttttagggatcagttcatgaaactaaatgttctccaagcctaagttggaatctgttctgaatccttctctgaccatgttgttcccttagcagaactactctttcctactgtttggggcagtttgtgcatttttatattctgccactcatctgaatcacctttaattacatttttgttccaggctagaatgtaaattccaggagatcaaggataagggattattttcttttttcttctttttatattttaaatttaaaaaattattatgttcttctaaagactaagggactattttcttcatcttttatatctaccccctaccacaaacctttatatataggagataattcattaattcagtaagcatttattagtgttttttggcaaattggtgtgcatagtataggaatataagcatgtaagagagaatatattaaatattttctgttattgtgttctatattacctcatagtaaaataccagagttaaaagtagtattcagttattgaacttgagacatgtaattggggttttgtaactagctactcactatatagctattggtctaaacctaacagattggtttagagaactagaatattatgtaactggaaggccaggttcaagtcctatgtgtatcctaattgatctgctacctcatctgtcaagtgggtgtatttcttggaggtgatgttcagtccagtttgtattattttatatgccaaggtagccttaggcttggcttaagcttaggcttaggcagaaagttgagccctgagattccaacgtcagatccagagaattaaattctcataattagaagcaatctattagataacaaaaatagagccaatacaaattcttcatgataatggaggcagtttgccaaagaaagaaaaaatatttcaggagtgaattctttgacccgaaagaatatattttatttcccaggtgagctcctgaaagaaagtttaaggaaagattttgtttgttgtatctaaaataaagcagacacagaaccattcttcttcttcttttttttttaaagccagtcaaatttatagaattttccttcatcatatttgagtaacctgtgcattgaaatccgaagtaaaatatttcagtaagaaacatcctgctatgttatactcttcagatatttgaagttttaggccagcaaagaagatagacaagaattctgaatattaactttcacagctgaaatacagtgttgaatatataatttttgcggaaactaattttgtaatgtatatatatagagagagacggagtcttgctctctcgcccaggctagagtgcagtggcacgatctcagctcactgcagtctccgcctcccagattcaagcgattctcctgcctcagcctcctgagtagctggaattacaggtgcccgccaccgtgtccagctaatttttgtattattagtagagacggggtttcaccatcttggccaggctggtcttgaacccctgacctcatgatccacccaccttggcctcccaaagtgctgggattacaggtgtgagccacagcgcccggctgattttgtaatatattttaatgaacatttaaaaatacataatccaaaattaaaacaaatgaggaagattcattaatttattcatgtttgttgagagctaatattttatactattaataaaatattgtatagcattttcatgattgcagtttttcattgtttatggtcatcttcattaatccattgttcttagtcatttagaggtctgaaatttggctttaagcaatattgtgatatatatccttacagccaattttctgtgcatgtcaagcaattgtgttttaaaagtcccccacatatctcatttaccctctgaattctttattttccttttgtttacttaaactgtaatctctcttttttcacacttcacctggaatgtaatctcttaaaaagaaaaaactttctgcagaatttaggttttttacaaagggaaaattggatttttgactctactactgaactcttggtggagtgtctagttaaaattggtctgagaacttgatgaacagaaatagctgccttaagcatagatggggaagaataatattaatttcttgaacatttcattgttttcttgtactcttgggattctttgtgaatctagtttatactacagtataatgtgtatacccttaaggaaagtgggttgctgcattttgacttgcagaagcatttcacctatgtcccaacatagttgtctttagttgataaacaagggaagaccctggcagttagtgaatttatctttggttagcagatattttttaaaaatgagggctagacaatgaaaaagtttgagatgcacctttttttttttttttttttttttttgacagggcctcactttgtcatccaggctagagtgcagtggtaagatcatagctcactacatccttgacctcctgggctcaagtgatcctcctgcttaagccttctgagtagctaggactaaaggtgtgtactaccatatctggctaattttcttatttttcatagagatgggggtctcactgtgttgtccaggctggtctcaaaactcccagcttcaagtgatcctcccaccttggcttcccagagtgttgggattacaggtgtgagccattgcacccagccagagatgcacttttttttgatgtaaccaaagtgagaataattataaaggagcatgtttcttttttattttaattttaattttttttgttgtataaatggagtctccctctgtggccctggctggagtgcagtggtgcgatcttggctcactgcaacctctgcctcttggagtcaaacagttctcctgcctcagcctcccgagtagctgggactacaggtgcacactgcgacacctggctaatttcttttgtatttttagtagagacggggtttcaccgtgttgcccaggctggtcttaaactcctgagctcaggcagtccgcctgccttggcctcccaaagtgttgggattacaggcgtgagccaccacgcccagctaagtaacttcttttttaaataaaataatcatggattaatataataaaaacaaattagtgttctgtgtttctgaaattaagtcatttagtgccaaactttcacattctaaatagttgtatctgaaaatgtcttgacttctcttccattctttaaagatggttttgttggaaatagaattttgagttgatttttattgttgttattgttattctttcagcaatttaaaaaatgttcttgactgggcgtggtggctcatgcctgtaatctcagcactttgggaggctgaagtggaagatctcttgagcccaggagttcgagaccatcttgggcaacctagtgagaccctgtctctacaaaaaattgaaaaaatagctggacatggtggcaggtgcctggtcccagctacttgcgaggctgaggtgggaggatggcttgatccctggagatcgaggctgcagtgagagctgcgcttcagcttaggcgacagagcgggaccttgtctgaaaaaaaaaggaccgagggcagtggctcatgcctataatcacagcactttgagaggccaaggtgggtggatcacctgaggtcaggaattcaagaccagcctggccaacatggtgaaaacctgactctactgaaaatacaaaaattagctggatgtggtggcgcatgcctgtaatcccagctactggggcagctgaggcgggagaatcgcttgaacccaggacgcacaggttgcagtgagccgagatcacaccactgtattccagcctgggtgacagagtgagactccatctgaaaaaaaaaaaaaagaaagtgattccatgttttctggcctccattactccaaatgataattcaacagtcattcaaattattatttccttgtatgcaatgtgttgtttttttctagctaccgtgaagattttctttttcttcctttctttctttcttttttttttttttttttttgcttttcattatttcaattatgatatacttaggtatggcattatttgtattgaatctgcttgatgttcatgaaacttgaatctgtaaatttgtctttttttgggaaaattttggccgttatttcttgaaatatttttttcctcattgtctccttctggaactctaaaatataaatgttttagtattttcccgtaggtctttgaggctcttttttttctgttcttcaaattgaataatttcttggttctgtctttatgttcacagacctctttctttcttctctctctcttttctttctttcttttctctttctttctctttccctctcttttcttttcttttccttctttattctactgttaagccaatctagtaatatgaaaaaataatttagatattgtagtttttagttctagaatttacatttttgtgtgtgatttctttccctactgagatttcctatcttcctttattttgagcatatttttctttcgttatttgaacatagttaccataactgccttaaaatccttgactgcaaactgtagaatctgggtcatcttagggtagtctccttgattacttttttttttttttcttgagaatgggtcaggtttttccatttcttcttatagggagtaattttggattatattctggatattacaaatgataaatgataatttatatatataaattttgttatgcccgtcttaaaagcattgattttcttttctaaagcaggcaattgattaacttacctgaattcaagctgcaaaactgtccccccatagtaggtggcagtgtacatttcagttcagttctcttagctggcctacttggagcctgctctgtgcatgtgtgtttcacggatcagcgagagatttagacagatttatgcagattttagggctcccctgtgctggttctctctctctctctttttaatggtgtcttactttattttctttgcagtggtgatggttgctctagactgttttttggcttttaaagtcagcagaactgtgaattttccattggagttttagctgccctacatggtgcaaggctaaaagataaaacttggggaaacttgtccagtgcagttcctttcctccaagtgccaactcccctccaatatttgcctgcttttgtcactctccagtgccttcaggtgtttttgtctggaagttatagctgttatgataggcagagttgatcctataggaggaactgcctggtcttactagaagactcaaacttatttttttaaaaacagaaacctttaaattttagaatagttttagatttgtagaaaaattgcaaaaataatacagagttctgaaatttattttaaatgaaagtatttctaaaatatattaatgcttccttgacttttgaaaatgctgagtttggccaggtgtcatggctcatgcctgtaatcccagcactttgggaggctgaggcaggtggatcaccagaggtcaggaaaccctgtctctaccaaaaatacaaaaattagctgggcatggtggtaggggcctgtagtcccagctactcgggaggctgaggcaggagaatcccttgaacccaggaggcggaggttgcagtgagcaaagatcatgccattgcactccagcctgggcgacaagagcaaaactctgtctcaaaaaaaaacccgaaaatgctgggtttaactgccaattaatgtcaacattctgaatataaattcagtaatgcaacaatggcctcgggagccgttgaggcatgtaagactatttttgtctttctgctaaatggcctcagctattgtgcttttcgaacctaaatctcctttgtgtgtgtgcatgtgtggatgggtgcatgcgtgcatgtgtgtgtgtattttgtatttcttcctttgccaacttagctctattgatgcagcccatttccgttaattttctattgtaatttgttgtggctcagtacaccagataaactgttaaaatttgtttgaaataggaataaatggtttcaggccaggcacggtggctcacgcctataatgctagcactttgggaggccagggcgggcggatcaagaggtcaggagttcaagaccagcctgaccaacatggtgaaaccctgtctctactaaaaatacaagaattagtcaggcgtggtggcatgtgcctgtaatcccagctactcgggaggctgaggcaggagaatcgcttgaacctgggaggtggaggttgcagtgagccgagatcacgccgctgcactctagcctgggtgatagagcaaaaaaaaagaacaaatagtttctgagagcttgaatgttgagttaatgagtcaggtacatcatctttagtatctggtcttggtgacattggtgcccagaggccttttctctagatgcctgctgtcaatacaattgtcgctacctatacatggctattcagtgtttgaaatatgtctagtttgagttgagatgtactataattatgaaatatacaccagattttaaagatgtagtacaaagaaaagaatgtaataactttttatgttgatcatgtgttgaatgatgttagatatattgggttaaataaaaaaatttaatcacacttgtttcttttacttttaagaaaatgtggaatgcttcacaaatttgtgcgtcattcttgaacaggggccatgctaatctgttttgaattgtcccaattttagtattcatgctgtcaaagtaagtactctttttaagtcttcaatatggctgctagaaaat

SEQ ID NO: 5 - DNA, 22691 bp, Homo sapiens
  source 1..22691: mol_type = other DNA
aggggcactgctctgtccgagtgctgcccttggggcgaggcgggcatgtggctctacaaggtggagtccaggcggccaaagtttggaaaggtagggaaggacccccccgccctccgcctgctccgccctgcccttgttctcgagaatggggagctggttcggacctagtccggggtccactgccacgccctcttccacggcgagaccacccccctagtcccaggcccacacctggggatgctccccaggcgccctgcaacccccggcattgtcctcctgccctccgggacaggactacacttcccgaggtgcttcggggtcccggggggcggcgctccacgcgggttgtggggggcgggggcggcacgtgccgccgctctcggccaatgcggagccccgcgcggaggtcacgtgcctctgtttggcgcttttgtgcgcgcccgggtctgttggtgctcagagtgtggtcaggcggctcggactgagcaggtgggtgcggggctcggaggaggcggcggctggctgaggccagcaagagggacgcggtcggcgggaggggctgggccgtggcagcgaccccctgctgcagggcggcgggcggggctgcgggcctcggaggggttggtgggcgggggtcgctccgctttgtgtgtggctcgggcggagcctcgcctttgtccccgctctccgggggcgcggctgttcgtgggcagggggctgggcgatcaccgggcgtccgctccggggtgccgtcgaggagacaatagggggcgtgggccctcgtttacctccctccctccctcccttccctgcgggccccgccgggttccccattgtctgaagggacggggcggtgccccagggaccagcggctttaggaccaaactgcgggcagccagggccgcgaccctccctgcgaccgtcccctggcgaccgcagctggtgattgaggggcggcgctcccgggccccacgagggttcttctgtcttcgcggccggacgcgcggacagcgtgggtggcggcaggttgggcatggggacggcgggaggcggtggcgagctcaccgcgggaccacccgggggcctgttcccggggcctgccccacccgctgaactgtgaagggggtggtggcggcggcctggaggtgtttttggcgggagttggggggggcgtccgcgcagggggagtcaggcaggggcggagttacccggattggaccgttagccccgcccacccctccccttcccacgcgcgcgggctccggggtgttgagttcggggagattcgaaaaggcgcggggaggaagggggcggggccaggggccggagcgcaaggcgtgctctgattggccgggggcgaccggtcctcttttcctcgcccggaccagggccacgcccatcctgggtccggtgctgcgtctaattctctgcttttcttaaatcttgtcgctgcctctgattttaattcctagcttttgggaacctgtcatcctacgtttttggtactagctggcgtctacaaaagtcataatgttaaaaagatcaacaagagatacagcatttttcatgacataacggcagcaaatataagtcaaaatctagaggttcataaacattttgcttgctgttgggcaaggaagcttaaacctgagggacaataggagttcaacattattggttactattagcttgggcgttttcttatccaccacgtcagacacagacaaagcaggggtgggtatttcatttgcacaatgagttgtaggcagtattaagatggctccgggggcactgttgagttgaatctggaatatcttcttacagtttcggtgaaatgttaaagagtttatgggggaaaaattcttcacccttgtgactttgtctgattttaaaaatccaagagttttatgaccgagaaagctcagttaacttgattttctggaaccaatatcatattcaggtcatatttcccaatgtttatttagtagattttgataatttttttcgtggttaatttagacgtctttattccacgtatttttctgacgatgtatgtagatgtgatgtgagatttttttgggttgatgacatatagaaaggcaaagaaagtgattgcatgtttttgaaaatcattttcaggactttccttatcccagttgattgtgcagaatacactgcctgtcgcttgtcttctattcaccatggcttcttctggtaggtaatctatttggaaaatctgaaattgtaatgggcttatgattttagattgagatggctcaggtcttcgcctttgatttggcacttatgttttggtcttaccaaaacctattttatgaataggagaagaatttaaaaatgattatcacttgaatgtgccgagagctcgtaattgtttattggacagtttggcttagtctgaagcaaaattgtggagtttgcacaagtcttttgtttatgaaagcgattgtcagatactgatgtctcaaaacagtatttattaatccaaaaatgttgagctttgtttttctgggagatggtttttattttttttgagacagggtctcaccttgttgcccaggctggagtgcagtggcttaattatagctcattgcagccttgacttctggagctcaagtgggctcaagcgattctcccacctcagcctccatagcatctgggactatcgacatgggccaccacacccacctaatcaaaaaaaattttttttgtagagatgggctttccctttgttgcccaggctggtctcaaacttcagggctcaagggatcttcccatgttggcctcccacggtgctgggattataggcatgagccatggtacctggccttgggaaatggtatttagataataatatcttgcctgcaaatacatcttcccctagtgtcagtagactgataggaataaaaaggggaaaaaaaacacaactttcctcatcagccctagtttaatacattaaattgatttgggttttagaaaattatagtacagtttattagaacaggagaatcctggttttctgaattataaatataatcaattctagatatccaggtgaaagaactggagaagcgtgcctcaggccaggcttttgagctgattctcagccctcggtcaaaagaatctgttccagaattccccctttcccctccaaagaagaaggatctttccctggaggaaattcagaagaaattagaagctgcagaagaaagacgcaaggtaaacgaagcaattcacagaaagcaggatattaatttatgtaatgggcagatcaattttatttctataacaggaagaaaacagaattgtagctacactgtgattattacatatgccagtgactggaaggaaataccagtcctcatttattgaactcctgttacatgcccgctcctttgtttatatttttctcctttaatacatggtgttgcctcaaataatggaaattagaaacagtttcaggaatgttaagtcgtttttctgcagtcatacaactagtaagtgttggggtcagaattcaagccctggtctatcttaaaccaaagctcatgcttctctcatgcttcctctttgaaaagatttgttgccagatgattctttggcactttggttttgttttttgagagctgtacaataacattttaaattgctagtgtgattgtgttgctcagctggtatcatggtagcttttctcttatctaaacaattctattataaagtaactatctttaaaagctaatcagaagaatcaataaatattaatatgctagttgtagaaaatttgggaaatacagaaatttataaatggaaattaaaagtattcattatcccgcttccgagaagcaaccagtgttaacattttggtgtgtttctttccattcaatgttactcattaacaactgtacataacttttcatttaactccctttctcaacaaccctgataggattgattttaaagctggggcaagtgaggcacaaaaggtaaggtaataaccttccccagaccagcatagtgatttgtagtatacacacacacccgcccgaagagcctcagtgcttacactaaggagtcgtcttctatgcaatagtgtgagttcatggagtaggaggaagcaatacaaccaaaggttggacagtggaaagctttttagacatcaaccctggccctgtagtcattagcctgtgctttacatagtaactggctaaatataatgaaactcccatcatgactaggatttggcagaagagaatcaatagaaccagtgtcagatgctctgtggttatcctgcaagtcagtggttccaatgtgttttgagaacaagctgttctgttgaaggggtcataccaaggtatggtctggtaattaatgcagtttcctgagacaaaagctaataagccttttccttgaaacaaatttttctgtcttaaatagtaatctacagacttagtcttgaatttcctatcattgttttatcagttatggttaaaatttttacaatgagctagttttctttgggtagcttttgaagttaaatagtgaaattctttacaataaaagtgccactcgcaagtacatattcctcaagtcatccagataccattaagcagtaaatcttacaaggatttccttaaggactaattgggtaagatttctgaacagataagcacttttccaaagttaaatacaaatactagaaaaagaatatcattttcacagtattttatgatagggataattcaggtcctaattttggtgttatttaaagggaccttattttctgccccttttcaatccccttagtaaattatttttattgtaattttaacttatgctgaatacattttattttttgaggcagagtctctgtcacccagggtggagtgcagtggcacgatctcagttcactgcaacctccacctcccgggttcaagcaattcttctgcctcagcctcccaagtaacttagactacaggcacccgccaccacgcccggctaatttttgtatttttagtataggtaggatttcaccatgttggccaggctggtcttgaactcctgacctcaaatgatccacccaccttggcctcccaaagtgctgggattacaggcgtgagccaccacacccagcctgaatacattttagagtgcctagcctattaaacttttttttccagtcccatgaagctgaggtcttgaagcagctggctgagaaacgagagcacgagaaagaagtgcttcagaaggcaatagaagagaacaacaacttcagtaaaatggcagaagagaaactgacccacaaaatggaagctaataaagagaaccgagaggcacaaatggctgccaaactggaacgtttgcgagagaaggttggtttcttactttgtaaaagggttgagcttggagtttgatgcaccaatgagttggcttgaactaagtgctttgataaaaggtgtttggtgtctttttgtcatccattttggggcttaacatattaaatgaaaggtatattttaagatggaatattcagtaattcccagcataattgcacagtccttggaagtccagtaggcagcttgttaggttctacaagggacccaggagatttgatgatgatgtctcagaacttaaattgtgtggttcccacaggctgtaatatatgcactgaggttgtgttgggcctctttgaggtgggggctgggggtcgtgacttgacaggcttttttttttttttttttttttgactgatgacaccttacccttcctttacaggataagcacattgaagaagtgcggaagaacaaagaatccaaagaccctgctgacgagactgaagctgactaatttgttctgagaactgactttctccccatccccttcctaaatatccaaagactgtactggccagtgtcattttattttttccctcctgacaaatattttagaagctaatgtaggactgtataggtagatccagatccagactgtaagatgttgttttaggggctaaaggggagaaactgaaagtgttttactctttttctaaagtgttggtctttctaatgtagctatttttcttgttgcatcttttctacttcagtacacttggtgtactgggttaatggctagtactgtattggctctgtgaaaacatatttgtgaaaagagtatgtagtggcttcttttgaactgttagatgctgaatatctgttcacttttcaatcccaattctgtcccaatcttaccagatgctactggacttgaatggttaataaaactgcacagtgctgttggtggcagtgacttcttttgagttaggttaataaatcaagccatagagcccctcctggttgatacttgttccagatggggcctttggggctggtagaaatacccaacgcacaaatgaccgcacgttctctgccccgtttcttgccccagtgtggtttgcattgtctccttccacaatgactgctttgtttggatgcctcagcccaggtcagctgttactttctttcagatgtttatttgcaaacaaccattttttgttctgtgtcccttttaaaaggcagattaaaagcacaagcgtgtttctagagaacagttgagagagaatctcaagattctacttggtggtttgcttgctctacgttacaggtggggcatgtcctcatcctttcctgccataaaagctatgacacgagaatcagaatattaataaaactttatgtactgctgtagcaactcctgtgaaatgactaaagggaaccttaattatttctaaagtagcatttgactcgggtggttaaggttggcagatacgtcatcttgtatccagaggctgtaatagtccccattgtcagtgctttgcctctcaattcagggaacgcctttggcagctttcctgtgctatttgagaaatagcctaattatacatattttgtgcctctcagacatctgtataaaagctcttggaagccaagcacttatagcaaaagatgattgctaatactgcggtggggtccatgtgttgctaacgcatgtgcctctgctgcttgggctgtatcttgagattggggttttaccaaacttattcatgagaacaataacagcctacctcaacttacctcctaagattgttaggattaaatgggtttgtggcaagagagcacacttagaacatagatatttagcattccgtataaatcacgattactgttttcaaccagaggctaatgagtgatctaagtttatactcttgagttggaaattatgcagtttttatattccttaaattgacttttaaatttacttaaatgatcaatcagaggaattctgaacaaagcttggtttaaggagttacgcccatgtagggcaaataggagcaagtgcaagtatagttgaatacaacaataggttctgagcaatatctaaaccaagaggacaggatgaggcttgtgtgcagtggtgcagcacagttcatcttggctcctgtctctggcacatagcaggtgctctgggatctttaaaataccagttctgaatagatgggaatataaagagggcctgagggtagaaacttggcataatgatacgaggtgtcctacaagtggcagtgagcttttgttcatctaagacatttagggagggaaactggcctcaggagaaagcaagggaaggatcaacaggcctgaaaggatgcctcatcagttaccacccatcccatggtggccctgacttcctatcagagggcgatcctgagcccctgccttgtgacaggcttaagtcacaggaaactgaaggggatgcatcttaccacagaaatagaagctctggcttttctatttcaccttgacctttggagaagcacttagtcctgggcccccattttctcctggataaaatgagatggttgggggagatcagttaagtaactttcactcccccattctttgcatctggcttggagtgaagaggaggagcggtggcacctacgagcttctggggaagtgtctctgggtatgcattcccgggcccggcattctctgccatcacgggagtctgcgtctgtcccagtggggccagcctctcccagcagtacttccaatagattggcctaataaggccagagtggtttgacaagcagttggggctgtcaccaaggagcagactccattccttttgtcttgaatggaaaatgaggcttgtcccttcctgaggattttgtacttgggccttatggttgactgggctcagtggagagaggtttgaaggacgtgaaggaggcccttaaattaacatttgacaagcacctagattgtgctccacactggcctttgcgctagggatggagaaaagatggggtgggaccagcatatcacgtgcccatgtgaggggaaggagagctgtagaatgcttacttacctgagggtgaggctctcgaccacatacttgtactcaccagggtgctttagtgctttggtgaaaggagtgaccacagagggctttgtggtctgggaagctttgagaggagaaaggacatgagcttgtccttttggaagtcagatgaaccttccaagccaaaccccaataaagcacttaattgttaaacacttagtaagcctgtgattgccacgtgcacagagaacctgccatagttaatggcctttggcaggccctccaggcaggccccctccccatttttttattctaagcagtggaggctctttgaaggcttttgaatgtggggggctgcagtggtcagtaacaaaaccattttaaggaagagaaagtggaggcagggtgagttgactggagagtggctgccgttcaggctacggtggccatggtggctgttggggcagcacagggatgaggtgggagggcctgctgggctctggagcaatccatgtgactgacactgcactgaggaactgggacatgtgctctaaacttgggaagctggaggagaaagaaatcactccacttgggaaaatggcagtgctactatttactgagcacttaacgtccaggcatcgtgttcattttctccaccatagagaagtgaacaggcagagtaacgtacccaaggtcctaagctagtaggagaagcttacccaggcagatctgctctaagccctgcacaggaaggggggctgctctgacagctcagcatcccctcgttgcccggaacaattcccctctgcctcagacctgctcacaagtctcagcaaatgaaagccctactattcagccgttcccacctccttaaaaaggcagggcctcttatccttgcatgccttggagtgaggtctcatcccccacccccagcacctttataaaggtgctcctgtctactctgtatcattctcccagtggagaattctgattttcagtgatgttttagctgtcccggtaaacctgtgcacccagatgacagtttggctaccttactgcgaattcatttgtttgaatcactgttaaatgtggttcatttaggaatacagaagataaaggccaaattttttcttttctttttttttttttttcgagacagtcttgctctgttgcccaggctggagtgcagtggcacgatcttggctcactgcaacctccgcctccccagttcaagcgattctcctgcctcagcctcccaagtagctgggattacaggcgtgcaccaccgtgcctggctaatttttgtattcttagtagagacagggtttcaccacgttggccaggctggtcttgaactcttgacctcatgatctgcctgcctcagcctcccaaagtgctggcattacaggcatgagccaccgcgcctggcaaggccaagtttcttatagaaaagcttccccctttggatggaggttggacttagatgccctagaagttcccttccaaatccaagactgattctctacagggttggattgcagaccacctgagatcagagaccatgtcatagacacagagctgaactccaaggacccagacacattgctggtgagccaagtctcttgacacttgcctcctccctttttgcccaggtgaaacgaaggtccaaaatgtccctgtggctgaggcctctgccagcagaagctggtattctgtacttaagggcgtaggaaagggtttctgacttgtttcgtacatgcacttagatttttaaaacttagttgtagggtttgatgagctccaaaatgcagcagcttcatggaagggctctggttcatagttagaaaggcctggcctgcttccatcgtggccaagagcagagcagtacctgcccagtccttgggcaccatatcctactgagacaagtaggctgctgaaattggatccataggaagaaaaaacagacaggaaatgagccagctacctcatagcagccatctcagcagaaaaggactgagcctctcctgggcctggagcttccaatccctgtggcctcctgctcccctcactggcagaaagccccagtattcactgggatggggaagtccccatgctaagcctagcctcccctcttccctgctctcacagctctctatttaatagcagcaactaataattatttgcattgtctcagtgaatccccagaacagccctatgaggttatcatggccattccataggcgagaagtaaggcaactggacctagattaggggatttacctaaaatgacaactagcaagcagtagagtcaggactcaaacccagacttttaacccccatgctgtactgcaactcctcatgtatcacaagtgttactcattaattcaagtgtctccccagctagaacacagggtccctgaaaacagggactcctcctgtcacattcaccactggatctcctggctcgtggtgggaggttaatgtgctggattaaataatgatgagtgggtgggtgactcccacggtctacctcagggcactggctttgtcctcatcctttgcggaccccatgtggagtaaacccgattttctagaagcaaatgaagggtctgcaccagctttgcagatggctctgaggtgcacaatccttaatggaatcctcctggatccgaacgcacaaactggtggcctgcagccaatgttgaaccataggcatgttgcattcagcccatgctgtgttttaaattgttgaattagctgacaattccatgtgaaaatctgatttcaagcttatcttgaaaaaagctgacagatctggcaaccctgggcttgcagtcccacccagcggccgtcagcggactctgggcagttgctgcccccttgaggcgggacttgtgttctgcagctctccatccccttgggcccacccacttctgtctttcgctggatccgccctgcccctgctggaggcccagcatttgcagtccctgacacagagactagtaactccatcactccaagtcagccaaactgttttttagatcaaaagtccagtcagtataaaaggacgtgtaatagcctgtaatcccagcactttgggagaccgaggcgggcagatcacgaggtcaggaaattgagaccatcctggctaacacggtgaaaccccgtctctactaaaaatacaaaaacaagattagccgggcgtggtggcgggtgcctgtagtcccagctactcgggaggctgaggcaggagaatggtatgaacccgggaggtagaggttgcagtgagcatagatcacgccaccgcactccagtctgggcaacagagcgatactgtgtctcaaaaaaaaaaaaaaaaaaaaagacgtataataaaagtgaatctccctccctcccaggtcacctagctgtctcccgtgtctccttccagagatgtactgtacctctaagcccagtcaccaaacacttgctggcacctctatgggccagacaccagctgggtatcaggatcacatggtactttttcaaaatatgagactcaggaccctcagacctttggaggtagaatttctaaaattggagccagcctgttgctgggtgtggtggtacacacctgtaatcccagcactttgggaggccgaggagggaggatcacttgaggccaggagttagagaccagccttatttatttagagacatagcaagattctgtctctaaataattaaaaaatgaaagtaaataaaaaaataaaattggagccccagtgtctagaatttttttcagacagggtctctctctttgtcacccaggccggagtgcagtggtgcaaacacagctcactgcagcctcaacatccttggctcaagcaatcctccaacctcaatttccagagtagcttggactataggtgcatgccacaatggccggctaattttcgtattttttgtagagacaagatttcaccatgttgcccaggccggtctcgaactcctgagctcaagcaatccaccagcctcaacttcccagagtgctgcgattacaggcatgggccatcgtgtctggcctagatttttttttttaagccagcgtttctgttgctcacctaggcagagacccctcaggatgcaacatctaaacaccattgccatctctccagtccccaacagcctggtggagatgggcctgcagctgcacccatcacagcccctgctcacagtgtgcagactgtaccctgcacaggagatcccactgaggagatgtggggcctgaaatccagtcataccctacaaccaaggcacacagtacattccctcatcttcccaggaacaggcaccacttcctaatttaccatgttacccattcaatacaaatacagggagacctgtgctctcctctgctgtgggacacagataggggctcctcaggatgcaggcccaggatgaattcctgtaggagataatgcttgggtcaagtttggtttagggaatagaagcaaagaagtcacctctctactttttacctccccaatccaggctaccccaccccatgactccctgtggttatcagggacatcaccattctcctggccactgacagggacactttaataacagtacacattggccaggcgcagtggctcacacctgtcatcccagcactttgggaggccaaggtgggcggatcacctgaggtcaggagtttgagaccggcttggccaacatggtgaaaccccgtctctgctaaaaatacaaaaattagccaggcgtgatggcgggtgcctgtaatcccagctgcttgggaggctgaggcaagagaatggcttgaacctaggaggcggaggttgcagtgagccgagttcacaccatcgcagtccagcctggtcaacaagaacaagactgtgtctcaaaaaaataaataaaaaccactgtacatcaacaaggcccttggggacagctggggcataagtaggtgtcagccatacatcagagcagtgtgcctgccctgagctgcttggggttgaccagcctggtgtccagaaatgcctgctggagggagtcgtggtacaggaaccttgtgctcttagaaggtctcctgagaggccctgtaaagccagagtccctcttagcagctcagatcagtgctatcaaagtatagctcggggattgctgccagcatacaaacttttactggtctgcagcgagataagtacagaaattgaaagtaagcatttagaaacttttataacaattttacaaggtcttgtcaaatgttattaaaacaaagctgaggctggaatttcacctttttcatttcgtttttttcaatttaaacaaattgtagtaaaatatagataatataaatgtaccattttagccatttttgagcgtacaatttagtagcagtaagtgctttcacaatattgtgtaaccactagtattatatagtatatatttttaaaattttacagaagtattaagttagcagcagattaaacatttttttcttaaattgagcttgagaagcgctggcctaaatggtaacctgtggggaagccttgatggtttggaggctcctaattgagtccattgcttggcttttttccccaaatcacggagtggagttaggtcccagagaatggtgttggctgaggcccaggctcccacccgggctagaaaactgggcagatgggcaccacccttgaagggaggccagccaggcactgcaaagcctggggtagtgctgtcccgtgtgcccgggccaggaaggctagatgagaggcccgggggcgtttggtttagaggcccagcaggctttccttctgactcagtgtagggaggcggttgtttagaatctcaagaatctcagctccagctgggaggggaccctcagcggctcagcggctcagccgtggtggcatctaccctccctgtttaaagaaggaatctgaggtaagagagaaagaactggttcaagcttgcaaccagttagtgatgtagtagtgatggtctcaaatacaggccttttaattcctaggcagaggcagggcagagattttatttaaaaaaaaaaaaaaaaaaaaaagtcttgctctgtctcccaggctggaatgcagtggcgcaatctcggctcactgcaacctccgcctcctgggtttaagcaattcttctgcctcagcctcccaagtagctgggattgcaggcaccccaccaccatgcccagctaatttttgtatttttagtagagacgaggttttgccatgttggccaggctagtctcgaactcgacctcaggtgattcgcccacctcggcctcccgaagtgctgggattacaggcgtgagccacagcacctggcctaatttatttttaattttaatttttaaatttttctcagactttagtgagcataagaatgggcagagatttttagagtcacacagaatagtattccggttctggctctaagagcttttcagggggcttgggcacccataccctcatctgtaaactgcagagaccccctcgcaggctgcatgagtattgagcccagtgctgaaatgcccagcacagggctggcccctccctgcccagtgttcctcctgccagcttcatgggtctccccagcctgccatttccccctcattgtgtgtgttggtggtggggggtggcggggtgcagatgaaggcagatcctcttccccagaatgaggagagcagggggctcacagcctgctgcactggcccacctccacagccctgtccccactggccgcctctctgtacttgcctctgccaactctctgggtctttggcctttctttccaagatgcagaacgtttgtaaaacgaaggggttggaccagaagaactcagaagtccattttgagaaggggaagctaaagttcagatgccttaaagttctgtgtcttttctaggaggtccaaactcccagcatatctgactgggctgcccccaggggactgggacatctgcttttgtgtcacctggctccatcatttctccctcctctcttttctttctcttacatgactgaagttgtttgagctcttaaacaatttgccgtgcattgtataggcattttacataatccatctgaattttttttttttttttaagatggagttttgctcttgttgcccaagctggagtgcaatggcatgatctcggctcactgcaacctctgcctcctgggttcaagcaattatcctgccttagcctcctgcagctgggattacaggtgcctgccaccatgcccggcaaatttttgtatttttagtagagatggggtttcaccatgttggtcaggctggtcttgaactcctgacctcaggtgatccagccacctcggcctcccaaagtgctgggattacagacatgagctgctgtgcccggccccgattgaatccttaaaacaaccttgtgaagtaaatactattcttttttatcccattttatagatgaggaaactgaggttcagagagggtcaggtcactcatccactgctaattagaggcagagccagcaggctgcttgctctctcaatgccattttccagatggcgggggtcccattctggcttgaattcatggggctcaatatggcagtgcctgtgctcacctcttctttccagttttttccaaatggtctctgactcagtccctggatacgctcgcctagcaggatctcctgggctgctgggtgtgtcccgtagaccctggccgacctacggatgaaatgagtagtcagacaggtatgcagtgtaacagcagctagatgactacctggctctagtggccagagagcagccccgagaagctggggctgcttgcttttattccgtgcaggcacaatgccggaaacctggagccaacacaacctgtaggtaattaacatttattcttcccctttcagggaacttcatgtgcagataatcaaaggtcagtttctggtcaacataagtaaacaagcctgtttaagataaattcccccacactcccttgtacctactccttgccctctgcctcagggttatggaacagctgccttcagctgttctctcctggagctttgcagagccctctgacctttcagaaggcctgctccttttccctgtagtttctcccaccactctgactgatctcctacactgggcaatcagggaagagggctgggatgttagtccagtttcggacatacctcatgtgttgcgtccccttccccaagctccttcttctgctttctctttagatcttcaagagctagaaggttccctaagagaccacccgaaacaagcctctccatccacgtattcattgaatgaatacacctccagtcctcctacttaccaggcagtgttaggtcctgaggatacagcgatggacaaggcagacaaggtctctgcccttgtttacatcctggggggagaagacagactataaaagagattaggatgagtgctgtgaggatgaaaagggtgatataacagacaatgactgtgggcaggtgcagtgtgttcctggcaaagggaactgctagtgccaaggcctgatggcaggaactagcaggtgtgaggaaggagcctaagtgaggccctcttggctggatgaggtgggcaaggggaccccatacaaggaggtgctcagggtccagctgtgtagcctggggccagggcgagggtttggttatagtctgcatgatgcagttttgaagggctttaaggggggagtgatgtgatcagattacatgtgtaaagaattcttcagccaccaggaggagaatggacggtaaggagagccggagtgcacaagggagagagatgagagtggcttggacagtgaggtggagggtcatggttagattcaggatctaggtcatggtgaagataacaggagctgttggactggatgtgggcatgcagtgagggctgactcttgggcttttcccttggggagctgagtgaaggggggtgccatctactcaaacaagcctggagaaggagtaggtgtggggggatggatggaggggaacaatggtttcatttggccatcatggcagaccttgctggctgctctcccaggactgagtctctcctcccttataacagaaacctgaaaagtgttttattttgttgtttttgttgtttgaaatgaaaggtctcacatatttattactgaacccagccaaccaacgcattcataacagattcagagaggaaaaatgtattcccaataaaacatgtctaactgcagataacggtgacattttcagcttgatatggtaatgtgattgtgaccttcagacagcataaatgtgtgtgccatctcatgtggaattccttatagacccagcttggttctcctccgatgtctccttttggagttgtacctgattttattgccagttttcatcctaatccactggagaatggaacgattttgcttttgtttcttgaccaggaagtcttgtgagaagacatggcaagaagcggagtcaagcacacaccacgatggcagagaaagggagagaggggccattgtttttgttgttgttaagtagtcacctgtctggctccttgtaccttttgcccttttcccatcctcctttttcctggaacagagacgtgatacctagaagtacagcagccatcttgtgatcatcagggtaaaagtcacatgatggctgggacagggagatggatagatcgtgggtccttgataatatcattgagctgacataccagtctaggcaagttgatcattttacttgtttaagccactgtttttgagccaccacacctggcccattgtggcttttcattgcttgctgctgaatgaagtcatagctgatggagtcatgttgagttcaagatttttggaggagggacgtgggtctagggaaggaggatgaggttaccccatacactgagctagtcaacccagagttcagtcgtttattcattcaagaaatatttattgaggacctactatgcaccagcactatcccaggtgccgagaatttagcagcaaataaagcaaggattctcacccttgaggagtttgcattctgctgtaatcaagaagccagcctgacttatgggcaattgcatttcatttaatcccaagggtggtggggtatgaggtgtgaacaggtgatggtggtcgggcatggcatgtctattcccacagccctcctcacccactcgtgatgttagcaaatcaaaatagtcaacatgtttcttcagtgttttctaggagccaagcactgtgctgtgttctacctctgacggaggtgttctgattatccccatgttataggaaggttaagaaagcagctctagtcacacagctaaccagcggttgtgctagatttaaacccagggctttctgactccagaaattcactgacccccctcccacccctgggcaacctctttaaaaaacaacaacaacaacaacaacaagggccgggcacggtggctcacgcctgtaatcccagcactttgggaggccgaggtgggtggatcacgaagtcaagagatcgagaccatcctggccaaaatggcgaaaccccgtctctattaaaaatacaaaaattagccaggcatgatggcacatgcctgtagtcccagctactcaggaggctgacgcaggagaaccacttgaactcgggaggcggaggttacagtgagccaagattgcgccattacagtccagcctggcgacagagcgagactccatctcaaaaaaacaaaacaaaacaaaaaaaccccaaaaaacacatctttattgtctagaaatctatattttcaaaatcccccagaaaagatgctgttctctcacttcccccattttcttccttttcttccatacctctactataaaggacatttttataccatattaaaacttcacccagatgtccagacagctccccacctatgtatttctcttatttgcaagctgcatgttcatgtagccatctaagatgccagatagcccttgtactccattccccactttgtttcagcatcaccggctttcctgttaacccactgaggaaagcttcgggattgaggggtagacttaccgtaactatgggcaaatgctgcaggctcctggacaacctcttggccccttttcctgtacccctttttgtcattgtttaacaaaccacttcctgatttcccctttctccttgctttggaaagggacaatgtctcttgttcattcctgtggtccaggcacctgaacgaaggcctggcaaccttcattcctccatcccactttttaagaagctttctctatgctgagtgctgggaatatagacaagtcacagaacaagacacacaacccaggagggaaacaggtaattaacaggtgtcacagtataatgggtctggtaggataatcagagggacctacctttccttggtacaggaaagggcatccaagtcagaacagggtggtggggaccggtcaacgagggctgcctggaggagttgacacctgagctgagtcccagatgagaagcaggagttgagcagataaataaaagcagtggggccaggcacggtggctcatgcctgtaatcccagcactttgggagaccgaggcaggcagatcacgagttcaagagatcgaaacgatcctgtccatggtgaaaccccatctctcctcaaaatacaaaaatattagctaggtgtggtggcaggcatctgtagtcccagctactcaggaggctgaggcaggagaatctcttgaacctgggaggcggaggttgcagtgagctgagatcacacgactgcattccagcctgggcaacagagtgagactccatcccccaccaaaaaaaaaaaaaaaaaaaaaagtggtgggggtgttccagacaaagggagcagcacatggagggtggagagaggcgagatggcagcatgtgagcatggctggactgtggatgcaggtgcactcgtctcccactaaggagtcccgcctaagcatcctagaaatctggggccagaaggatcttaatcatcaacaaatccaacctcctccttttccaaatgaagcccagagaggggaagccatttttccaaggtcacatagaaagctaatgatggagaatagactcaaacttgctgcactgcctgagttttggattttctttttttccttccattccttccctctgcccttccctcccactgtcctccaattcatatttgtcacatgcctactttgcaccagcccagtaccctgacctccttgccttagaaccttaggcttccagagcctaggtcatcaccacctcttcctatcaaacctcctccccacaccccgttcctgcctgacctttcctactcgttaaaaatccagatgcctaggttgcttcccataccaacaagatcagaatgtctgggggtgggggccaggtgtcagtattttttaaagatccctggatgattccatttgtagcaaagtttgagaaccactgttttagccctgatgaagggcccctccacctcctgtcccttggcctctgggttgcagatgacctggtgatttttctttttcttccagatgtacttctggactcacgggcctggggcccacccagcacagatctctgctgagcaatcttgtctccactctgttcctgccctttgcccagccctgggcctccaatctgcattgattacctggtctgatctctctcaccatcactaggtacttaataaatatttgctgttgatgatagcaatgaccttgagactgatgaacagtctggccaagaggatccttgatgtggaagatagaaaaagcctttggggtcaggcagacttggattctaataccagccagttctgcttgctgtgtctgagcctcagtttactcatctgtgaagaggaggtagcaagaatgaaaatgcctgccttgtggtttgttgtaaggacagacactgccaacgtagagggcccagcagctcacagaccagttgctctgagagcagaccactcttgccttgatggtagggaactatttttgtgcgtggcaagtgggaccttaggaaggaaggcaactgtgaggcttctgagaaggaccctacacaagggagtttcctcccagggcaggtgaatggagagggtggcagaagcctacgggaaggggtcacagggatcagctagagagtgccaccacccttcctggggaatgcagggcaaggtccctggtgggagttttcctgggaagccaaagaagcgcccaacaaagacagaatcaacatttgggtacctttggtacccagaggcagcaatgccaactacaaccacactggaagaagaagaccttctccgcatagattctctgatctcttcctccttcatggcaccagccctggggaaccagcatggtggggaaataatgaagctggaatacaaccacttacagacttcacaacctcctcctgtagataccaaagggattttaggatcacattttatttctcacctgagcaagaaaagctacaggagcatctcaagcagagggcaggagtctccagaggagttcaaggggctctggcaagaaaaatcaaggggctgtgttcaagaactggctcccttggtgattgtattacgaagcccatgtgtgctggatgctgatgaaattgctgccaaatgcctgtgcagccttggcaaggccctttatttctctgggtctccatttctctctctcttttttttttttttttttttttgaggcagagtctcactctgtcgcccaggctggagggcagtggcgtgatctcggctcactgcaagccccaccttctgagttcacgccattctactgcctcagcctcccgagtagctgggactacaggcgcccaccaccacgcccggcttattttttgtatttttagtagagacggggtttcaccgcattagccaagatggtctcgatctcctgacctcgtgattcacccacctcagcctcccaaagtgctgggattacaggcatgagccactgcgcccggcctgggtctccgtttctctagctgtgaaatgactgttctaaaagagccctgccggactttggcagtctgtaagaagacctgagttcttctctcagttccaagcaggaaaattgaacataccctgagcccagagcctgcaacaaactctgggcagcctcaggaagtcaggcagtgaagtcggaaaaatgatctcttctgtatagggagaaaataaaagtttaaaaatttgt

SEQ ID NO: 6 - DNA, 32744 bp, Homo sapiens
  source 1..32744: mol_type = other DNA
cggaagtagtcggggagggccgcgcagtcggaccggctgctgagacgaacgcttcactggggcagtctctgcatatcatggggagatagacgctgctgcctgtgagtcttgggccctggcagttgaggaacaagagcgggaggagggagtcaggacccagacctacagtgggtcagtgttcgaaggaccaggttgtggacgagacggggctgtgaggattcaggctcttgggaagggactgactgagaggatcaggctcggagaagacgcggctgtggggacccgggctctaagacgggacttagggaacggggacggatgcgagttctccggcatctgagggaaagtggtctgagaggagcaggattatgaggacccgcactcctacgaggaaagggtcagaaaggaacggggcgtgaagacacaggctccggagaggtaaaagtggagcggtgaggacttgggctcctaagaggcagaagcgggacagtgaagacccgggctcctaaggattcagaaacggggcagcgaagacttaggttcctgaggggcagaagcagacagagaaaacttgagtttggaagggaacagaagcgggcagtgaagactggggcttctttggggacgggatccgggctttgagactccgagttcctgagtctcggaacagggctgtgagtacccaagctcctaaaagccttggatctaagggaccatggatatgagatcagcctacaaagtaaagggaaagggtttggaaaagatttagtgatccattttttcacagtattccctgaacccagagagataaaggacgtattcaggggaagacaacttctccttcgcactgcctacttggctcttggcaagcttttcttgtgtcagatactcaatctaggaagcccatatgcaaacatcttcattttctgcttcattcttgggaatcagatgtgaagttgaaaacagttggaactcagttatgtacttgataagtgctttaaatcccattccactcaaccctgaatgagcacagatctctgcatctcaaataaaagaatgtcagtgatggaagagtcccaaaagatcatcttttaaaaactcctattttacatttaagaaggctaaggttcaaagaggcttaggattacagtgaggcaatggttagttagatcataattttaatacagtacccttctgtgcgtagcaaatgagatgcttggttaatgttccttaaatgcttctagaatctttgctttatcttcaaactcaggagggaattttttttttttttttttttttgagacaggttctctctctgtcgcccagtctgaagtgcagcggctcagtcttggccccgtgcacctccaacctcctaggctcaagcagtcttcccacctatacctcctgagtagctggaactacgggcgtgtgccaccacgccctgctaatttttaaattttttgtagaaacagggtctcactatattgcccaggctggtctcaaactcctaagctcaagtgatcctcccaccttggcctcccaaagtgctgggattacaggcatgagtcacctcaccccccttgcagtttttgtttttgttttgttttgttttgtttttttgagacagagtcacccaggctggagtgcagtggcacgatctcggctcactgcaatctctgcttccccagttcaaacgattctcctgcctcagcctctcaagtagctggaattacaggtgtgtgccacaatgcccggctactttttgtatttttagtagagacaggtttttgccatgttggccaggctgtgtttcgaactcctgatctcaagtgatccgcccgcctcagcctcccgaagtgctgggattatagaaatgagccactgcgcccggcccagtttttatttccagtaaaaactggaaatttttacagtttctgataatttgagtgttgttactgtattgacattaatacagtaaatgtcacttaatagtaaggaaacctttatttttatttttgtgtttttgagacagggtcctgttctgttgcccatattggagtgcagtggcataatcatagttcactgcaacctatattcttgggctcaagcactcctcctgcctcagcctcctgggactgcaggtatgagccactacacccagctaatttttaagtttttttgtagagacagtgtttggctgtgttgcctaggctgctgttgaattcttggcctcaaatgattctcccgccttggcctcccaaaatgttcttataggcatgagccactgcacctggctggaacctttaaataaagctcagtgttatttatttatttaataagctgtttggaaagtcataaataagtgtgtcctgtatttttagtgcaaacatttactagggatggctgcttttggataaggatggtggggagacttgcaccagtcacttccttcaatattaatatctttttctgaaacctactcagactaacgaggcacagcttatgcactatcgagtattctatgatttaattatcacagccccacaagttagatattgtcagtcccgttgtacagataatgaaataggtttagagaggttactttgcctgaaatcacacagtgacccaaccccagttacatgtgcctctaaaacttttttctactcttctaagtggattcctctcagtttgtccatcagcaaaatagaagtaatcgttatacaaaacatataattgaatgaaagcatctcctccttcttaaggctcctctaaatgtcaaggactataacatattagggtacttatgtattgtggcatttgagaactaaattctgttttcacagaagcatagattattcaagatagaaaaacgggaactttgtagagcttttccttgcaatgtagaaagacatttaattttagatttaggaggccaagaaagactaatttggactgggcatgatggctcacacctgtaatcccagcactttgggaggccaaggcgggcgggtcacctgagatcaggagttcgagacccgcctggccaacatggcaaaaccccgtctctactaaacatacaaaaattagctgggcatggtggcacatgcctgtagtcccagctactctggaggctgaggtgggagagaatcacttgaatcctggaggtggaggttcaatgagccgagattgtgtcactgtactccagcctggacaacagaatgagactctgtctgaaaaaaaaaaaaagtaatttgaaaaacaagggcttaaatttgattgattttccagttaattatatcatgaactagatgtttgggggaattgggcttagttaaaactactattttttccccagggttagcctgtactatttgcaagcgcctattatatataaatgatcaaaactaacttataccaacttataagggaaagcataccgatgcccatgtcaccacttcaaagtacttgatggtttaattaatgataatttattcctgagttaacatccttacctatacttgcaaaatgtacttcatttcatttgtggctctagcgttgacttattataataggacttcaaaatacccgatcagaaaatcattgcattataattagagccgataggaacaaaggacaaaaggacatattacctttttttttttttttgtgagacggagtttcgctctttcactcttgttacccaggctggagagcagtggtgcaatcttggctcactccaactttcacctcccgggttcaagcgattctcctgcctcagcctcccatgtagctgggattacaggcatgcgccaccatgcctggctaatttttgtatttttagtagagacgggtttcaccatgttggccaggcttgtctcgaactcctgacctcagatgatctgcctgcctcggcctcccagaaggtgggaggtggaagttgcagtgagccgagatcacaccactgcactccagcctgggcaatagagcaagattctgtcttaaaaaattaaaataggccagccgggcgtggtggctcacgccggtaatcccagcactttgggaggccgaggtgggcggatcacgaggtcaggagatcgagaccacggtgaaaccccgtctctactaacaatacaaaaaaaattagctgggcacgggcgcctatagtcgcagctacttgggaggctgaggcaggagaatggcgtgaacccgggaggtggagcttgcagtgagcagagattgtgccactgcactgcagcccgggtgacagagcaaggctctgtctcaaaaaaaaaaaaaaaaaaaaaataggccaggtgaggtggctcatgcctgtaatcctagcactttgggaggctgatgtgggcagatcacctgaggtcaggagttcgagaccagcctggccaacatggtaaaaccccgtctctactaaaaatataaaaatcagctggacatagtggcgtgtgcttataatcccggctacctgggaggctaaggcaggacaatcgctggaacccgggaggcagaggctgcagtgagccgatattgcgccactccagcctgggtgacagagtgagactctgtctcaaaaaaaaaaaaaaaaattaggccgggcgcggtggcttatgcctgtaatcccagcactttgggaggccgaggtgggcggatcacctgaggttgggagttcgagaccagcctgaccaacatggagaaaccccatctctactaaaaatacaaaattagctgggcgtggtgatgcatgcctgtaatcacagctactcgggaggctgaggcaggagaatcctttgaacctgagaggcggaggttgtggtgaactgagattgcccctttgcactccagcctgggtgacaagagtgagactctgtctcaaaaaataaaataaaataaaataaaataaaatacaaaaattagctggatgtggtggcagacgcctgtaatcccagctactcaggaggctgaggcaggagaatcacttgaacccaggaggcagaggttgcagtgagccgagattgtgccactgcactccagcctgagcgacagagcgagactccatctccaaaaaaataataataataattaaacaaaaaataggaatggggtctcactgcattacccaggctggtcttaaactcctatcagcaagtgatcctcctacatctgcctcccgaagtgctgggattgtaggcatgaaccatgacacctggcgaagacatactacttttggttgggattctttatggaaagccctaaaatattttgtaggcactatatcagcaatgtttacaggctgcactgtgaaacaggtgtgttggaggcagacagactttgaaatttctgtgtatggacttaatttaagtcagacagggagggtaaagagagcaaaaataaaaaaaagaaaatcttttttctggagacggagtcttgctctgtcgcccaggctggagtgcagtggtgtgatctcggctcactgcaacctccgcctcacgggttcaagcacttctcctacctcagcctcccgagtagctgggactataagcgcgcgccacaatgcccggctattttttgtatttttagtagagacagggtttcaccatattggtcaggctggtcttgaactcctgacctcgtgatccgcctgcctcggcctcccaaagttctaggattacaggcgtgagccactgtacctggcctttacactgatttttaatgctgaaagggactttagaatttgcctggtctggccagaggcggaggttgcagtgaaccaagatcgtgccactgcgctcgagcctgggtgacagagcaaaactctgtctcaaaaaagagaaaaagaaaaaaagaatttgcctgggccaactcctaattacagatgtggaaactgaccaaagatggcatccagccctcttgatttgggttttccacagtaactctcatcagcctcctgctgaccacttgttaccatttttttccaatccaccattcttctgttaatctctgaagtcatacagaacacttatatggtgccagcacacatggatatgtgtgttgggttagcagcaggatgagtgaaatgaaacactggtattttttgagagatggggtcttgctttattttccaggctggagcatggtggctagccacaggcctatcacaatgtactacagcctcgcactcctaggctcaagccattccgtcacctcagaccccatagtagctgggattatacatgtgctccactgcattgagcagtatgttgattttttttttttccctgagacagggtcttgctttgtcacccacgttggagtgcagtggtgccatcacatctcactactgtatcaacctcctgggctcaagtgatcctcccgccttaacctcccaagtagctgggaccacagctgcatgccaccacgcctggcaaattttttgatttttttttttttatttgtagtgaccagatctcactatgttgcccaggctggtctcaaactcctaggttcaagtgatcctcccgctcagcctgccaaactgctagaattataggtgtgagccaccaagcccaccctgtacttcattattaacttaattttttcagatgagaaaattgaggcataaagagattatgtagcttgctcaatacagctgaaaagtggcacagttggtacttaaacccagatactgctaccatggttcatatccttgaccactgtactatacactatactaccttttgttgttgttagagacaggatctttttgtgttgcccaggctggtctccaactcctaacctcaaacagtcctcccatgttgtcctcccaaagttctgggattacagacgtggggtcccacatgtggcctatactgcctttttgataagtcaaaagcagctggagcctcaactaaccaatcctaattgcacactggaaaaaaatcttgcatttctattgctctcgagtctcacagactgcaaataattgatcctttttagcttatttaggctgggaaatatgagctcatttagatacatttagaagccagagaggaaagaaacagccaggtagaaaaaccagtcattaagtgaagtcatgcaccacagtatagggcttttatgccatcaggccagtcctcttgattccagtattttgcttaaataataaattactaaacatttcagaggtaaaaaaaggttttgaaggctaccttttcttctgttcccctttctcttcacctttgttttgtttttttaaaaaaaaaaaaacagttaatggaatagatgcacagagaataccagggtcttacaactattgccaaggtctccttaattcctaccctatgaaaaattagaccctctcaatacaataatagggttgcagctagacttctgtttgaagtacaaggttgttaaagggaagcaattagggcttgtcatcctcagccagtcaaccacagtttaaaaggagggaggataggccgggtgcagtggctcatgcctgtaatcccagcactttgggaggccgaggtgggcagatcatgagttcaggagattgagaccatcctggctaacacggtgaaaccccatgtctactaaaaatacaaaaaattagccgggtgtggtggcaggcgcctgtagacccagctactcaggaggctgagacaggagaatggtgtgagcccaggaggtggagctggcagtgagccaagattgcgccactgcactgtagcctgggcgacactgcactgtagcctgggcgacacagtgagactccatctcaaaaaaaaaaaaaaaaaaaaaaaaaggagggaggatagatgtggttttttttatttatttatttatttatttgagacggagtcttgctctgtcgcccaggctggagtgcagtggcgcgatctcggctcactgcaagctccacctcccgggttcgcgctattctcctgcttcagcctccggagtagctgggactacaggcacccgccaccatgcctgtctaattttttgtatttttttttttagtagaggtgaggtttcaccctgttagccaggatggtctcgatcctgacctcgtgatccgcctgcctcggcctcccaaagtgctgggattacaggcatgagccaccatgcctggcctacttatttattttttagatggagttttgctcttgttgcccaggctggagtgcaatggcgtgatctcggctcactgcaacctccacctcccgggttcaaacaattctcctgcctcagcttcccgagtagctgggattacaggaataccccaccatgcccggctaattttgtatttttagtagaaatgggttttctgcatgttggtcgggctggtctcaaacttccgacctcaggtgatctgcccacctcggcctcccaaagtgttgggattacaggcgtgagccactgcaccttgcctagatgggtttatttaaattgaactctaacccatacaatcgtgttttgatagaattactaaatattttcaacaaccaatcactggggggtggactttccatatttactttgtgactcatagcacacaatttctacatagtaggtaatagtaagggttaattattattgttctctcaaactgtcccacagttaatgcctgttttttgtggggtttttttttttttttttttttgagatggagtctcgctctgtcgcccaagctggagtgcagtggtgtgatctcggcctactgcaacccctgcctcccgagttcaagctattgtcctgcctcagcctcctaaatagctgagattacaggcaagcgccaccacgcctggctaatttttttgtatttttagtagagacggagtttcaccatgttggtcaggatggtctcgaactcctgaccttgtgatccacctgcttcagcctcccaaagtgtggagattacaggcgtgagccactgtgcccggccagttaatgcctgtttttgtttttgatttttatttattttttatttatttgtttgagacagtctcactctgtcatccaggctgggttgcagtggcgcaatctcggctaactgcaacctccacctcctgggttcaagtgattctcctgcctcagcctcccgaatagctgggattacaggcacgcgccaccacacctggctaatttttttttttttttttttttgagatggagtttcgctttcattgcccaggctggagtgcgatggcacaatctcggctcaccggaacctccgcctcccggattctagcgattctcctgcctcagcctcccgaatagctgggattacaggcatgcaccaccatgcccagctaatttttgtatttttagtagagacggggtttcaccatgttggtcaggctggtttagaactcccagccttagatgatctgcccacctcggcctcccaaagtgctgggattacaggtgtgagccaacatacccggctaatttttgtatttttagtagagacggggtttcaccgtgttagccaaactggtcttgaactcctgacctcaagtgatctgcccgcctcagcctcccaaagtgctgggattacaggcatgagccactgcacctggccctgttttactttttaaaatttattttcggttggatacagtgtctcatgcctgtaatcccagcactttgggaggctgaggcgggtggatcacctgaggtcgggaattcaagaccagcctggccaacatgacgaaatgccatctctactaaaaaatgcaaaaattagcccagcatggtggcacgtgcctgtaatcccagctactctggaggctgaggcagtagaatcgcttgaacccgggaggcagaggttacagtgagccaagattgggctcctgtactctggcctgggcaacagagtgagattctgtctcaaaaaaaaaaaaaaaaaaaagtaggccgggcttggaggtgcatgccctgtaatcccagcactttgggaggccgaggcaggtggatcacctgaggtcaggagttcgcgaccagtctaacatggtgaaaccccgtctgtactaaataaaaaaaaaaatagctgggcatggtggtgtatacctgtaatccgagctacttgggaggctgagacaggagaattgcttgtacctggcaggcggaggttgcagtgagctgaaatcgttctattgcactccagcttgggcaacaaagcggaactccaccaaaaaaatacatattttttaaaatttatatacaataaaattattatggggtacagtcataactcatagaatatgacaaatatatactgtcatgtaagcactacaacactcaagatacagaacaatttcaccccccacctccacagatttaatcatgctgctcctttgtagtcaaacgctcctctgccccagactccttaacaaccactgatctgttttccatccctataactttttttttccagagtggcctataaatggaattatacagccatttgagccttgcctttttcacttagtatgatacatttgagattcatctgtgttgttgcatgcgtcagtagtcttttttttgttgttgttattgttgagacagagtcttactctgctgcccaggctggagtgcaatggtgcgatctctgcacactgcaacctccgcctcccgggttgaagcaattctcttacctcagcctcccgagtagatgcaatggcgtaatcttggctcactgcaacctccgcctcccaggttcaagcgattctcctgcctcagcctcccgagtagctgggattacaggcacatgccaccatgccaggctaatttttgtatttttagtagagagcgtttcaccatgttggccaggctggtctcaaactcctgacctcaggtgatccacctgccttggcctcccaaattgctgggattgcagatgtgagccactgtacctggcctttcctttctatttctgagtattccattgaatggatataccataatttgtttattcaccatttgaaggacatgtggattgttttcggtttttggtagttgtgaatgatgttgctataaatatttatgaacagatttttgtgtgaatgtaagttttcatttctctacagtaagtacctaggagtgggattgctgagtcatataagcatacatttaactttagaagaaactaccaaactgtcttcaagaaaaactataccattttacattcacaccagcaatgtatgagggtttcagttcctttgtatcctctccagcacttgtttttgtttttaaattttagctattttatataggtatatcatgttttttaaaatttgcattttcctggtgacaaatgatattgagcatcttttcatgtgcctatttgccatttgtttatctttgatgaagggtctgctcagatcttttgccctttaaaataaataaataaagagccagggtctcattatgttacctagccttgtctcaaactccttagcttaagcagtcctcctgccttggcctcccaaagtactgggattacatgcatgagccatcatgcccagtctgcccattttctttttttttggagagaaggagtcttgttctgttgcccaggctggagtacagtggtgcaatctcagctcactgtaacctccgcctcccaggtttcggtgattctcctgcctcagcttcccaagtagctaggactataggtgtgtgccaacacacccagctagtttttgtattttttagtagagacggggcttcactatatgttggccaggctggtctcaaactcctgacctcaggtgatctgcctgcctcggcctcccaaagggctgggattacaggcgtgagccaccatgcctggccgagtctgcccattttctaaattgggttgttattttcttattgttgaattttgaaaaaaaaaattttttcctcccccacaagcctttgcactgaaatttctttatatgtgctggatacaagtcatttgttggatatgtgatttatacatattttctcctaatctatgacatatctttttttttttttttttttttggagacggagtctcactctatcacccaggatggagtgcagtggcacggtctcagctcactgcaacctccgcctcccgggttcaagtacttctctgcctcagcctcccgagtagctgggattataggcacccaccactatgccctgctaatttttttgtgtttttagtagagacagggtttcaccatcttggccaggttggtctggaactcctgaccttgtgatctgcccacgtcggcctcccaaagttctgggattacaggtgtgagccaccacgcctggcccaacttatcttcttattgtcttttgcagagcagaagttttacattttgattaagtccactttatcaattcttttcttttgtggattgtgcttttgatattgtatctaagaactctgactaacccgaagtcatgaaggttttctcctgttttcttcaagaagttgtatatttttacattaggtatatgatcagttttgaatttttttttttttgagacagcgtctcactctgtcacctaggctggagtgcagtggcgtgatctcagctcactgcaacctccgcctcccgggttcaagcgattctcctgcctcagcctcgagtagcttagattacaggcgcacgccaccacgcccagctaatttttatatttttagtagagacgggtttcaccatgttggtcaggctggtctcgaactcctgacctcatgatctgcccgcctcggcctccaaagtgctgaaattacaggcgtgagccactgtacctggccctgaacttatttttgtataaatgtgagataggctgggcatggaggcttgtgcctataatcccagcactttgggaggctgaggcaggaggatcgcttgagcccaagagtttgagagcagcctgggcaacatggtgagactttctctctacaaaaaataaaaaatataaaatgagctgggcatggtggtgcatgcctgtagttccagcttctgaggaagctgaggtgggaggatagcttgagtccagctggttgaggctgtagtgagctctgattgcaccactgcactccagcctgggccacaaagtaagacccatctctaaaaaataaacaggttagagttgggtgcggtgccttgcacatataaccccagctatttgggaagctgaggggagaagactgatagaggcaaagagttcagggccatcctgggcaacatagcaagacaccgtgttttaaaaaaaaatagaaaaattagccaggtgtggtttgcacttgtagccccagctactcaagaggctgatgcaagattattgcttgagcctaggattttgggggtgcagtgagctgtgatttcaccactgcactccagcctgggcaacagcaagacctatctctgcaaacaaacaaacaaaaaacccaaggcctgttgcagtggctcacgcctgtaatcccagcactatgggaggccgaggtgggtggatcacttgaggttggaagttcgagaccagcctggccaacatgggaaaactccatctctactaataatacaaaaaaattagccaggcgtggtagtacgtgcctgtaatcccagatgctcaggctgaggcaggaaaattgcttgaacccgggaggccaaggttgcagtgagccaaaatcatggccactgtattccagcctgggtgacagagtgagactgtgtctcagaaacaaaaaacaggaagaaaagggtgagtatgatctatttctgcagagaaaaaaattcaaatagtagtttatcttaattttttccataggtaacatatgcacataatacaggatttagggtgtacagtgaaaaataagacgttcttggtcccataggccacccagataccaccattcccccacctccctctgttatcagtttcttatgtatcttgccaggaataatttatgaatttacaactgtatgtctgtgtatgtgtgttttattcatttatttatttgagacggagtcttgctctgtcaccccagctagagtgcagtggtgcaatcttggctcattgcaacctctgcctctccatgcaagcgattctcctgcctcagcctcccaaatagctgggattacaggcgcccgccaacgcgcctggttaattttgtattactagtagagagggggtttctccatgttggtcaggctggtctcgaactcccaacctcaggtgatccgcctgccttggcctcccaaagtgccgggattgtaggcatgaaccaccgcatccggcaatacatgtgtttcaataaacaataacaaaatattctcccattctatgttttgctttcattcattgaacaatttctcttggagaccatttcgtgagcctcctcattttttttttttaaagtctttatttaaatcattcacatttcacacaaatcactgatttaaagtgtataattctgtgggttttttttttaatataatcagggttggcaaccatcaccacaatgtaattttagatcatttttgtatcccgtaaaagaaaccgtatacccattagcagccagtctctattcctctcctacatgccctggccataggcaacaactaatctactttctgtctatgggtttgcctattctggacatttcatataaatgtaatcgtacaatatgtgttttttttgtgaccagctttttagggttttttttgagacagagtcttgctctgtcacccaggctggagtgcagtggcgcaatctcggctcactgcaacctccacctcctgggttcaagccattctcatgccttggcctcccaagggattacaggcgccccccccccccccaccccctgcaccgtgtctggctaatttttgcatttttttagtagagatggggtttcaccatattgaccaggctggtctcgagctcaggttttcctttctgtcggataaatatctagtagtacagtgtttttcctgggaagctggaggggtgtttgagttattgttcttagttgtagtataatttacatacagtaaaattcacagatcttgaatgctcaatgggaggagttcgacagttgtataagcctatgtattaccacccatcaaatgtgttacagttttaaaatcttgccatatcaagaaatagtttagaacctaagggtagtgttagtctggcaccagggggtgtctggttatcatctgcttttgtttcgtttagtttttataggaagaaatcgtttgcttagtcagaattatttaaaattcagaagtattgtttgcttttcagcaaggtcagtgacagcagtaaatttttgtcgagtttcttagggagaaactgatttttccccttctccagaggttccacttacttcttttttagttttttttttttttttttttttgagggagtgcagtggcgcgatctcggctcactgcaagctccgcctcctgggttcacgccattctcctgtctcagcctcccgagtagctgggactgcaggtgcccgccaccacgcccagctaattttttgtatttttagtagagacagggtttcaccgtgttagccaggatggtctcgatctcctgaccttgtgatccgcccgcctcagcctcccaaagtgctgggattacaagcgtgagccaccgcgcccggcctcttttttttttttttttttctttgagacggagtctcactctgttacccaggctggagtgcagtggccttatctcagctcactgcaacctctgtctcccaggttcaagtgattcttgtgtgtcagcctcctgagtagctcggattacaggcgtgtgccaccacgcccggctaatttttatatttttagtagagatgggggtttcaccatgttggccaggctggtctcgaacccctgacctcaagtgatccacacacattggcctcccacagtgctgggattaccggcgtgagccactgcacccagcctccacttatttcattaaagtgactgctgttggagctattccttaaggttatttgctaatttcatccaacttcactggaaacaacaaaaaaagaaaaaaaaatcctaatttgatatgtgaatattcatatttggtactatgtagataggccatactttttgtctccagatctttaaaaaaaaaattttttttttgagatggagtttcgcccttgtcgcccaagctagagttgcaatggtgcgatcttggctcactgcaacctccgcctcccaggttcaagtgattctcctgcctcagcctcccaagtagctgggattacaggcacctgccaccccacctggctaattttttgtatttttagtagagttggggtttcaccatggtggccaggccggtctcgaactcctgatctcaggtgttctgcctgcctcggtctcccaaagtactgagattacaagcgtgagccacatcaaccgtcctaaaaaagtttttcattatttatttgcttttttttttttttttttgagacagagtttcactcttgttgcgcgggctggagcgcagtggcatgatctcggcccactgcaacctccacctcctgggttcaagcaattctcctgcctcagcctcccaagtagctgggactacaggtgcctgccaccaagtctggctaattttttgtatttttagtagagatggggtttcatcatgttggccaggctggtctcgaactcctgacctcaggtgatccacctgccgtggcctcctaaagtgctgggattacaggcgtgagccactgtgcccagccctaaaaaaaatttaggctgaggccgggcgcggtggttcatacctgtaatcccagcactatgggaggcccgaggcgggtggatcacgaggtcaggagtttgagactagcctgactaacatggtgaaacccctcctctactaaaaatacaaaaatctgccaggcatggtggtgtgcgcctgtaatcccagctacccaggaggctgaggcaggaattgcttgaacccgcaaggcagaggttgcagtgagctgagatcacaccgctgcactccagcctgggggacacagtgagactccgtctcaaaaaaaaaaaagagacggggctgagtgtggtggcccaagcctataattccagcactctggtaggctgaggcaggagaattacttgaggccaggagttagagaccagcctaggcagcatagcaagatcccatctctaccaaaaaaaaaaattagctggggccaggcgcggtggctcacgcctgtaatctcagcactttgggaggccgaggcaggcggatcatgaggtcaggagatcgagaccatcctggctaacacggtgaaaccccgtctctactaaaaatacaaaaaaatagctgggcgtggtggtgggtgcctgtagtcccagctacttgggaggctgagacaggagaatggcgtgaacccaggaggcggagcttgcagtgagccgagttagtgccactgcagtccgacctgggcgaaagagcgagactccgtctcaaaaaaaaaaaaaaaaaaaaaattagctgggtgcagtggtgtgcacatgtagtcctagctacttaagaggttgagacaggaggattgcttgagtccacgagtttgagtctgcagtgaaccatgattacaccactacactctagcctgtcctacaaaatgagaccttgtctcaaaaaaaagagagaaagggacagtgtctcactatgttgcccagactgacctgaaagtcctgggctcaaacagtactcctacttcagcctcctgagtagctgggattataggtgcacaccaccacacccagatatgtctctagatgttataacaaattcttactcaaaaatctctgttataaaaagtctccacttattttgtgcaatactcagtattatttgggaagtcccttgaaggttgtgggaatgtttttgagagataaagtatgttcagtgtgaggctagagtgatgaggatacagtttgatgatccttaatgaggcttttgcatagaacttgctttgggaaaatagtttgcttttataatattagaacagctattaccatgttaagaaaggtttctatcctgactcttctattggtaatgtttgtgggtaggggagaaggaggccacatatggttaaaacaaacaagtgatcctaatactctgctgtccccatcagctggttcttggccagcaagtcagcctagttaatcttggttttttaaccagtacatacttagttgcctttattaagcgtaaaccaggagaacatgatttcttcttattattattatttatttttttatttttatttttttttgagacagagtctcgctctgttgcccaggctggagtgcagtggcctgatctcggctcactgcaacctctgcctcctgagttcaagtgattctcctgcctcagcctcccaagtagctgggattacaggcacgtgccaccatgcctggctagtttttgtatttttagtaacgactgggtttcattatgtcggccatgctggtctcaaactcctgacctcaagtgatctgcctgccttggcctcccaaagtgctgggattacaggcatgagccactgggccgggccagatttctcatattagaaagtcagacagtgtggtgaggaggaactcaggactagggacaagagtaggatagatacagtagacatttatattgccaacttttaccaagttctgaaggccattgatataattcctgcaggctcatatcccacaattttgcccaataaaatattccatatgctgttagtttatccctaacagcagacattcattttataagaaggtggtctatatgtgccataatcatcattaattaattttcaaagttgcttatgaaagagatggagatgtttgtcttggctcccactaaggaaaaggagatatatttctccacatccagtttgcttggatcctggttggtgaagatgtaccaggccattcaactaaaatggttccatggcaaggatggtgcttgatgccagttgttcatttacaggtagcttttgaaaatggctgcctctcatttcaccgggctcacagctgttgctgatgtaattaaagatctagacactcagatagctgtaagtaagtttgaggctactgtgagcagaacttggtgaatgtgcttctgatcgtgatgacacccaagctgacgtccacagagtcagcctcatgactctaagattcaggagtctcagctgctccagactagggtctctgcatgtacttagattgctaacactcagagaaaaattgctcttgataaagaggagtttacttttaacagctgctaaaagttatgtttattgggcatagccctgacatagacttaagcatgtttgaaatgccagaatgaactagtctgtattcttaagctttgtgactgatttttttaaaggatgtgattgtgctatgacttatttgaatttaacattatttgatactttaaaaataatgcatgtagtacttaactatttttacaaagttctcaaaaatgtcttgcttattctagtttatttatttatttatttatttatttttattattatttgagatggagtttcgtcaacctctgcatcccgagttcaagcaattcttctgccttagcctcccaagtagctgggattacaggcgtgtgtcaccacgcccggctaattttgtgtttttagtagagttggggtttctccatgttggtcaggctagtctcaaactcctgacctcaggtgatccacccacctcggcctcccaaagtgctgggattacaggcatgagccactgtgcccagcctctagtttatttttatttcattttatttttagatagtgtctcactctgtcacctaggctggaatgcagtagtggtgtgatcatggcttattgcagcctcaacttcttgggctcaggcaatcctcctgccttagcctcctgagtagctaggaccacatgctaccatgtccagctaagtgttttttgtgttttgtttttttttttgtggggcggtgggggcgagtctcactctgttgcccaggctggagtacagtggcgtgatctcggctcactgcaagctctgtctcctgtgttcaagtgattgtcctgcctcagtctccccagtagctgggagggattataggcatgtgccactacgcctagccaatttttttgtatttttagtagagatggggtttcaccatgttggtcaggctcctctcgaactcctgacctcaggtgatctacccgccttggcctcccaaagtgctgggattacagacctgagccaccacacccagccccagctaaatttttacagagatagggcttccccatgttccccaggctggtcttgaactcctgtctcaagtggtccttccacttcaggcacccaacatgctgggattacagacatgagctactgcacgcggccctagtttatttttgtacataagattcttcatttcatttacttgcttccttgtttaaattttgtggactatttcacttaatatttggaaatgagatggtttctaaatatcagctgagagtaataaacattcttcattccctcaatttttaacctgtggatattaaatggtcaccattccatatatactgaagaaccctcaaagtctaacagacctcattttacttacttttttttttttttttttttcttggtagagactaggtctcgctatgttgcccaagctggtcttgaactactgggctcaagtgatgctaccacctgggcctcccaaagtgctgggattacagttgtgagccattgcaccaggcctctttttactctcaagattcatcctttattacaggttcttctagagctaattcttgtgcttttcttctccagttaattggccttggtcctcacagctccaaaaagaaacaggatctcgataagctctatgagctgaagtccaaagctcggcagattatgaaccagtttggcccctcagccctaatcaacctctccaatttctcatccataaaaccggaaccagccagcacccctccacaaggctccatggccaatagtactgcagtggtaaagataccaggcactcctggggcaggaggtcgtcttagccctgaaaacaatcaggtatcatcctcttactctttcttctctgtagccacttcttacctattatttcaatctgtaatactttaagagatgtccatctcagatgctgcttttttctcttagccgaaaaggtcttttccctcttttggatttctaactttttttgtttgttttaatataagtagagagtttatttgggccaaatttgaggactcccaattcaggagacacagattcaagttgtcctgaatgtatactcctctgggaacattctttagcaaattatcatgtacaatgtttattaattactgtattgtatgtggttgtgtgtatgcatatatacatccatccatccatctgtacacactaacacaataccttgcctatgaaaggtgtttttttcctttcattttgataagtgctttatatacatgttaaccatgtagttgttaaataaaataataaattgattcattattcctatgataaaagtactcttgcttctagtcattccatcttctagttcatccaattgctgccattattaattttctgcagtgattctaaaatctgctccattctttctacccataattctgattctgccctccagagccacaagaaataagtataatccctttgacttgttttttgtaggctgtgtagaatggatgagttcgcccagtatttcaagggaatgagtggagggacttgcaaagattaatgagagcgggttgggcagtcaggatatcaacctatgttgaatatggagtctgttgtagaagacagaatttaaaattgtataggtagggcagaacatagtggacctgtactagtcaatttccattggaacttttaggcaatatacaatctttgcagatatttaataaaggagtaaaagtaacataataaaaatagtgtgtcctatagaggattaacttggcagtaaggggacaggatgggtagaaaagggggttagactgggtggatgaccaattctaagatttttgcaataaatcaagacatgtagtgaaggctcgaattaggtgataatgatagaatgaagaagaatggatagatatgagacatcattaacaaatatttattcattttttttagagaaagggttttgctctgttgcctgggctagagtgcaatggtataatcatagctcactgtagcctcaaatttctgggttcggccgggcatggtggctcaagcctgtaatcccagcactttgggaggccgaggtgggcggatcacgaggtcagatcaagaccatcctggctaacacggtgaaaccccgtctctactaaaaatacaaaaacattagccaggcgtggtggcaggcgcctgtagtcccagctactcgggaggctgaggcaggagaatggcgtgaacccaggaggtggagcttgcagtgagcagagattgcgccactgcactccagcctgggcgacagagcgagactctgttgcaaaaaaaaaaattattttcttgggtgtgcgcggtagctcacgcctgtaatcccagcactttgggaggccaaggcaggcgataacccaaggtcaagagttcgagaccagcctggccaatatgctgaaaccccatctctactaaaattacaaaaatcaacctggcatggtggtgcacacctgtagtcccagctactcaggaggctgaggcaaaagaatcacctgaacccgggaggcagaggttgcagtgagccgagattacaccactgcactccagcctgggtgatagaacgagattccgtctcaaaaaaaaaaaaaattttttttcttttttccttatttcaaaagttatatgtgttcatcacagaaacttcagaaatacacaaagaataaatagcctataattctaatgccaccaccctaaaatagccatggttagcattttagtgtatgtcttttggtgtttttctttttttcctctgtctgtctctctctcttttttttttttgagacagagtctcgctctatcacccaggatggagtgcaatggcataatcttggctcactgcaacctcctcctcccaattcaagctattctcctgcctcagcctccctaatagttggaattataggcacccacaccatgcccagctaatttttgtattttcagtagagacagggtttcgccatgttggtcaggctggtctcaaactcctgacttcaggttatccacccgcctcagcctcccaaagtgctaggattacaggcatgagccaccgtacccggcttttttttttttttttttttttcagtggaattttactagaaggtttagagcaggaaagaaaggaaagtacacttggaagagactcaaatgggcactgaggaggtcaagtgcctaactttttcttttttcttaatttattttttatatattttttagatttttttttttttttgagatggagtctcactctgttgcccaggctggagtgcagtggcgcaatctcgtctcactgcaagctctgcctcccgggttcacgccattctcctgcctcagcctcccaagtagctgggactacaggcgcccgccaccacgcctggctaatttttttttttgcatttttagtagagacagggtttcaccgtgttagccaggatggtctcagtcttctcacctcgtgatccgctcacctcggtctcccaaagtactgggattacaggcatgagccactgcacccagccattttgtagatgttttttttaaatagagatgcagtctcgccatgttgcccaggctggtctttgaactcctgggctcaggtagtcctcccacctcggccttccaaagtggtgggattacaggcgtgagccactgtgccaggcccttttttttgtttgtttcttaagacatgaggtcttcctgtgttccccaggctggagtgtagtggcacaatcatagctcactgcagtctctaactcctggcctcaagtgatcctcctgcctcagcctgctgagtagctgggactacaggcacagatcactgtgcctggctttcttttgattactttttaatggcatacgtatgtaacatgacatttcctttatgaaggctgccctcagggagcttttagcctattaagtcagaaacagggaagtatataaatatgcacaatgataaagggtacacaggatacagtagaggccaaaggaggaagtaagtggttacctttactgggatgggctaggaaaagcatcagaaagaggcaccatgagctaagcaagaaggaagaagagaggaagagtgtgtacagcactttgggaggctgaggtggaagaatcacttgaggccaggagttcaagagcaggctgcacaacatagcgagatcctgtctctcaaaaaaaaaaaaaaaaaaaaaaattagccaggtatgatggcacgtgcctatggtcccagctagctgggaagcttaggtgggagagcttggcagtcaaggctacagtaagccatgatcatgccactgcactccagtgggcaatagagcaagaccctgtctcaaaaacaaaacaaaacaaaaaaacaaacttgtctaaaggcaaggggcatggtacaatttgtggtggtcagagaattgcaaatttctacatgtgaagagacacagtgagaaaaagacatgaggctgaaatatactgcctgacagctggatgctggcctgtcttcaaactgctctttccacctttccctaagttacttctgtcttgagagtgtagtcttacagcagcatagtcaggtaggccagactgtgaactcattggaaagtggaaactaaaaccaacaatttgacagcctttcttcattacagggtaatgatttgtttcatttccttaatatctggttgaaaagtcttcttccaattaactttaggtattgaccaagaagaaattacaggacttagtaagagaagtggatcctaatgagcagttggatgaagatgtggaggaggtaaggtggggttgggtaccccagaaactggtccctgagaaccggtatagcatagtggttaagagcacaaacaggccagatgcagtggctcatgccttttgagagaccaaagcaggaggattgctggaacccagaggttcaagaccagcctaggccatataatgagaccttgtctctgcaaaaaattaaacaattagctgagtgccaggtgtggtggctcactcctgtaatcccagcactttgggaggtcgaggtgggcggatcacaaggtcaggagatcaagaccatcctggctaacacagtgaaaccccgtctctactaaaaatacaaaaaacaaaattagccgggcatggtggcgggcgcctgtagtcccagctactcgggaggctgaggcaggagaatgaagtgaacctgggaggcggagtgcagtgagccgagaccatgccactgcactccagcctaggcgacagagcaagactccatctcaaaaaaaaaaaaagaaaaaaaattagctgagcgtggtggtgtgtacctgtagttccagctactagggaggttgaagtgttcttaaacccagaaggccgaggttgcagtaagccaagattgtaccactgcaataaataaataaaataagagcacagacaaatctgaatttgctttatacccaataactgctgctacttttgcctgttaaaaacggcatagtctgttgctcacaggcaatcactttcaacaattttagctgtttctgtaacattcttctatatttctaagtaatatacttaaaaagatactctttgacccattaattttataatattcttttttttttgagacggagtttcgctgttgatgcccacgctggagtgcaatggcgcgatcttggctcaccgcaacctccgcctcctgggttcaagcgattctcctgcctcagcctcctgagtagctgggattataggcatgcaccaccacacctggctaatttttgtatttttagtagagatggggtttctccatgtcagtcaggctggtctcaaactcctgaccttaggtgatccacctgccttggcctcccaaagttctgggattacaggtgtgagtcaccgtgcctggccaattttataagattctgttgattccctattatggtagatgagaattttttacactactcaatgtgtgccatataacttttatttatttatttatttatttttttgagacagtcttgctctgttgcccaggctggagtatagtggcaggatctcagcttaccgcaacctctgcatcccgggggttcaagtgattctcctgcctcagcctcccaagtagctgggattataggcatgtgccaccacacctggctaatttttgtattttttagtagagatggggttttgccatgttggccaggctggtctcggactcctgacctcaggtgattcacccacctcggcctcccaaagtgctgggattacaggcatgagctatcacgcctgctggtccatataactttccttactgtttttctttttcttttcttttttttttttttttgagacagaatcttgctcagctgcccaggctggagtgcagtggtgcgatatcggctcactgcaaactccatctcccaggttcaagtgattcttccacctcagcctcccgagtagctgggattacaggtgcacaccaccatacctgactaatttcgtatttttagtagtaacaaagttttaccatgttggccaggctggtctcaaacttctgacctcaagtgatctgtccacctcagcctcccacagtgctgggattataggtctgagccactatgcccgaccctggctattcattcttaaagaatcactcactgaaaagctgatttgaagtataattgatggatttggcccagtaatatatgggtaaatgtttaacaactagctctttggagaaaaatgcccgatttgcagtgctttattatttctgtggtgtaactatttctaccaacatgacatcactaaatacaaacttgggaaaagaggtacacagttggcttttatgagctggtctcggttcactctagcagaccacaagactttacttcagagtaatttgtccacaagtcaaccttcctaatggaagattccctaaatgtcagtatctgtaagtcttttctctggaatcattcaatatctccggagaaaattccagtctcctatcttgaggatttatcccttagcttcttttttttttttttttttttttttttttttttttgagacggagtctcgctctgttgaccaggctggagtgcagcggcatgatcttggctcactgcaacctccacctcccgggttcaagtgattctcctgcatcagcctcctgagaagctgggactacaggcacacgccaccacacctggctaatttttgtaattttagtagagacggggtttcaccatattggtcaagctagtctcgaactcctgacctcaggtcatccacccacttcggcctcccaaagtgctgggattacaggcatgagccactgcacctggcaatatttttttaacttattttaatgggattagggagggacaggaggttatttttagagttgatctgctgtttaatctgaaatctttctctaagatggtgtccatttggttcccacagtaaagatgacaatgagttaatggtccaccagaacaaggaattttgtatctatggttgtaattttagtttgtttttgtttgtcagcagaagctgccatggggactatattgactgataaaaatctcagttttttcatgtgcgtgcatatatatatatttatttatttatttatttttgagacaaggtgtctgtcacctaggctggagtgccgtgccatgatcacagctcactgtagtctcgactaactggactcaagcaggcgtcccacttcagcctcccaagtaactgggactacaagtgcatgccaccaagcccagctaatttctgtatgttttgtagagacagggttttgccatccatgttgcccaggctagtctcgaactccagagctcaatcaaaccatctgcctcggcctcccgaagtggtgggattataggagtgagccactgctcctggcctcgtagatttttatcttcagaattctcatccttctcttcacacagtccaataataattgatagtgatgtggaaagaactcaagatttagactcagaacgcttgaggtggcatcctggttcctctgcttgcttgcttttttttttttttgtctcgccctgtcacccaggctggagtgcagtggttcagtctcggctcactgcaacctctgctgccccggcttcagcgattctcctgcctcaacctccagagtagctgggattacagatgcctgccaccatgcccagctaattttgtatttttagtagaggcagggttttaccatgttggtcaggctggtctcaaattcctgacttcagttgatccacctgccttggccttccaaagtgctgggattataggcatgagccactgtgcctggcccttagagactgggtttcaccatgttggtcaggctggtctcaaactcctgacctcaaatgatctgcccacctcagcctcccaaagttctgggattataggtgtgagccaccatgcctggcctctatttatttgttattatttttttaattattggttttttgttttgagacagagtctcgctctgtcgccaggctggagtacagtgtcacgatcttagctcactgcaacctccgcctcccaggttcaggtaattctcctgccccagcctcccaagtagctgggactacaggcacgtgccaccacgcccagctaatttttgtatttttagtagagacagggtttcaccatgttggccaggatggtctcaatctcttgacctcgtgattcacctgcctcagcctcccaaagtgctggggttacaggcgtgagccaccacgcccggcctatttatttttaaatacagatggggctcttgcaatattgttgggctggtctcgaacttctgacctcaagtgatcctcccaactcggcttcccaaagtgctgagattacaggcatgagccattgtacctggccttctgctttctacttacatggccatgaacaaattagtctctctgagtctgtgaaatcctctatggaatgaataaaatccatgtcccattttcttcacaggattattgtaaggactaagtgagataatggaaacaaaagtgcttttaagatactgtgagtgaggaattgaaatgattcacttttattttcccactaataaataaagatatggagggtagggattgggatagttgatcactgctgggtagaaagtatatgctcagaaaggtgtgagttgcactcaacctgggtaacatttcttttgtccttctcattcctcttccccaccttagcccaaatgctgattccagccttctactagaatgcctgactaaatatgcaatccaagctgaaagcagttgtcccagcaacaggagcctaccctgccaatgtcgtgctgactcttcccactttaccttccccagatgctgctgcagattgctgatgattttatcgagagtgtggtgacagcagcctgtcagcttgcgcggcatcgcaagtctagcaccctggaggtgaaagatgtccagctgcatttaggtatgtggtcttgtttctccctgaagtatggattcaactgcttcttcaggactgccagggaaagtgtagtcagaggaaccttcatgccagaaccagacttttgggcactgggatttatgtattaattcaataacagcaccaaatagaaaagagaaatccatctgtggtagggagaatgagcccaggcatgggtttgaaaccagattctgccactttctagttgtatcagcctatttttcctacctagtatctcttagagtctgtttcctcatttgtaaagtgaggatcataatatcctccttacagaataatcgtgagaattatagaccatgtctgtaaagtgactggcacagggcctgcacaaagtaggatctagtcaatgtaggtactgttatgtcttcaccatgcaaataaaactgttcctcagtgttcccttagagttttagcctatttatgcattttttccaaagtttataatcgtaatatacatacaattttatagtctccttttctacttaacagacactaaatttgagtttgagtttttctgggagatactcagctaacagtgatgaccataatcacttggaaatgaataagcagccctctgcattggatacgatgtgattaaaagaaagagatcagtctataactatgtgttatatatatgtatatatatgtatatatttatgtgtgtatatatatttatatataatttatatatatttatatataatttttatatatatttgtatatactttatgtataatactttatatatataaatatatatatatatatttttttgatcgagtctcactgtcacccaggttagagtgcagtgatgccatctcagcaacctctacctcctgggttcaagcgattctcctgcctcagcctcctaagtagctgggactacaggcctgcaccaccacacctggctaatttttgtattttcagtagagatagggtttcatcatgttggtcagcctggtcttgtactcctggcctctgttgatccacctgccttggcctcccaaagtgctgggattacagtcatgagccaccatgcccagcccagtctataactatagagacaggccaaatgaatgagattcggtgcagatcagcccatgactaattattgaaagactttcttcacagtgtcaagaagctgttgccttggggaggcattggtagtctaggtaaagtaaataacacacttcaggtaatgttgctggtatctagagaaaagaacagatattttggttatccattaatgtgtagcagaccaccccaaaaacagtggtttagcacaataacagttgttgatttgattcatgaatctgggggttgactgggctcagctagttttactaagtcaggcagtggctgggcctgagattgtcttgaaggaaggcatactagtttcctagggctaccttaacaaaataccataaacttggcagcttaaaacaacaaaaaattttctctcacagttctgcaggccagaaacctgaaatctaagtgtcagcagggtcatgcttcctctgctgcccctagggaagaatctattcttgcctccttctagcctctggtggtggctggcaatccttggtgttctgtggcttgtagctacagaaatccaggctttgccacggtctttacgtggccttttccctctgtgtctctgtctctgtgtctcttcttttcttctcataggacaccagtcatattggattaagggctaaccctactccaatatgatctcattttaaccaatttcatctgcaacatccctatttccaaataggatcatattctggaggtacttaaggttaagaccgcaacatatcttttttagggacacttttaaataacccataacggaaggcttcatatcttccgtgtctgatgcctggtctaagaacactgaaaaaggtgggattctgcaggcgtctccctccgtccctcccaaccctcccattctgcttcacattccccaatcctacccttcccatcttccccacccaccgtctctctatatggtctcatcctttagcagtcccaggatagctagacttcttatgtggcagctaagcagctaaaggctcccagaactaacatcccatgagcacctggcagaaaacttcatggccttttctaacacagtcttcagcatcactcctggtgaattctattctttgaggcagtcagaaacctgtccaggttcagggggagggaacacagactccacctgtgttttttttttttttttttttttttttgagacagtctcactctgttgcccaggctggagtgcagtggcgcaatcttggctcactgcaacctccgcctcccaggttcaagggattcttctgcctcagcctcctgagtagctgggactacaggcacacgccaccatgcccagctaatttttgtatttttagtagagatggggtttcaccatattggccaggctggtctcaaactcctgaccgcctgatcctccccgctcagcctccctaagtgctgagattacaggtgtgagccaccatgcccggctgactccacctcttgatagcaggagggtaaaggaatttataaacatgttttacaaccaccactagtggcctggcatggtggctcacacctgtaactccagcattttgggaagctgaggcaggaggatcgcttcagcccaggagttcaagactagcctggttaacacagtgagacctcactgtgttacaaaagatttaaaagatttaaaaaagatttaaaaaattagccaggcatggtggagtgcacctgtagtcccagctactcaggaagctaagacaggaggatcacttgagcctgggaggtcaaggctgcagtgagctatcatgccactg

SEQ ID NO: 7 - DNA, 17318 bp, Homo sapiens
  source 1..17318: mol_type = other DNA
ttgggcggaagaccctgggccggcaggaacttgcttgtgattggatgttgtgggacggcggcttctcattcgtcagcctgtgactgtggagtttgaattgggtggcggttgactgtagagccgctctctctcactggcacagcgaggttttgctcagcccttgtctcgggaccgcaggtacgtgcctggcgacttcttcgggtggtccccgtccgccctcctcgtccctacccagtttcttgcttccctgccccatctccgccgctccccgcagcctccgccgagcgccatggctcctaggaagggcagtagtcgggtggccaagaccaactccttacggaggcggaagctcgcctcctttctgaaagacttcgaccgtgaaggtaaggggccaggccgtcgcggcctcctggggcggtcgcgggatgctggcgggtggggacacgagctgcacagattcgcccgcccgtgacccgtgtcctgtcggctctgccctcccgcagtggaaatacgaatcaagcaaattgagtcagacaggcagaacctcctcaaggaggtggataacctctacaacatcgagatcctgcggctccccaaggctctgcgcgagatgaactggcttgactacttcggtaagagctggagagcttccctgggcggaggccaggagccccttggggttaggtgacacccttcagaaagggctcgctcagatgtcaccttttaatgagatctgacatgaccacttatggaaaattgcagaccctttcactctctgtctcacttccctacttcatttttctctatgaaaaatgggggggtggttggggggcggcgggcggggcggtctctgtcggacaactcagctctgctgtttacaggtccaaaacagctgtagtgaatgggcatggatgggctgtattccaataaaattttagttatggatacactgaaatgtgaatttcacataattttcacacatcaggaaatttatttaattttttttaaacagagtctcactctgtcacccaggctggagtgcagtgcagtgcagtggtgcgatccctgctcactgcaacctccaccttctgggttcaagtgattctcctgcctcagcctctggagtggctgggattacggtcgcctgccaccatgccccgctgatttttgtattttcagtagagacggggtttcaccatgttggccaggctggtctcgaactcctgacctcaagtgatccacctacataggcctcccaaagtgctgggattacaggagtcagccactgcgcccggccagaaaatagtatttttaaaaatatatgtatattttacccatttaaaaatgaatgaataaatgacatggttagttaaccagagctcagatagaagaataacccgaagcagctccttctgcagcttatggaaattgctaacctaaaaatgggcgcatcaggctgggcgtggtggctcacgcctgtaatcccagcactttgggaggctgaggcgggcagatgacctgaggtcaggagttcgagaccagcctgaccaacatggagaaaccctgtctctactaaaaatacaaaaaagttagccgggcgtggtggcgcatacctctaatcccagctactctggaggctgaggcaggacaatcgcttgaacctgggaggcagaggttgcggtgagctgagagcacgccattgcactccagcctgggcaacaagagtgaaactccgtctcaaaaaaaaagacacatcagttttcctggccagagaaaaatcccagcctgtttctgcactcccttattaaatgtccggagaaatgcaggaggctgtacttttctgctgggttgcccttttctgttttccttattattaactatccagcatgtagtctccttcctggatagaaatgcatggtctgctcacatattagacattgaatgatccttttgacttgcccttttatttattaagccattcatttgcttatttctccaaatactgagcatgtgtcagtcacagtgctaggtgctaaagatgcactagggaataaaacagacattgtctctgccttcaggaacatacagattagtagaaaagagctattagaaaaatccacatacaattatgtaattaaaagtataggtactacaaaggagatagaatagagtagtggtcagtgagcatattgtgctttctatgccagatgggcattgtaccaagtgttttacatacattaactaatttttcttcataactaataatatccctatttttcaaaatgacaagattaaggcacagagaaattggacactttgctcaaggcctcataagctagttagtgggatagtctgtttgaacccaggtattctggtttcatagcctgagatcttaactgttttacaagatactatgagagtttctagcaggaggttctaacctaactttttattctacatgtaaatctcacaaagaccttttcattcaacacgtttactgtacatctattgactgctagatttttgccagaagcaaaggatgtcatctctggaattcagtccaaggcagggatggacatttaaacagctttgagtagttattgggtataatgagggtgagcaactaactctacactttgcagcaaactgctgagatagaaaaataagcaggctgggcacagtggctcacctggaattccagcactttgggaggccaaggcaggtggattacttgagcccaggaatttgagaccagcctgggcaacataacaagaccatatctttaagctttaaaaaaaataattaaaaataaatttttaaaaaagaaaaataagcagagggcagggcatagggtggggattcatgcctataatcctagcactttgggaggccaaggcaggagtatcacttgaccccaggagttcaaaaccagcctgggcaacatagcaggagaccacatctctacttaaaaaaaaaaaaaaaaaaaaaaaagacaacctggacaacttggcgaaaccctatctctacaaaaaaacacaaaaattagccgaatgtggtggcgcatgcctgtagtcccagctacttgggaggccaaggtgggaggatcagttgagcccaggagacagccaaggaggcgccactccactccagcttgggtgacagagcaagactctgtctcaaaaataaataaaatttaaaatatattttttaaaaagaaaaataagcagaatttttggggtgatgtttgagctgagttttgaaggatgagttagaaatttgttaagtacggaggtgaatttcaggcagaggaaatacaaagtaccatggcaacaagtcatgagagtcagtggcacatttgggatataacttggagaaagaatagattagatggtgaaggtccttgaaggttagaccaagggctggaccagttttagaaagataaatggtactattaggcaagatgatttattgttaaaatgtaatagtaactacaacgttctttttaaagcccttggaggaaacaaacaggccctggaagaggcggcaacagtaagtgacctttcctattttccagccagtggttacttaagtctagtccagtccccagatccaactaatagatgcttactgtggaagaggtttcataaagggacatcatctgtttgtgtcaactgaaaaattagagttggaccagacactgtatacatgagacccagatagttctgagccctacagaaggtggcagttctgtttttgaccaatttcttgcagtcctttgttctgaactctacagcggaagtagaaagcctcaagcccaagttcctttaagcgcctgagtcattacactatgcattggcctgctagatgataaaggtgtttcatcatgtcgtactgtagaagcagtgcttttgcttgggatgctcagtattccccaacccctctcatctccttcctcccagcatcagtgccaggattgaaggcagtaagatggggatgcaaaatagagcatttaaagctgcactgtccagtgtagtagccactgggcatatgtagctatttcagttaattacaattaataaaattaaagaattcatttcctcagacatactagccacattttacatgttcaatacctacatatgactagtagctactccatcagagagcacagaaatagaacattgctactcttgcagaaagttttatgagacagcattgggaactagtccatacatgggcttcacagagtccctaggcactctaaaataatatacaaacaatgcgtgtgtatgcacgcatttgtgtatctttctgttagtttattgtagccttgatcagatttacaaagtaaaccccaaaattacatcttttgttgagttgatcagaatcatttggaatatcagggtttgaaggagtctgaccaccaagggcacatagcagatctccgccagcttcattcagaaggtaaaggtaatgaggagccaattatcaatttggaaaaaattggagcatttgggagagaggtggggattattcacccccctacatacactgagctccaatgttttaaaagagttacctctgagatgaattatgcttactagctaatgcagttctctctttttaaattagaaatacagaactgcaaatgagaacttctaatgtaatatgagagagccattgttaccacaccaagttgagagaattctagccttgactaatatgatttaaaactccagaaaggaacgatagaaaatctataaaagctcttagttgggaagtgtgttggggctcccaagaccacctccaggtttggtgattcactaggaggattcatggggctcagcatacagtcacacccatggcgatgatttattacagtgaaagtatacaaagcattaatcaacaaaggagaaaattgcataggacaaagtccagaggaaaccaggcttctaggagtccactccctgtagagtcaaacagaacatgcttaattcaacacatatgaaatgctgtctaccagaaaatctgattagagagtcaatgcccagagttttaactgggggctgctcacataggcatcctctgcctagcacatgtcaaaatcctagactttcaggagggaagtaggtgttcagcatgagccatattgtttgcataaagtttaggcacagtgaggcatcttgttaaggaaaggtgggaatctttctgaaatcaagttcccagatgccaaccgaggccaggcttgcaaacaggcctttctatgtgtatcagtctcaggcctgctctgttaactgtcctgcacagtagatgcccagtggcctgccaccactgatgactccataaaatgccagttgtttctagagatggcagaaggttggcaggaatgcccctactttctgttgcatcaagcctggcaaacatcagtaacttattacagccctatttcttgctaagcctaagacagcctcagaatccttctctgagtatgtcaagcagtccctaccagaaatgaaacctgtgccattccaaacctgtagtaattattctgatgtttacatgtgttctataaggaaaggactgtgaatcatgactgctctttgtagtgcccatacttattaccatatgaaaaaaaaacgaatttgaatggtgactggaagcctttttgaaggacccaggatcatcatagaaaaccttattgagaccctgtagatttatcgaaaaaatggtaagcttgacacaccaccaagtgttgtagaggatgtagatcattaggaacttgtattgtttgcagatgggctgtagtcaagggtaaccactttgggaaacaatttggcataatgcgaaggctgaatatttatgtaacctataatccctgtcatgtcctatccaaaggatagagccaaggggaaacttggacatgtacctcagacacatgtaagacagttcaaggtagcagtgtttataatagcaggaaactattgatggaagatggacaaatccattgtggtatattcacacagtgggatatgatatagcaatgaaaacaaattaactacaaccacaaagagtggtgaaaacagccaaaaccaaacaaaatgcttaagtacacacttgtgaaaaagcacatctgtgtgtgcacacatgtatacacacatatgcatgtatctgtgagcacatacacatgtacctttcgataaagcaagtgcaatgatatggttacccctggggaatgaaggattaggagactcatcacctttggaagaagagataagaaaatggaacaaggaatgaatacagagccagaagcaagttattggcaatgttttaggtcttgggctgtgtggtgggtttatgggagtttgctatattgtatattgtatcactaacatttaacagtcttatgtattaaataatagttttaaaaaagtttttatcttgaaatattgttcctcatattttggtggaataagcctggtgctttctggctatgtttgtcataggctgacctggatatcaccgaaataaacaaactaacagcagaagctattcagacacccctgaaatctgccaaaagtgagtacctttcaaaactccttgttgtacagaaagaactgaggctcaggttgcttggttggctgctcaggcagcgccttgttggtagagcctcttccctttaatgtctggttcttaatcttgtaaatccaaaaacttgcttttggatggtgcatttagttaattttttttcccccgaacagcaattcaaaccagaaatttagttaattttaggcaggactgctaaaaaccaaactcaagacccgtgtgcgagctaaaatgaaagtgaaaaaaggggggaaaaaagctgtgctagaaaccaaacattgttgcctgcttactttctcctgggttaaatagatgacaagatttagagaggtgttaaaagactggtaacaccaactgagacgctccctgatgtaatcaacaaagttgaaagcgaattgaaaaaggaatgactttctctgcatataattcaaaattactcaattcaggccaggtgcggtagctcacgcctgtaatcccagcactttgggaggccaagctgtgaggattacttgagcccaggagttcaagaccagcctgggcaatgtagtgagaccttgtctctgaaaaaaaaaagaaagaaagaaaggaaaggaaaggaaaggaaaggaaaggaaaggaaaaaaaaagttactcagctaggcgtggtggctcacgcctgtaatccaagcactttgggaggccgaggtgggtggatcacgaggtcaggagttcgagaccatcctggctaatacggtgaacccccgtctctactaaaaaatacaaaaaattagccgggcgtggtggcgggcgcctgtagtcccagctacttgggaggctgagacaggagaatggcgtgaacccgggaggtggagctggcagtgagctgagatcatgccactgcactctagcctgggcgatagagcgagactctgtctcaaaaaaaaaaaaaagttactcaattccatgatctatccacataaaatcatcttacatacatgtcccgcactctgagaaacactgtcttataggaaaagttgtatgggaaaccaggttttgactagtgagcaaggaatcggatcaggatgaattgtgacatggacttaatgtcactgtcattaagctatgatagtttgatgcatccaattcttataagaacatcctgacccatggccaggatttcggggctacacaccagggcacgctctacagtaggcagggcaagctcaattattcagaatgctgggctgtccctacaaagcatcatatggggtctcttaacactctggttagtttcctttgtctaaaccctctttcttaaaaagtcttctttatttttagtccatttcttccttgcagcttaagattgtgtacattttattcctataagaaatgtgaatgcacaaaactttattttcatcagaaataccaccctgttgaaactgtttcttacagcacgaaaggtaatacaggtagatgaaatgatagtggaagaggaagaagaagaagaaaatgaacgtaagaatcttcaaactgcaagagtaagtggacactgaggttggaggctgggggttatcacaagacaagcaaatacaaatgcataaaatacactgttgtacaccagagctcacagtttagtagagatgatcctactttacatggcaatgacaaaagagataattgactggtgtgcaaagtgtgtagaacacagaagaggaagctagcaagcctcccctaccccactaggacatagacaggcctttcaaggtgagtgagagtctactagctagagaagaaagggaagaggaacagtattcaggatagatgggggaggcggaaaactgaagatgaggaaaccagttagaagcctatgaattcttgaactgacatgctgacactatagaatgaagggatggtttttagataggttttagaaagaagtggcatggttggtggagaaaaggaggaatcagagacaactgcatggtttctagctaaggcaaatgctatccagtgaggtgtgggacccaggtggcagagggtgctggactgggggtggtggagcacatgccaattgcatgacatgttgaccattcattacttttccaggacatctaggctagacagaaatttcagcctggagctcagggagaagagggagatttgagagatacactgcctcccagatctttaggtgtttgtcccagtgtgggagtggagatggttgtgcagggagagcaggaagggagggagtcagggtggacactagagggagggtagagagaggagctcctaaggcagactgccaaggaagttagagaagcaggaaagacagatccatcacggaggacaagggaggagagaatatatggaagataaggagtgattcttgccagggacctcccaggccccaggaagggagcactgcagggtttgcctttgattgggcacctgggacgccctgagtgaccttcacagcagccctttatgtaaagtagtggggtacaagccaggctgcaatcagttcaaaagagatttacctttaatcttggtcaaaatcctctattttgaaaacccagccagtggaagtccttattcaattagttatgttctgaactttttaagtcattgaattctgagatacaccttattatatttagtattaactatccaaagcttgttcttaatgctttaaaaaaaaaaaaaaaaccctccttaccttcctctttgctgggttttttgtaaccttagtctcatttgattgtgactgcaggtcaaaaggtgtcctccatccaagaagagaactcagtccatacaaggaaaaggaaaagggaaaaggtagtggattttctaaagttgtggtgttttgggttttattggagagccatatatatcatggcagaaagtgaggggcagtgaaaaggctctggtggctagtgtttgaaagcagcttaaaatcactgaatccttgagtatccaagctggaggggtctctagaaatgacctaaaccaaaaccatctccagtactttaatgtacattctctatccttccccacttttttttttttttttttttgagacggagtttcaatctcgttggccaggctggagtgcaatggtgcaatcttggctcactgcaacttctgcctcgcgggttcaaatgattctcctgcctcagcctcccgagtagctgggattataggcatgtgccaccatgccggctaattttgtatttttagtagatgcggggtttctccatgttggtcaggctggtcttgaacccccgacctcaggtgatccacccacctcagcccccactttttttttttaagtatagcaagaactgcctgttatgtttcagttcctgatagtccatatgtagagctaccccatagctcgtcatagagtggctgtcacttacctataattggtttcttgaaatgttttgtccagtcctgcaaagtgaagaacctctatgggcttgagttgattatactggactctaccataagccatgtgggggaaggtacagcagcttaggagagtagtcaccgggatgcatgtctgtggaggagcgaactcatttctcttgagcagtgcagcagctgcctggcacaaggacagaattccagctgggggagccttcgcatgaagaggctgtctccttgattaaaaagtcagattctgaggctgagtgtggtgtctcacacctgtaatcccagcactttgggaggccaaggcaggtggatcacttgaggtcaggagtttgagacccgcctggccaacatggtgaaaccctgtctctactaaaaatacaaaaattagccaggtgtggtggtgcatgcctgtagttccagctactcgggaggctgaggcaggagaatcgcttgaacccaggaggtggaggttgcagtgagccaagattacgccattgcactccagcctgggcaacagagcaagactccgtctcaaaaaaaaaaaaaaaagtcagattctggaggcagactactttggttcaaagttttggctccatcctaattggatatgtgatcttgggcaagtttttaaaacttgatgcacctgagtttctgcatctgtgtatgaggatggcagcagtgctggcctcccgtgttagaagggtcacgtgagtcgatgtgtgcgaggcgcccggagcagtatctcacagtcagctctccacgtgtcactcctctgctgctgccttcgtggaacctgagagttggcatacctgatggccatttcttacctgtaggtcaagccgtgctaacactgttaccccagccgtgggccgattggaggtgtccatggtcaaaccaactccaggcctgacacccaggtttgactcaaggtgagtatcgagggaaacacttggatttgatgggactccaacattgagcactacccagagaaggagtgtctaagaaaatactcctaggccaggcacggtagctcacgcctgtaataccagcactttgagaggccgaggcaggcggatcacttgaggtcaggagttcaagaccagcctggccaagatgatgaaacgctgcgtctactaaaaatacaaaaattagttgggtgtggtggtgcacgcctgtaatcccagctactcaggaggctgagacaggagaattgcttgaacccaggaggtggaggttgcagtgagctgcaattgcaccactgcactccagcctgggcaacagagtgagactctgtcttaagaaaagaaaagaaaatagtcccgagtccttggcctgggatgccttgtcagaggacagtggccagctgggtttcctggtgtatgcctctcccttaagtgtagtttcacctatcttcagtggcaaaatgattctttaatgggagggaggtgaatattctgcctgtgatgactaggaggcctctaggtgacgtttttggccttttctgattcaaatcagaaggtttttattttatttttaaaatatttatttattatgaggcagggtctcactccaatgcccaggctggagagcagtggcacaatcacggctcactgcaaccttgacttcccgggctcaagtgcttctcccaccttagctcccaagcatgccaccatgcctggctaattttttgtttttttgtagcgatgggatttcgccaggttgcccaggctggtctcgaactcctgagctcaagcaatctgcccacctcggccttccaatgtactgggattacaagcatgagccatcacacccggcctcaaatcagttttttaaagatgagtaggcactctcctgtactcttggtagaagtaaaaattgatactgcttttttggaggctggcataagcgaggatattcttgcagcataagttaataccttccaaagaacctagttgaccaaataggagatgctgtatagccattaaaaaagactggatctgtgtgtgctgacagggaaagagcaccgtgatcacagagcatctccgagcaggttgctgaacactgtgctgtatgatcccatttggttttatatacatacaaagtttctggaaggatagataaggaattcagagtggttacccctggggaggagagcaagaagtggttatctctggtgtggggaagtgttgaagatttattttctacttttaattgccactttttttttttttttttttttttttttttgagacggagtctcgctctgtcacccaggctggagtgcaatggcacaatctcggctcactgcaacctccacctctcaggttcaagcaattctcctgcctcagcctcctgagtagctgagattataggtacatgccaccatgcccagctaagttttgtatttttaatagagacaggattttgccatgttggccaggctggtctcgaactcctgacctcaggtgatccacccccctcggcctcccaaagtgctgggattacaggtatgagccacggcactcagccagttcccacttttctttactgtttgttttctcacatgaatatgtaacaaaaggcatttagggaaaactaggtagcagtattttaactgtcttgagaaattagtataatgatgtaatatctaaatcatcctcctttgcctctgaaaaattcctcttgatggaagcagccacgcctggaaacaattaaccagcgtatttctggctttgtggatggatggatgatggcacccatatggagctttggacctaaactttatgtggataagagttggctttttgtaagatgtatgttcaataattacaaccttctttctccagctgtgtttagtcattactgctttaaaacattttttttttctaaatttagaacgtgctttcttaggaatgtatgacttaaaaactgcaacttgaggccagagtaaggttaaaatggcctatagagtttggtgtcatccaattgccaagctatcttcacagagattttcccattctagggtcttcaagacccctggcctgcgtactccagcagcaggagagcggatttacaacatctcagggaatggcagccctcttgctgacagcaaagagatcttcctcactgtgccagtgggcggcggagaggtgaagtatttccaagggaagccaggccacagtgtgctgcttagtcaagcatttcttttccctgggccctcacccacgcttcaccctcagagtcctttcagtgcgtgggtcctgatctccacacttctgcgggactcagaacccagttttctctcccaggttagaggcccagactgcaaagatcgttgctcagctctgggttctgtttttctgttttttggttttgtttttgttttttgtgggttttttttttttttttttgagatggagtcttgctctgtcaccaggcgggagtgcagtggtgcgatctcggctcactgcaacctctgcctcctgggttcaagcgattctcttgcctcagcctcctgagtagctgggactacaggcacacgccatcatgcccagctaacttttgtatttttggtagagatgggggtttcaccacgttggccaggatggtctcgattgcttgacctcgtgatccgccctcctcggcgtcccaaagtgctgggattacaggcatgagccaccgtgcccaccttttttttttttttttttgagatggagtctcactctgtcgcccagcctggagtgcagtggcacgatctcagctcactgcaacctctgcctcccaggttcaagtgattctcctgcctcagcctcctgagtaactgggactacaggcacatgccaccacacccggctaatttttgtatttttagtagagatggtgtttcaccatattggtcaagctggtctcaaactcctgacctcaggtgatccacacacctcagcctcccaaggtgctgggattacaggtgcaagccaccacacccggcctccatctgttcatcaactaacatttgcccatccgattgtagtaggcccaagaagtagacatggggcctgcccttagaaagcagctcagtggtcaagatgggtttgcaatcatggtacctgtgatatgcgcaataatagagatgttaaagggtggtgcagaggagggcaccaccgaggtatgcgcttagtctagaacccggaccatgagctgtgccttcagctttgtataacttaagggattctgaagcaagctgagctcagtgtctctgggctgcatggagcgagttgctgacctcagcccctgtgaggggaggacggtttgtttcagacatactctgcagggcatttcttagatgatgtgcgtgccttttgtgcccaggtaatccagcctccaccctagtgatagtgctgatgaagtcattgtctccttagagctaatatccttcctgcctgtcttgccacttctccatcccagccattccccaccactaagtgcaggatatcaggggaacctaggggttccggccctaagggccatggccagtttaacccactcccctttctattcagagcctgcgattattggccagtgacttgcagaggcacagtattgcccagctggatccagaggccttgggaaacattaagaagctctccgtaagtctcatattcatctccacacataggatgcctccagtagctttcttgggctacctttatttaggattgtcttttgggcctgggctaatactttctacttaaatttgtgttgtcttccttcccccaagagattttgactcttaccctacttagatagcagcagttctgttcctcagttgatgttgagttttgttcaatcccagggtgcctgccacagaagttccactgcaaaatcaaaattctgcctcattcaggcagttagtgctaggggtatgttaggtcactattggccaccagaaagtgaaacctagagtagctcaagaatgagggtcggggcttgttatcaggaatcttacagaatcaaagagcgagctgaacggccaagcctctggagtggtggggcccatcagctggggcctgtgtgctcatttctctcacacatcttcattcctccctcagcagataaccttctccacaggctccaggttctgtgcttacttaacattgttttgcatgtggctttgagtaaccacacctccaatcccaactttattgctctattgcccaattgttcaatttcttgtcttggtttaaattctgaagagggccaggcacagtggcacacacctgtaatccctgcagctcaggaggctcaggtgagagaaattgtttgagcccatgagttcaaggctgcagtgacccatgatcgtgctgctgcactccagcctgggtgacagagaaagacctcagctctaaaaataaagtaaattatcaatttaatttaactgaagaatgtaatggctccgccagggatgaacctccttggtctggtcagccatcatcttgggtggtggatgaagcacttagtgtaaacatggcaaccttaccctcatccttctgtggggtctgaagggtacatccaaggaaggggacaaggcggggctggtttcctaaacctgtctttctgaacataggcccagtgctgagatcccacacacacctagccacccaaatcttgtgactgtcatcctctagctagatctattgcaatgttcttctcaaatctatgatacctttactgtctcacttgagttgttattttactcccttgttcagatgagaaacaggttcagaaaggtgaattcatgtgtgatacagatagagaatggaggggctcaggctgactgtgggaggccaaggggcaagcctgccaagtgacatcttctacaatgacctctctccttttctttttagaaccgtctcgcccaaatctgcagcagcatacggacccacaaatgagacaccaaagttgacaggatggacttttaatgggcacttctgggaccctgaagagacttcttcccttcaggcttattgtttgagtgtgaagttccagagcaaggagccatgttcctctaagggaattcaggaattcagacgtgctagtcccacaccagttaggtagagctgtctgttcaccctcccatcccagctgatcccagtcactgcttgctggggccatgccatggaagcttcccatcagtctcccagctgaatcctccctgctctctgagctgctgccttttgcctcctgcaactcaacatcctcttcaccctgccctgcctgcagttgagggggcgaagaagaaccctgtgttctcaggaagactgcctccaccaccgctacccagagaacctctgcatctggcatttctgctctctatgcttgagaccgggaggtttaggctcagataagtgagctctgggccatgagagggtaggtccagaaggtggggggaactgtacagatcagcagagcaggacagttggcagcagtgacctcagtagggaacatgtccgtctaccctctcgcactcatgacacctccccctaccagccctcctcttcctcctcctcctcctcctgtgggaggtggtcagtgggacttagggatctttcacctgctgtgcccagtagttctgaagtctgcttgtggagcagtgttttatgtttatccctgtttactgaagaccaaatactggtttggagacaacttccatgtcttgctcttctacctccctagttagtggaaatttggataagggaactgtagggcccagattctggaggttttatgtcattggccacagaataactgtctctaagctatccatggtccagtggtccctgccaagtctgtagacttcagagagcacttctctcttatggggttcatgggaacaggggtgggtgtgacttgcttggtggcctcattccatgtgtgcctgtgcctggggcatggactttgttaagcagagtcagcagtgaggtcctcattctccagccagcctctctgccctggagaatcatgtgctatgttctaagaatttgagaactagagtcctcatccccaggcttgaaggcacatggctttctcatgtagggctctctgtggtatttgttattattttgcaacaagaccattttagtaaaacagtcctgttcaagttgtattcttttaagttcttttattctcctttccctgagatttttgtatatattgttctgagtaatggtatctttgagctgattgttctaatcagagctggtacctactttcaataaattctggttttgtgttttcttttgtaa

SEQ ID NO: 8 - DNA, 32744 bp, Homo sapiens
  source 1..32744: mol_type = other DNA
cagactgccataagatggcgtccgtggcggctgcacgagcagttcccgtgggcagtgggctcaggggcctgcaacggaccctacctcttgtagtgattctcggggccacgggcaccggcaaatccacgctggcgttgcagctaggccagcggctcggcggtgagatcgtcagcgctgactccatgcaggtatggcagtgcggctggcccgggcgcctggggaccccggaggccgcgtggacaccctgtggcaaaggtcttaaagggtgaaccccgaggcttgtaggggcggagggggtaggtaaagggagcccatacttactaagcacccgccgcatgccagacacagtgccagatgtttcccttatcatcgtctcatcaacttctcacgacgttactatttggtagatactattatctccttttatggagaaaggaattggggcttagggaggtgaaacgattttttccatgtcacatagcgaataagtggaagacatggtatttgaacctacaaggtcgacagataggtatccagtaaatatcttttgaataaaaattattccagagcttttgttgtaactctaaccctaacccagcgagatcaggataaattggataccacctatggtgtctgctgggggagtggaatagggttgacagtcaggagacctggattctagtcctgaatctgccattggccatgtgacttcggatcaacaatgtcgtttatttggacgttattttatatatctgtgaagtgaggaaaatgtcacctaccgcacaaggttatagtgcttaataaatgggatcatgagcgttagaacgaagaacagagtgccctgtccggaataaggccagacttgtggtaaatgcttttttaagtagaggttttaaatcataatggctgatttaaagttgaaggggctttgtcctcttcttcgaactgggaggcccagaaggggtgtacatcacatctgggagcattttgctccattaagagtgggtagtgggtgacattttgggtaaatctctgatggaggaactacagcagctatttgttgaggagaatttacagttatgagtcttcacagagtaaatgagatgttgaacatgaaatgcctggcactgaacatagcacctgatgagtactcagcaaagaagggcagttcctttccccaactcacccagaagccagtgggcatagtttctgctttcattagtttatgtggcatgacaagaccatcagcacacatgaaacgatcggataattcaaaaaataatttgtttgcagtctactttgtgccagcttcagaagacaatttacctcaaatcccagctgtcttttccaagatatgcagctatagcctaacctcttcatgcctttgtttcttcttctgtaaagtaggaagaataatatcaataacacaacattattgtgatgattaaatgagataaagtatgtgcagtacttaatacaatatatggcacataataagagctaaaaatacagcagctgctatcttctgcgaggccctactggagagacaaaatcataatttctgcccttgagttttagtccagctgaacataaaacaaggcagagctaataaatgtttggacagagatattaatggatttgcaagatgatgggaggagagagactacagatgctagattttatgacaagtattatagaatttctgagacaggagaaattatcgaaggctggcttagtatggaaagctctctgaaaaagggcttgaaaaataggtcaagtttggataggtaagaaagaagaaaaagcttattaaaggaaagaacatgaagctggtccaaaggtattgagttgtctcagttgattgttcacagtcagttacagatggaactcccttttctactctttggccctttctcactactgtacatgactagtcttaaaaaaaaaaaaggaacatgaatgaagatgaagatttagaaggtgaaatggccatagtgtgtaggtaggatagtaaaaggagactgttcaattgcagatatggaatgtgagatgagcaacatgatgaaggcagtgtgtaaggaacattcatttgtgagcagtacgtatggtacttggataaaaaatatccaagaatggtataatagtagatctgtggtctgatacctcagagacttaagtaataagagtttcagtaagatggagttacactgatgacacctaaggtccatgccaatatttatgttctatcatttctttcttcttttttttttttttttttggagacagagtttcgctcttgttgcccaggctggagtgcagtggcgcgatcttggctcactgcaacctctgcctcctgggttcaaggattctcctgcctcagcctcccaagtagctgggattagggtgagggacaggcacctgtcccacacccagctaagttttgtatttttagtagagacggagtttcgccatgttggccagactggtctcgaactcctgacctcaggtgatccacccgctccagcctcccaaagtgctaggattacaggtgtgaggcactgcacccagccttacatctgtttttaagtaggttactgggttctggcagtgagggttggatatagctctatagtagctattatgtctcgttactcatagctgtgtaccaaagaaatgtttctatcttttttcttttctttttttttttgaaacggagtcttgctctgtcgcccaggctggagtgcagtggcgcaatctctgctcactgccccctctgcctcccaggttcaagcaattctcctgcctcagcctcccgagtagctggaattacagacgcccgccaccatgctcggctaatttttgtattcttagtagagatagggtttcatcatgttggccaggctagtctcaaactcttgacctcatgatccgcccgccttggcctcccaaagtgctgggattccaggcatgagccactgcgcctggcccaacttgtgttttcaaccagtgaaaggagatgctgcttttcagtgacttgaggttgactcactagtatttggtaaacatgtaaacaaaatgatattgttgatgttgaatcaccagctacttgaaataacattttcaatttcaagtaactccacaggcaaagcaataataaatatcaacaactcaaattttcaaagcattgtttaccaaatgtttacagtttcttctttttttttttttttttttttttttatttgaggtcttgctctgttgccccggctggaatgcagtggtgtgatcatagctcactgctataactttgtttttgttgttgttgttgttgttttgagacggagtattgctctgtcactaggctggagtacagtggcactgtctcagctcactgcaacctccgcctccaggattccagtgattgtcctgcctcagcctcccgagcagctaggactacaggcacatgccaccaggcccagctaatttttgtatttttagtagagacagggtttcaccatgttggccacgatggtcttgatctcttgacctcgtgatccgcccacctcaacctcccaaaatgctgggattacaggtgtgagccaccatgcctgaccttttttttttttttttttttttgagatggagtttcgctattgtggcccaggctggagtgcaatgacaccatcttggctcactgcaacctccacttcccaggttaagtgattctcctgcctcagcctccctagtagctgggactacaggcatgtaccactgcacctggctaattttgtattattagtagagtcggggtttcaccatgttggccaggctggtctggaattcctgacctcaggtgatccgcctgccttggcctcccaaaatgctggaattacaggtgtgagacactgcgcctggcactgctgtaactttgaactcctgagttcaagcagtcctcctgtctcaagtagctgggactataggcatggaacactgtgctggtgataaatatatatatatatatatttaaaatcctcacaatagtctcataaaatggatattatcacttcacagttaagaaaataggcctaaggtcttagaataagtagcagacctggagtctgaacatgaaagtgtctgctttccatccccagtggcatatctgctacacaaagccatttcctttaagatgaccaggggctgtggggttcaatcagtagggagttttttgtttgtttgtttgtttgtttgttttaagatggagtctcgctctgtcacccaggctcatgatcttggctcactgcaacctctgcctcccatgttcaagcgattctcctgcctcagcctcccgagtagctgggactataagcgtgtgccaccacgcctggctaattttttgtatttttaatagagacggggtttcactgtgttagctaggatggtctcgatctcttgacctcgggatccgccagcctcggcctcccaaaatgctgagattacaggcatgagccactgcgccaggccaggagtttttaacttgtatgccagttatccttcttaggagtgtgcaacattttgatcaggaaaaagatgtattttaggattcatattgtaaatcacagtgttaattcatagtgatatctgtcaagtggagtgttgagctgactggaagccacctgatgtactttggggataaaatttgctgcagctaagagatattaatagaatctaatgtcaagttcgtatcaaagacagatagtgtttattggaacaaagggtaaacttggacttgtggagagcctagacagaacagtaaacttctttgttgtaacacaccaaagggtgaccaaatagaaagtgtgatcatagaaagttttttcaagtttctaaattgggttttttaaaaccaatatttgcattttaataattccttttggtgtgctgctgaaaattttctattcagaagtgtaccagtaactcagaaactattgtacaacactatcttaaatgttaaattgtctcgtacttcatactgcttttgtcatccctttgtcctgctttaaaatgtagggtcatccaaggcaacacctacccaaggtcaaccctacagcacctacagggcagttcctatccagagaaagtatttgtttttgtaaacattgaataagtactttaagctttgaggtaaaactacaatggggttgttaaaggtattgtgtctatggtgatcatttcttcatgtagcctgatatgcagtgacttgcttctgtagccatctagcatctgaaggtactgcctgtcctctttcttcccagtgttcttttttctttttctttttttttctatgacacagccccaggaggtcctgaaaacacatgcccttccatgattcttatgcaaggtagttgtggattgggaagtcagaactactttctgaggggattaccttctttgggatttctcttgggttttgctgaggatttctacatggccattctgacagaagtgagaaacaacatttgtgctttattttctgagtcttctgaatgctggttgtttcacaaattatagaaataaaaatattctcattcagtagtaagagtctgaattcaaggagggacaggtaatacaatccctgttttccaggatggaaaaactggagctacagaagattaaagagctgtctagagatcacactgcaagacactgggaattggatctgggtcttctaactcatttgtagagtctgatgtatttcaggaagatgataccgaaggtcttcttttcagtctgagtctttttcttggcttgtaaattcaaggtacagtgccgggccttcagtgactggatgaaacattgtactgagaaaattgaaggcccttgccaaacatgtacaatgatggcctggaaatacaaactaccaactatatgctaagagaaaagaaacaaagtgttctgttcgggtttatagagaggaagtgtctctaatgcctcagtttttcaagtcctgtggagaagcagtagccgtacataggagcacagttccttttgtgtttgtttaaacctacaagaggagaaacaaatgatttttggcagtctgactagtaagcaagcagaatatgtgtcatctcgtcatccaatagatgtggagctctttgttcttttttttttttttttttttttaatagaagcaccatgttgcccaggctgatcttgaacactcttggccccaagtgatcctcctgcattggcctcccaaagtgctaggattacaggcatgagctaccccacctggcctctgtattctttttgtttgctttgggacatactgtaggagcagtgtttgtaccaaaagactgtctgatcaagggagatatgggatgcttgggggagggatatgaaaggagagatgggatggtggatcacagtggcttaataaaatgtgaaataaaaggcttgaagacctgtttttttttttttttttttttttttgaagacccattaaccaggagaaaaggggtctatctggaaggtatttgccacaactgacaaaggcagtccttttttttttgttttttttttttgagatggagtcttgctgtgtcacccaggctggagtgcagtgactccatctcggcccactgcaacctaagcctcccaagttctagccattctcctgcctcagcctcctgagtagctgggactacaggcgcccgccaccacgcctggctaattttttgtatttttagtagagacagggtttcaccgtgttagccaggatggtctcaatctcctgacctcaggtgatccgccagcctcggcctctcaaagtgctgtgattacaagcgtgagccactgcacccagccaaaggcagtcttttagaaggactgagacttacaagaggctaaaaaggaaatctcaaaattttcgactcatcattcatatatatatatagatagatagatagatagatagatagatacacatataaataatgagtttctaggtcccttggttcacctccattgtaagtgaatttagttttcttttggctgcagtattaagctgtgtatgttgtacatatgtggtcatgtttttgcacctacagggagaactttggagtcaaatctgtgttatataaggaaggagaagtgactactggccaaacaggaaaccataggagagcacagatgaggcttgcagattcagattcatgaggatgagtgctaccctgatgtttcagtgcctgaggcagggtgttgaagcagctccacttcaaaaagatatatttgaggagtaaaagttacttggggtatataggaattcacatatgtgctccattatgatttaatggaattggttttgtttttctgtgtagttttggattcctcagaaacttgaatcagaccaggaccctgttggcctcttgatccctttggggctctgcttgtgagtagcagcctccctgtacctccctcattgtggcagtcagagttcaagccctcattacaggaatgatcataataattatactactgaagataatagcaagaataatatatatgtcaggcagttctaaaagtttgacaaatattatctaatatccttaccgtagccttttgccgtgggtgctgttattgtctcctccctaccaaaaattactttattaaatcctcatctccatgctgttttatactttttcctctaactcttatttatttattcattcatcctccatcccattcttttcctctgtaccactgtgtacattttatcaagcagaaaagtgggaagaataatattactgacaaaagaacagtatgggcaaagttaagaaaatgcatggtatgttttcaaggaatgaccagcaactatctggcatagagggtacttgagggacagtggtaggaggtaaaactaaaaatatagaccctgggaacaaatttttgaggccctcaaaagtcatgccatgaggtttgaggttttaaagagggaagtggtagtaagtctatttttttttttcaagacagagtctcgctctgtcacccaggctggagtgcagtggcgcaatctcagctcactgcaacctccacctcccgggttcaagcaagtctcctgccttagcctcctgagtagctgggattacagacgcatgccaccacgcctggctaatttttgtatttttggtagagacagggtttcaccatgttggtcaggctggtctcgaactcctgacctcgtgatctgcccacctcgggctcccaaagggttggaattacaggcgtgagccactgcacctggcctgtaaatctattttatgaagtaactgggtggagagtgggttagagaaggaaaaacagtttaggattctgttacattagtctgggtgagagaggctggagttgggctttggctggagagaataggtaaccattttgatattttgtaaacagaaccaacaggattttggttattgaattggaagcactatgaaaaaaatgagaacaaagcatttttgtgttcagaaaaatgagacatgcgggggccgggcacagtggctcacgcctataattccagcactttgggaggctgaggcgggcagatcacctgaggtcaggagctcgagaccagcctgaccaacatggagaaaccctatctccactaaaaatacaaaaaaattagtcaagcatggtggtgcatgcctgtaatctcagctactcaggagactaaggcaggagaatcacttgaacccaggaggcggaggttgcagtgagccgagatcacgccattgcactccagcctgggcaacaagagcgaaactccatctcaaaaaaaaaaagaaaagaaaaatgagacatgcttattaaaaaaatccaataatactgaaaagtacagagacaatttaaccatagtcttagcatcctggagtaatgattttggttcacatccttccagacatttgtatatatatttaagcacatgtgtcatgtgtgtatatgttattacataaattgactcagaggttagatactattctattttcttttaacactatgttatggatatctttatatgttaatgtatatagctatatcagtagtctcaacttggggtgatttggcctcctaggggacgtttggcaatccctggagacatttttggttctaataactggggaggtgggttcctggcatctaatgggtagaggccagagacattgctaacattctagtaggcacaggacaacttcccataacagaattatttggccccaaatattaattgtactaaagttaagaaactgtcctatattattgtttttataattttttattgattgattgattgagacacggtcttactgtgttacccaggctggtttcaaactcctgggctcaagcagtcgtcccacttcaccttccaagtagctgagattacaggtttaattttgattttgaaatagttgtagatttttatttttatttttatttttttgagacagagtttcgctcttgttgcccaggctggagtgcaatggtgtgatctcggctcactgcagcctccatcccccgggttcaagcaattctcctgccccagcctcctgggactacaggcatacgccaccataaccagctaattttgtatttttagtagagatggggtttctccatgtgggtcaggctggtctcgaactcccgacctcaggtgatccatccgtctctgcctcccaaagtgctgggattacaggtgtgagacactgtgcctggcccgaaatagttgtagatttacacaagagtttcaaagatagtaccaagagttcctgtatacccttcatctaccttgtcctaatattaatatcttacatcatcatggtacatttattaaaactaagaaattgatataggtacaatactattaactaaattatagtcttggatttcaccagttttttcacttatgtcccttttccatttcaggattcaatttaggatactatactgcagttagtcatcatgtatctttagtgtcctccaatctttgacagttttcagtctttccttgtcttttacgaccttgatacttttgaagggtactggtcagctcttttgtagatgtctctccatttgggttttggtttctcatgattagacttggcattatggattttgggaaagtataccacagaagtgaagtacccttctcattggatcatatcaaagtatgatatcaacatagtattagcatggcttattactggtgatggtaactttgatcatttggttgagattgtatacacgtttctccactgaaaaagtcacgatttttctctttttgtgttatttttcttttccatttccataaaatgacagtacctagtcttatttgttggaaatcatttgccaagtctggcccacactgaatagaaggagaattaagcttcatttccaggatgaaagcttatcaaataatttgcggacatatgttaaaagcaccacagtaattaataaatattttaggggagataccctcaggctatgcagatgtcctatttctccttaaagtttcaccctctgattttagcattcatcagagtctttcttttctttctttctttttgttttcttcctttcttccttttccttccttttccttcccctccctcacttcttcccttcttccctccctccctccctcccttccttcctttctctctctttctctctctctctgtgtgtgtgtgtgtgtgtgtgtgtgtgtttagtacttcctgtctggtattacaagatgcttctagtccctttcagtggaaagagctaggaaatgtatgtatgtatattaatctatatatacacacatttatatttatttctctatctgtatgtatattaaaataagcatgggtttatactggtatctctgactaatccagcaccacaagattcattctagtcttccccccttgcttatttgtgacttctttctcagagtaagaaatttagctctcattccctatagtatatttacttatttgtgtaacctgtagtttcagtgattactcctgtgagaaacagatttaccaactagagtacaatgtttgcctacagtttgtttgtttgtttttatccttacagtatcgagtagtaacattgttttatgaagttacttagatcagctccttttgttttcctctctgaggttatatcagacgtttgtaatgcagttagatttcatttgttacagtctgtagtctatcctgggttcccagatattctggttattttaaaaaatttgcatacagtggccagctgcagtggttcacacctctaatccaagcactttgggatgccaaggagggaagattgcttgagcctagaagtttgagatcagcttgggtaacatagtgagagcccatctctacaaaaaaaaaaaaaaaaaaaaaaattagtcaggcctggtagcacatacctgtagtcccaatttctcctggctcaagcaggaggatggcttgagccagggaggtcaaggctgcagtgagtcatgatggtgccactgcactctagcctggacaacaaagcaagactctgtcccaaaaaaacatttttaaaaattttttgcatacatatagtaaagtgtactctttatgatgtttagttctatgggttttgacagatgcatagagtcagatatataccccacagtaccatactgaacagttctatcaccctaaaaaatcccttatagtggcccctttgtagtcaacccctctatctccttcaatctctggcaacaacttacctgttttccatccctattgttttgccttttccagaatgtcttaaaatgtaatcatacaatatgtagcctttgaggtttggcttttttcacttagcaaaatacatttttttaaaaggtagattgattgattgattggagacagggtctcattctgttgcccagggtggggtgcagtggcgccatctcggctcactgcagcctcaacttcctgggctcaagcaatcctcctacctcagcaccccaagtagctgggactataggcctgtgccaccacacctggctcatttttgtattttttgtagagacggtttcaccacgttgcccaggctggtctggaactcctgagctcaagcaatccacctgcctcaggctccgattataggcgtgagccactgcacctggccagcaaaatacgtttaaaattcttccatgttgttgcatgcgtccaatgctctttattgctgagtagtattccactgtttggatgtaccatagtttgtctagtcaccttttttttttatgagacggagtttctcccttgttgcccaggctggggtgcagtggtgcaatcttggcttactgcaacctccgcctcccgggttcaaatgattctcctgcctcagcctcccgaatagctgagattacaggcatgtgcgaccacgcccagctaattttgtatttttagtagagacatagtttctccatattggtcaggctggtcttgaactcctgatctcaggtgatccgccctcctcagcctcctaaagtgctgggattacaggcgtgagctaccgcgcctggtgtctattcacctattaaaggacatctgggtttctggtttttggtgattataaagaaagctattgtaaacattcatgtacaggttttagtgtgaaatttcatttgagtaaatacctaagagtgggattgctaggctgtttggtaactttatggtttaactttacaggagactaccaaactgttttctaaaatgactgtaccattttgtatttctcccagtagtgaatgagaattcgtgttcttctgtatctctatattatttccagcatttggtattgtcaggcttttttttttttcttttaatttccgcagttctatgtactggtatctcattgtcgttaatttacatttccctaaagaccaatgatgttgagcttcttttttttttttttttttttttagtatttattgatcattcttgggtgttgctcgcagagggggatttggcagggtcataggacaatagtggagggaaggtcagcagataaacatgtgaacaagggtctctggttttcctaggcagaggaccctgcggccttccgcagtgtttgtgtccctgggtacttgagattagggagtggtgatgactctttacgagcatgctgccttcaagcatctgtttaacaaagcacatcttgcaccgcccttaatccatttaaccctgagtggacacagcacatgtttcagagagcacggggttgggggtaaggccatagattaacagcatcccaaggcagaagaatttttcttagtacagaacaaaatggagtctcccatgtctacttctttctacacagacacagcaacaatctgatttctctttcctttccccacactttccccccttccacttgacaaaaccgccatcgtcatcatggcccgttctcaatgagctgctgggtacacctcccagacggggtggcggccggagagaggggccccccacctcccagacggggcagccaggcagaggcgccccccgcctcccggacggggcggctggccgggcagaggctgtcccccacctcctggagggggcagctgcctggcagagacgctcctcacttcccagacggggcggctgccgggcggaggggctcctcacttctcagacggggcggccgggcagagacgctcctcacctcccagatggggtggcggtcgggcagagacactcctcagttcccagatggggtcgtggctgggcagaggcgctcctcacatctcagacggtgggcggcggggcagagacgctcctcacttcctagatgggatggcggccgggaagaggcgctcctcacttcccagactgggcggccgggcagaggggctcctcacatcccagacgatgggtggccaggcagagacactcctcgcttcccagacggggtggcggccgggcagaggctgcaatctcggcactttgggaggccaaggcaggcggctgggaggtggaggttgtagcgagccaagatcacaacactgcactccagcctgtgcaacattgagcactgagtgagcaagactccgtctgcaatcccggcacctcgggaggccgaggctagcagatcactcgcggttaggagctggagaccagcccggccaacacggcgaaaccctgtctccaccaaaaaaatatgaaaaccagtcaggcgtggcggcgtgcgcctgcaatcccaggcactcggcaggctgaagcaggagaatcaggcagggaggttgcagtgagccgagatggcggcactacagtccagcctccagtctgcatcagagggagaccctggagagagagggagagggagaccatggggagagggagggggagggggagagggagagggagagctttttttcagacagagttttgctcttgttgcccaggctgaagtgcagtggcacgatctcggctcactgcaacctctgcctcatcggttcaagcgattctcctgcctcagcctcccgactagctgggattacacatgcctgccaccacgcccagctaatttttatatttttagtggagacggggtttcaccacgttggccaggatggtctagaactcctgacctcaggtgatccacccgcctcggcctcccaaagtgctgggattacaggcgtgagccaccacgcccagccagtgttgagcttcttttcatatccttatttgccatctgtatatccttggtgaagtgtctctcagatcttttgcccacgggagtggggttgttttcttattgatgaattttaagagttttttttttttttttttgagaggaagttttgcttttgtcgcccaggctggagtgcaatggcgcgatcttggctcactgcaacctccacctcccgggttcaagtgattctcctgcctcagcctcctgagtagctgggattataggtgcttgccagcacgcctggctaattttttgtatttttagtagagatgaggtttcaccatgttaggcaggctggtctcgaagtcctgccctcagatgattcacctgcctcagcctcccaaagtacagggattacaggcgtgagccactgtgcctggccaagagttctttatatatatcctgggtataaatcctttatcagatatgttattcgcaaatattttctcccaatctgtggcttattttttcattctcttcacagtatctttcacagagcaaaagttctacatttttataatgcctaatttaatttatctttttttttcttttatggatcacgaggtcaggagatcgagaccatcctggctaacacggtgaaaccccgtctctactaaaaatacaaaaaaaaatagccaggcatggtggcgggcttctgtagtcccagctacttgggaggctgaggcaggagaatggcatgaacccgggaggcggagcttgcagtgagccgagatggagtcactgcactccagcctgggcgacagagcgagactccatctcgaaaaaaaaaaaaagaatcttgaaggggttcagtgtgtggtagctgtcttttcctcagtttctggaatttaatttcacctcagtaggaattcattacttgaagcaaacaaatataccagagtcaaatggggataaaaattctagtgagtggcagcagaaatagcttgggttataggcagagcagcctggcattagtcctgtctctgcttccagccagttatatggccaggggagcctgagtattctcgaatataaaatgttgggtgtttggactggatgcagagcttctccagtgtttgtttgcaggtggactccaagcagccactgcagaagctctgtgtcgcagtttctcatgttttaacttaaaaatatgtgccaattttgcattctctgccctaatgtttgtttagatgtaaaaatgtttcaattttttttttctgctacctagtaagattgatacttcagaagaatgtatcacatgtatgttatacacatctcagtttgaaaactatggccttggccaggcgcagtggctcacccctgtaatcccagcactttgggaagccaaggcgggcggatcacctgaggttgggagttcgagactagcctgaccaacatggagaaaccccgtctctactaaaaatacaaaattagccaggcatggtggtggatgcctataatcccagccactcgggaggctgaggcaggagaatcacttgaacccaggaggtggaggttgcggtgagccgagattgtgccactgcacttcagcaagggcaacaagagcgaaactccatctcaaaaaaacaaaagaagaaaactatggccttatatgattctggtcccttttcccttaaagagaagagccgtaggaaagaataaaagccataatctgcactataaattccaaaccatgagtctcatcacactgactcaacagatcaggcacagattctcctgcttttttattttattttttgagacagtgtctcacttcaggctggagtgcagtggtgcaatcatggctcacagcagccctgacctcctggctcaagcagtcctcccacctcagtctcctgagcagctagaactataggcacgtgccaccatgcctggctgattaaaactgtttttttgtttttgttttgttttttttgtagacatggggtctttgtgttgcctaggctggtttcaaactcctgagctcaagcgatcctcctatcttggcctcccaaggtgttgggattacaggtgtgagccactgtgcctggccttctcctgctttctgagcatcttaatgtgtccagtttattcagcatatctacagttgaatttctgccagagttgaaaagagtaattgccttgatgttcctgcagcaaacttattagtcctaacctactgaagttatgtttaaaaaaagttttcttttaattaaaaaagtaaagtgagtcaagaaatcagcctttcccgtactcttcaacatctcttcagttgaatttgtctaaaggaaaatcaacttcccagtgagtgtcaacatctttaagaaaataatttttcctttcatctacctatgctaaaactatcttttctcccgaagcttggactattaaaactagaagaaattagctgggcgtggtgacaggtgcctataatcccagctacttgggaggctcagataggagaatcgcttgaacctgggagggggaggttgcagtgagccaaaatcatgccactgcactctagcctgggagacagagactctgtctaaaaaaaagaactagaagagatgttagatgtgagaaacttgaggttccagaagaaaaacttgaccttcctccttccttccttccttccttccttccttcctttcttctttccttccctccctccctctctccctcttccctttcttttctttttcttttcttttcttttctttcttttcttttccttccctttctttcctccctttctttcttttccttttccttctttctttccttttcttcttttctttctttttcctttcattccttccctcccttccttcctttctttttcttttctttcctttatcactctcttctttcctttatcactctcttctttcctttctttcttgtctcgttgtgctgcccaggctggagtgtagtggtgcaattatggcccactgcagctcaccctcttgggctcaaatgaccctcccatcttagcctcctgagtagttgggactacaggtgcacaccaccatgcctgactaattttcttttctttttttttttttttttttgtagagacagagtctcacaatgttgcccagctggtctcaaactttgggctccagtgatctgcctgcctcagccacccacggtgctgggattacaggcgtgagccaccatgcctgatgagaatccttactgttaaccacttttctatatgctatgtgcctctcaatgatggaatgtccactagacagttgaatatacaggtctggcaccacaaaaagagaactagattgtggatatggattttgggagttatcagcacaacagtggttgtagaagccatgggtgtcacccagagaaagttcataatacaaaaaggcagatggatgccataaagactgccatttctcaatattgtttcctgacagatactgctaatagatcagtggctggcctcagtaaagtagatggaggaaggcctagtgggataggaagaaaaacctggaaagaatggtgcccttgaagccccaaaggggagtgattatgaaggggagagagctcaatagtatcagattgttgctttttccattacttgctttgagagcttagtagaaaagtgttatatttggcagtcagtgttcattaatgatctcagtaagatatccatagggcagtggagggcagcaagcagtgattatattgagccataatccaaggttgtggttttcaaggcaggtgtaatccattgaggcaagaaagtgattgaaggactttaggatctaatttgaaatgggaaggacataagtgaaaaggtggaagataacttgcagggaaggaaccaaaccagggggcagcttttccttttgcttgtagacagctatgttgggacatcacagccagcactcagagctctgggatctgcccactgccacggacactgctgctgattagcacactcagggccaccctacagcaaggcagcccaaaaggatggagccttaaaaggatgggatctttggctgtacacgtaaaaaactggggggagtatctgcaaggtgaaatttctttagatcggggtttctcaatttcaggactgttgacattttggggccggataatttttttttttttttttttttgagacagagtctcgctctgtcagtgcagtggcgcaatcttggctcactgcaagctccgcctcccgggttcacaccattctcctgcctcagcctcccgagtagctaggactacaggcgcctgccaccacgcccggctaatgttttgtatttttagtagagatggggtttcactgtgttagccaggatggtctcgatctcctgacctcgtgatccacctgcctcagcctcccaaagtgctgggattacaggtatgagccaccgcgcctggcctggggatggataattctttgtgtttggggctgaaggctagaccagagtgcatcattggatgtgtagcagcatccttggcctctaccctctaaatgctagtagcacccccagccctgcagttgtgacaatcaaaaatgtttctggctgggtgcagtggctcatacctgtaatcccagcactctgggagaccgaggctggcagatcacctgaggtcaggagttcgagaccagcctggccaacatagcaaaaccccgtctctactacaagcactagccaggcgtggtggcaggtacctataatcccagctacttgggaggctgaggcaggagaattgcttgaacctgggaggtggaggttgccgtgagctgagatcacaccactgcaccccagcctggacattgccagatgtctcccagtgaacaaaatcacttgaattgagaaccatgggtctggattctgctggttttcttcttctagttctctgttatggatttctttttttgttttttgttttttccatatcttttgttgttgttgttgtttatagtttttttttcatatctctttttttttttctctgttgtagatttcttttaccttcattagttcctccaggcatttcagctctgttgatttggagagttcaggttatttcagcgttgtaccatttttacaaattttttttttcagtgtggaaataaaccatcaatagaggtgcaacaaagtggtatatttttctataatgcccaatttaatgcctagaacattaaatgtttagtggttatacactcttgtatcatgtatcttctttaattacagctatttgtgtctaacttggactctgaggactaggactctttttttttaagagacagggtcttgctctgttgcccaggctggagtgcaggggcacctttttagctcactatagccttggactcctgggcctaagcagtcctcctgcctcagcctcccaagtagccgggaggcacgtgccaccacacccaactaatttttaaatttttggtagagatggagtctcactatattggccgggctggtcttgaactcctggtctcaagtgatcctcctactcagccttctaacgtgctgggattataggtgtgagccaccatgcccgtccatgggactttcttaatcttcttttcataactaacatgttgcagtatacctaacacatagtagacgcttagtaaatgtttgtagagataagtcaattatgttagataattgatgaagtggattaaacctggaatttttcagaatatttcagtcatcaggccttacaaagaagccagttgtcccttagttgtcaaaatatggtttgtgcagagaaaagcatttcattccaaatcatttccatgcacacagatcacaagtatcctttgggagaaggggaaatggagcagagtggcatgctgtctttgaaagataacacagatccttttggctcttcccagcattcaggctgattgtaggtagagtgatgctgaaactgtaattgaagctgaaaaatagggtaagtgtaagagattcagctacaaatctcacatgtgaatgttttctaggctggtaataaaataataagcctgattgtggcatttagagcatggatgtgacctaaacctctggaccaaatgtgatacttacaaaattgattaatttctaagtttgtttagatatttatgcctggtacaaatgtgaaaaatgttgtgtttttgcttcttaactgtgcagtatgattttatttgataaataaaggatacccataaaaacacataattaataactgtacagctcaatacaataataaaaagttaaaatatctgtgtaaccacaactcaactgaatttcaattcaagaaacggaatatcacaagaaatagaacattaccagctcttaataattttgaaaattttatttcattgctgctattcactagtttcttattgtgcctaaaagctatcatccaagtctttttttttttttttttaaattgtgatataacattgaccattaaccatttcggtggccattttagccatttcagtatttcagtggcattaagtacaatagcattgttctgcaaccattactaccttccatctcaataggtttttattttcttaaaatgaaactctgtaccagttaaacaataaatccctattttcccctctccccagctcctcgtaactaatattctactttgtgtctctatgaatttgactactctaggtacttcatatacatgagatcgtacagtgtttgtccttttgtgattggcttatttaacttagcatagtatgttcaaggttatccatgttgtaggatgtgtgataatttcatgcctttctttttttctttttcttttttttttttttttgagacagagccttgctctcttgcccaggctggagcgcagtggtgcgatctcagctcactgcaacctctgcctcctaggttcaagcaattcttctgtctcagcctcctgagtagctgggattacaggtgcctgctaccacgcctggctaatttttatatttttagtagagatagggtttcaccatattggtcaggctggtctcgaactcctgacctcaggtgatccatccacctcagtctcccaaagtgctgggattataggcacgacccaccgcccggccaacttcctgcctttcttaaggctgaataatactcatttgtatgcgtagaccacattttgtttgtctgtttatctgtggatggatacttgaattacttcatcttttggctattgtgaataatgctgctgtgaacatggatgtgtaaatatctgtttaacaccctgctttcaattcttttgggtatgtacctgaagtggaattgctaagttgtatgttaattctgttttattttttgaggaactgccatattgtttttcttccagtttttgttgttgttgttgtttttaagttctagagatcgggtctcgttatgttgcctaggttgattttgaactcctgggtctgcctcagtcttccaaaatgttgggattacaggcatgagccaccttgcccttcccgaaactgccatattgttttccgtaatagctgcatcatcttacatgcccctcatcaatgcacaagggttccagtttctctacatccttgccaacatttgctattatctgtttcttttttctttttctaatagccattataatgagtgtgaagtacatccatgtcttttttgagacagagtcttgctccgtcgcccaggctagagtgcagtggcaccatctcagctcactgcaacttctgccgtccgggttcaagcgattctcctgcctcagcccctgagtagctgagattacaggcgtgcgccaccacgcctggctgatttttgtatttttaatagagacggggtttcaccatgttggtcaggctggtcttgaactcctgatctcatgatctgcctgcctcggcctcccagagtgctggaattacagatgtgagccactgcacgcggcttttttaaaataaactttttgtcatggaaatttcccaacatataaagaaagaagggcaaataatgaaatgaactacccatatatccatcacctagagtcgataattatgaacacttggccaatcttgtttcacttagagtttgtctctcctttccctattgttgcaatgcaggtcacagtcatatactttcatttattgtactttaatgtactgtggtacaggttgagtatccattatgcaaaatgcttgggaccagaagtgttttggtttcctagttttttctgattttgtaatatttgcattatatttaccaattgagcatcccaaatctgaaaatctaaaatccaaaatactccagtgagcgtttcctccgagttgtgtgtttggtgctcagaagttttcagttttagatttagttaacgactataaaacatacccataaaaccatattatatgtaaatcagatgtctagtctgtatcacccacatctttatgacccatttcttttaatctgaatgtgtaagaggcaaagagttaacagactacccaaagatgacaatttatattagtaaccaagatttagtacttttatgagttacagtttttgttaactatgagtaagagctctgctttctttaaaccattaatactcttttcttcttcctgatatttggtggcatttgtattatctatcataagcagtaccataggccacttcctttagtaaataaggtgagctagctctgggttaccttctgtttgaattatatttatgtgtccgtttgtttaagctcaccattttaagggcctctagaagatacacctaaaggcagattacaggaagaaattttatctagccttctagggtttctgatagaaggtgctggtagagatatttacattttgtccttgttggaggtgtgggtaattgtacatttgcagctatgcatttgacactgattaacattaatctcagtgtaaaaatttagaatcctttttactgtaacatacttaacaggatttagaaatcctctactagcaaaatcaagttgttgctatgtgagctctttaaaatgggatcatttggaattctaagctacagcagagccaaccaagggctgtgagaaaaagagagagagagaggaataaacagttattattaactcttttcctccctttagttttcttttctttctttctttcttttttttttttgagacaaagtctggctctattgcccaggctggagtgcagtggtatgatctcggctcgctgcagcctccgccttccaggcacaaggatcctcccacctcagcctccccagtagcggaactacaggtgtgtgtcaccacacctggctaatttttcattttttatagagccgcagtttagccatgtctcccaggctggtcttgaactcatgagctcaagtgatccacccacctcagcctcccaaagtgctaggattacaggtgtgagtctccgcacctggcctctttcgttttttttttttttttttttttttttttttttttttgagacggagtcgagtctcactctgttgcccaggctggaacgcaatggcgtgatcttggctcactgcaacctctgcctcctgggttcaagcgattctcctgcctcagcctcctgagtatagctaggattataggcacacgccacgacacccagctaattttttgtgtatttttagtagagatggggtttcatcatgttggtcaggctggtctcgaactcctgacatcgtgatccgcctgccttggcctttcaaagtgctgggattaccggcatgaaccactgcgtccggcctcccctttagttttcttaatgtgcatagaagacaccagtgtataataaccatatgaccttgtataacattagaaggaagtcttgttcaagatacacagaaaagaatactctatgatttatgattccattaattttcaggtatgagaatgtgagtctgctgtcaggcacaaattaaatgagttaaaaaggcagagttgatgctttccttatggctcttatttacattattttttatttatatgctgttttactgtttaccgattttatttcattgaagatagcttatatccttgcttggtaaatgacctcagtcactaagagcatagagccttctgagtattaaacagtaacactaaaattatttccctttctcctttagttattgtgatagtagtagtgataatgatagcaattaggtaatagtgaccctcaatgtggcccttaaaatgtgccaggcaaaaactaagtgctttttagtagtaactcatttaatccccacaacaaccctatgaggtagatattattattttcattttactgatgagagattgaggcccagagaggttagtaactgacttcttcaactacgaataactagtaagtggtagagctaggaaatgagctgaggcagcctggcgccagggtctttcctcctaaccattacactgtactgtacttatttgacacccgtgtaagtaaagggaaacgtgagataaaaatgcttttaacatctttgtgggctctacggaacttattatttgttcattcagtgctccctgtagaatcagtgattacagagaacatttaatctcaaagtattcatccctattttcaaactggtattttcagatctgttcttggagaccttgcatttagaaaaagtacacttgaactttttagtcgaattggcagatcaagagctcacagacaggatattgcctttgagtatttagattgtccttgctgacccctgaagcagtaattttgatagatcacaatgtttccactagagtacagcagtattaggggttctgacttcaaagtgtgtatgtgtatgttttatatgtatttttgtagactccttctccacaaatggaaccaatcttacacaaattctgaaaaccttttagagctatttaaatccaagaaatacctaagcattttgaagtagaactatgagcaatgaatgcaaatgttacctttctggagtcttgtgataagtaaaacaacctgcccaattttcagtgctttaaagttctggccatgcagaattcgtttttactaattctgggcatgtatttacatatccttcttacctttaaatctgagctaatagctactatttgataagaaaaccaatgctgtattttcttctttctttgttttgggtttcgtggatctggctgtgctgtttgttagaatacatctaccctggtgctttgggtcagtgaagtgtttggcaggagggagaaatagatcaaaatttctattcattaagtatgcatcttttatggaggtggttgactttctcatgttaattttctttcccctaggtctatgaaggcctagacatcatcaccaacaaggtttctgcccaagagcagagaatctgccggcaccacatgatcagctttgtggatcctcttgtgaccaattacacagtggtggacttcagaaatagagcaactgctctgatatccttaggaaaggcagcagctgggtttggtgggtgaaagcagcccaagccaagagagaagttttctttctagtggcaatttcttctcagaaggggcacccaaggcctaaatactgatggatgccatccccatcagactatggactgaaagatacagtgtctttgtcacccaaattcttgtccttagactgtggcatcatcattctctgggaacttgttagaaatgctgattcttgggccccactccagacctactgaattagaatctgcattataacgggagtccccagtgatttatatacacattaaaatttgagaagcactgttttagtgataagaacaccaatttaagaatcagaaaatttgtgttacagtcctagaactgccttttttaccatgtgaattttactgggtaaagcatttccttaaccccactgagcttcggttttctatcctttaaatggagatacgaagttaatctataaatataatggagttatagttagaatttcaaaggggttgttagatgggagaggactggaaaatatagttctgggtaaaaccaagaaatttttgcaaaaagaataatataagggggattgcccttatgtcttaacatgcagactgcctttagtatctggattgctatatattaaaagattgaaaagtcataataattataatagcatggaacttatttagtactagatatatttgtggcacagaatagaaaacccagatatagattcaaatggaggtacgtgaatttttttttttttttttttttctcctagagacagtctcactctgttgcctaggttggagtgcagtggcaccgtcatggctcattgccaccttgacctcctgggctcaggtgatcctcccacctcagcgtcctaaatatctgggactacaggtgcttaccaccacacccagctgattattttcattttattattattattttttgagacggagtcttgctctgtcacccaggctagagtgcaatagcgcgatcttggctcactgcaatctccgcctcccaggtttaagtgattcccctgcctcatcctcctgagtagctgggactacaggcacatgccaccacacctggctaattttttgtatctttggtagagacggggtttcaccatgttggccaggctggtctcgaactcctgacctcgtgatccacctgcctcggccttccaaagtgctgggataacaggcatgagccaccatgcccggctattttattttttgtagagatggattttgctatgttgacaagctggtcttgaacccctgggctcaagtggtcctactgcctcggcctcccaaagtgctggaattacaagtgtgagccaccacgcctggccccaatcagccttcttgattcgacaggtgaaggtactagatactgaggcccaaagagtagaagggtgtttgctcaatatcacagtcatttcatggcttgcacaaataagttaaaccttttcccgtgaagtatgtcctatcccatcttctttcctctttccactctctcctcttctggaatcttaacatttttcccttccccttttcatttctttgctcactttccctttgttaatcatactacaggttgaacatctgaaaatctaaaatccaaaatactccaaaatctgaaacttttggagtgctgagatgatgctcaaaggaaatgctcattggagcatttcagttttcagattttcaggtttgggatgctcaaccagtaagtataatgcaaataattcaaaatctgaaacatttccttggtcccaagtattttggataagggatatttaacttgtgtataattgacattttatcttactgtggaaattgtatgctccctatacttaatttaaagggggaaatagagaatttgttttctctttttaaagcaaacagtgttttttctttatgatccttgattggtaacatctttcttcccaccctgccttagccgcttaagggttagtgggattctagtagaaaagaggtggtctgtctctatgcctgcagattggctggcaaggagaaatgtgtaaatgattatttacctggatattgaaagtcttttaaaaaaagttattttcggccaggcacgatggctatcgcctgtaacctcagcactttgggatgctgcagtggatggattgcttgagctcaggagttcaagatcagcctgggcaagtaacatcgtgaaaccttacctctacaaaaaatacaaaaattagccagatgtggtggcatgtgcttgtagtcccagctacttggtggcgggagctgaggtgggaggatgactcgagccctgggaggttgaggctgcagtgaactgttttcgcgccactacactccagtcttggtgacagagtgagaccctgtctcaaaaaaaaaaattattctcaggagcaaaggccgccttaaagcagataattatctgttcaacggagattctaaagagaaaaatttaaagtagcagagatgaaaaaacaatagtggctatagtaaattgagtgcttactattttttaggcattgtgataggggatttctatgaattgtcacatttaaggctcatggggatttttacaggtgagaaaactgaaactcagacaggctgagtaattgtccaagagctgaacctggaaattgaagtctatttatcttcagaacctgtgcatctcacttaatttggtcaagcctcaagtggcaaaatgtgatagtctctccatgatggtagagactgactaagtctaagaaccttagagaaaccagcttgtgttttgccttagaaggcaaagtcatgcaatggatgtcaccttgatggcctcctgagcagctgacacttggttctgtgagagtccttgggcttgtgcttattgaactgatttggaatactaataaaactttgacttttagcagcaagacctagaaagttctagaactggaaggaattaccactatgcatttgtctctggtttctgcaagtccctccagaactgattggacatgattctggaaatttgttggaaacactgagggctggtatcaacgcattttggttcccaccctttctcctctgctctgcagataaatgaatgtggtttcttgctaatggtgtccttccaaagtgagtcaggattctcttgatatcgtgatatctttcttaatgttcacattgaagatatatttgcccgagacaaaattcctattgttgtgggaggaaccaattattacattgaatctctgctctggaaagttcttgtcaataccaaggtaagtttagttcactcgtaactcactgaggaaatggattgctctttcttgctgtctaatttcagtgggagaaaggttgactcttgcctatttcttatacccagcaactataattttcctacttaatattctcaagcaaatgccacctccatgtgtgaagtgtgttcctccaggctggtctatgggaaggggctctgtgtgggaaaaatgttgctgtgtggattaattagcatctccatataaattaacagttcattaggccaggcgtggtggctcacacctgtaatcccagcactttgggaggccaaggtgggtggctcacctgaggtcaggagttcgagaccagcctggccaacatggtgaaaccccatctctactaaaccccgtctctactaaaaatacaaaaattagccaggcatggtggcacgcacctgtaatcccagctactagggaggctgaggtgggaggatcacttgaggcttgaggcggaggttgcagtgagctgagattgcgccactgtactccagcctgggcaacagagcgagaccctgtctcaaaaaaaaaaacagatgcgattcaagaaaaaaatatgtataattctttagaaaaattatattaaaaaaaacccagtacgttagccattagcctgattcagtatttcctggctggcagcacagtatgtatattagggagatgtccaacactgaccttatttacgtaggtgctactatgtagggtaagactgtgtaaactgtaattcactggcaatcctggtctccttgttcacccttgctgagaagactagactcctggatatgctaaaatagacatattagccctggtacctgtttgaacttctgacagggaagcaaatagccaggtgtttccctatgctgtaagtcttctgtcttttttgtttgctgtggcctcatagcacttaccacagcatattggaattttctgtttatgatctctcactatatggcaagatcttctgattattctgtattcctgacagttagcaaagtgcctggcacatacactgtctcagtgttggttgaattaaatatacttctaaaccatcatttaatagccccaggagatgggcactgagaaagtgattgaccgaaaagtggagcttgaaaaggaggatggtcttgtacttcacaaacgcctaagccaggtggacccagaaatggctgccaagctgcatccacatgacaaacgcaaagtggccaggtaagaaagcctggcgcgctgaccccaaattcctttacaactagagagcagtcagttcttcagtttgcccagatgatgagagagatttggtaatagcagttagtggagattgatgtgttgttctagctcagcaggttgggaggccctgagttattgcttcagttcaactccctcaataaataattgcagcctactttgttacattttaaatgcatagtacaatatcgttttcccctagggcctatataatgttgcttcattttctatttgatctttgcttgtataacagttttcatatacattttttctggcatgcagtttgtttacattgtgatttgggtttcataactgattatgcaatgccgtgttctgccccagcagctttcccagtgggaggtggattttattaactgtctcacagatcagctcacctttgcacatggaaactatctggtagggaagagaggtagtgaatgaactcacaaggtcatgtttttttaggttgttttggaattgcagcctcatgttaggtttatttttctgcagtattaggagtgataccacttccagcatagtagaacatctaatgaaggacctgttctattgatggttatacagattaaatattaaagtaacatctcatattcataggggttgtgaagtattccactcaaatgaatttgatatttttcctcctaattttacccccctcagtgaaacttaatgttagaatataggatttaaaacattcattattattattactttttttttttttttttaagagatagagtcttactttgttgcccaggctggagtacagtggcacaatcatggctcactgcagccttgacctcctgggctcagatgtcctcctgcctcggcctcctgagtagctgggactacgggtgtgcactactatacctggctagttttttaaatttttaattttttttagagatgttttgctgtgttgcccaggctggttccaaactcctaggctcaagcgatcctcctgcctcagcctaccgaagtgctgggattatagtcatgagccacagtactcagccaagaaaaggatttcttcaggtagggttgtcctttgcacggcaggggggtggggcacaaattgtaatatctaagttttttcacccccttaaaggcaatgtataacctcattaagaatgcatgttttagattaatgaagtttatacttttcagtatccaaacattttaaacactttaatagaaaacattcaattttttttaaacctaggaacattatgataaacattcatttttatattgttttattacatgattctagagcttggtgtttattctctccttttactaatcagttctttcttatcacttctcattttgctgcgtctaaacgagtaatgagtttgagaattttttcttagtaagagtcaataggttctaagcaagagctctagagtctcatttagagaatgaggactttctttttttttaatctttcttttggcttgaggctgtattttaactccagataagtgagatatctattactacattttttctcatagatcttctttgagaaaccagtgatactgaaagacaagggggtctacactcttgcgttagggtttcaggaagtagaattgggtcaggaagagaaagatcactttcaggctgataagttgcaatcacccagagtggtagagtgtagatttgggagttaaattacctagtgctgcataacataatagatacggacagaagtggatggtggcttaagaataagtatgtgagttcttttctcagtgatctttgtgccagtagagcactggattagccaggagcattcttcattaatttgacatatttaaaaagaaagctgatgagctggatgtacaacatgcttttgtactgtgggaaaggcacgccagccagaccagacttgttggcttgttacaaagtgtcc

SEQ ID NO: 9 - DNA, 24760 bp, Homo sapiens
  source 1..24760: mol_type = other DNA
ttattttgattcaccgcagagggcggtctacgagagcgcagagccccactcggccagcggggtctggcgggggacctgtcgcgctgaaagctccagggtagggccgacgcccatcaggctgggcatccgttcgggatgcgcaggttgcgatctgcaaccggcggcgccacgcccaggcgggcggagcgcggttcccggagtctcgcgcccgcggtcatgtgacacagcgaagatggcgtcgcccggctgcctgtggctcttggctgtggctctcctgccatggacctgcgcttctcgggcgctgcagcatctggacccgccggcgccgctgccgttggtgatctggcatgggatgggtgagtgagtgagaaatttaaaagggtttggcgattctctctcttcctagcctgggttcgcatctgcaaaatgcgggtgtagagggcgaggacgtggtcccacagcacgcggctgcctcgacattttaggatttgaaggatctgcattggaaagagagaaggggaaggagccgtccccttcactggaaagagagaaggggaaggaaagagagagccgcgcacggcgttgaagttttacatgctgtccttgattaatccttacagtagtggcgtcaggatgcagcatctctcacttggtcaggctaggtgagctgcggctggctatatgactggcgcatctacccttttatttattccttcacacattgaacagagatttgttaggcacctacagttcatttacaaattgagtaacccttatctgaaatgcttgggactgggaagcatttcggatttttttttttttaatatttgcatatatacaagagatctggggggtgggacccaagtgtaaacaggaaatttatttatttttcatatacaccttatacacatagctggaaggtaattttatgcaatattttaaataattttgtgcaacccatcacatgaggtcaggtgtggaattttccacttgtggcatcatgtctgcgctgaaaaactttcagattttgggtttcccattttcagattaggatgctcaacctatattcatttaacacagttattgagcacctactaggtgctgaggatacagtagggaactaaacagactaaattctttgttcttttggaacctactctccagtaggagaagcagattataaagaaattaacaagtaaaacataacatatcaaatggtgatatgtgcaacagagaaaaatatagtagggtgtaggataaaaactggaggtgggggcttgcacttttaataaagcaaagttgggaaagaattcattgaaaaagtgacatctgagtacaaaactgaggtagatgaggacagttgccatttggctgtctggtagaaggaacagtaaatgggaaagccctgatgtggaagtatgtctggtgtgttcaagggacagcattcagatcagcgtggctggaaatgagtaagcaaggggaagaagttaggagtttagtttggaagggaggggcaggtacagaagttattgggcctagtaagactaatgcagggactttggctagagtgtcatggggaactttttgagcagatgagtgacatgatctgacacatttttaaagaatcactttagttgctgtattaagaatagatcgtagggcgtcatggatggtcacagggagacaggttaggaaactattgcaataatttaaacaagagatgatgacttggaactgtagagtaacagtagaggtgttgagaagtggtcaaagtttggatagattttgaaggtggattgctaacagatcagacttggaataagagagaaagaaaggagccaaagatgactccacaggttttggcctgaacaattggaagggtgaagttttcattttaccaagatggggaagcctgtaggacaagctgacttagggtgggggaaagatcaagagtctgcttttgggcttactaaacttgagatcctcatgagacacccaggagatgttgtagaggcatttggagtgtggagtctaggacagagatacgggttggagatttaagtagggagtcttcggcatacagctagtagttaaaggctaggtgagaccacctaggaaatgagcgtacacagaggactaagccctgaggcactccattccatttggaggtggaggaaatgaggagaaactagcaaaggaggctgtaaccaaatagccggtgaagtggaggggtcaggaaagcgcagtgtccttgaagccaagtgaagaaaatgtttcaggaagaagggcatgatcaactgcatcaaatgttgataggtcatgatcaactgtatcaaatgttaatgggtcaaggaagataaaggctgacaactgattattggatttagcaatataaagatgattaatcttgacaaaagcagttttgggagagtcgtgatagtgagatctttattgggatgggttacagaaaaatattcagagtaattagagtcagcaaatacaaacacttgcaaggttctccaacaggccctggggctactacagtggggtcaaaagaggacacagggtaggagctttgtgttttcccagagctcacagtcagttacaggggaggcagaggcagttaagtaacctacaattacagctcagtgtggagaacgttgttttcagagaaataaaaggaatagacaattctctaggcagtagccttttcttgttctaaaattggtgcttaagctttctcgcaggttgaaaatggaataagtaagttcaaaatgggaaatgatctcagtccacttctactcagtagccagtttgcttcctgttcctagttctagttccctgaaatagaagaaacaagtctggggctaggacaagatgaagaggctcctgaagtgcaaatttaaggaggcactcactctcaaattcagggtcaacacttacataaacctgagaatgagtgcctccttaaattttgtgccctagagcgggggtcccaaactccctgggtctgtgacctgttaggaactagccacacagcaggaggtgagtgagcctgcagccttaccaccatgagctctacctcctgtcagatcagcagtggcattagattctcaaagagctcaaatgctgttgtgaactgcgcatgtgagggatctggattgggtgctccttatgagaatctagcaaatgcctgatgatctgaggtggaacagttttgaaaaattgtcttccacaaacctggtccctggtgccaaaaaggttgaagaccgctgtcctagatgcttaatttgcctcaccctagtcctggccctgaagagaaaactttgcatctgttcaccccaaatatcccctgtgataggggaagggaatgtgtacctctgcttatttttcatttgtaaatttggtgtcttaattatcctatatgggctttttggtttttttgagacagggtctcgttatgttgcccaaactggtctcgaactcttggcctcaagcaatcctcctgcctcgtcttaccaaagcgctgggatgataggtatgagcccatgcttggcctatatggatttttttttttttttttttttgagatggagccttgttctgttgcccaggctggagtgcagtggcatgatcttggctcactgaaacctccacctttcagtttcaagcgattctcctgcctcagccccccaagtagcgggactacagacatgtgccaccacacccggctaatttttgtatatttagtagagatggggtttcaccatgttgcccaggctggtctcgagctcctgaccttgtgatccacccacctcggcctcccaaactgctgggattacagacgtgagccatgacacccagctcctgtatggacttttgaagcttgttattacttgataaacaggagctaagcaaaaaatgttctttcttctgttttttaaaattgaggtaaaaattcatgtaaagttaaccatttaaaatggtacgattcagtggcatttagtgtatttgcaatgttgtgcaactaacacttctttttcaacaccccagaaaaacacacatagccattaagcaatcactccctattgccccctcctactacttcttgataatctccagcttagttttctgtatctcagtggatttgcctgttctttatttatcctatgaaaggaatcatgcattatgtggctttttgagtctggcttctttcacttagtataatgtttctgaggttcattcaagttgtaacatgtgtcagcactttgttccttttttataactcagtaatattccattgtgtgaatataccacattttattcattcattcattgatggactgctggattgtttctcccttttgactattacaaacactgctgctgttaacatctatatgcaagtttctgcatggacgtgtgtttttatttctttggggtgtataactaggagttgaattgctgagtcatttagtaatcgtatgtttaactttttgagaaaccaccaaactgtttttcacagtggctgcttattacattcccaccagcaatgtccaaggggtcccatttttctacatcgttgacaatacttgttattttctattaaaaaattattattaaagacatcctagtctgtgtgaaatggtatctcatcgtggttttggtttgcatttcacatgccagtggttagccatttgtatatcttctttggaaaaatatctgtttaatttcttttcccatttttaaattaggttatctttttgttgagttgtaagtgagttatagattccttgtatattctggatattaagcccttatcagataactgttttgcaaatattttcttccattctatacattgttttcacatccttgataatgctgtttgaggcctcagagtttttaaacaataaacaatatttggactcatgagtttccatcattgtgttttgttggctaggagacagctgttgcaatcccttaagcatgggtgctattaaaaaaatggtggagaagaaaatacctggaatttacgtcttatctttagagattgggaagaccctgatggaggtaaggcgcttcacagctgttcctttgaagggttgctgactgatttcatagcatatactgttaaaatgctttgccttgtgttttcagcagcagatcatacagtgatactttcacccttgagtggctcatgtgaggataccaacctaaatgagtttacctcttagagaagatgtcagtggttgttttcagtcccatcctctcacttctctctggcttcttttttaggacgtggagaacagcttcttcttgaatgtcaattcccaagtaacaacagtgtgtcaggcacttgctaaggatcctaaattgcagcaaggctacaatgctatgggattctcccagggaggccaatttctgtacgttcctttttgttatattgtaccacttatatggaattgatttttgtttcttttattcagataaatccactcctccaattcaagattgtcacctatcttggaagggaaatttcctaaaatgttcctgtgtaagaagctttatggaacttaatttcttttcttttttttttttttttgagacagaatttctctcttgttgcccaggctggagtgcagtggcgcgatctcagctcactgcaacctccacgtcccaggttcaagtgattctcctgcctcagcctcccgagtagctgggactataggtgctcaccaccacacctagctaattttttgtatttttagtagagatggggttttaccatgttgtctaggctggtctcgaactcctgacctcaggtagtccacccacctcagcctcccaaagtgctgagattacaggtgtgagccaccatgcctggctggagcttaatttattttctatgaaagttgaaagaaatatttgcatttgcccatatcaggaaaatcctgaaactctgcgggtttggggagtcacagaggatgactagcttaatctgtgatgctgattgtggatgatacatttccatctgacagtcggagctaaaactcccttttattccgtaggagggcagtggctcagagatgcccttcacctcccatgatcaatctgatctcggttgggggacaacatcaaggtaactttgcctctttgctttcttttttctgtattctaacccacatgaccacctgatttaaaaaaaaatctaggaactatatttgcacaagacatcagccattcttgcaaaatcctgtttctctagcttttaacaaactagccagcattgctggagacataggaagagacttaggattccagaggcctggatcactaggttggcatctacttctctccaatttcattgacacgattgcatggaagtaagatggttatagccacgtggcaggtggtggttgaggagttaggaaaattgagtgaccttttctgttctctgatttggtggtatcctcttgaatttaggcttaggcaaagaatagtgtgtaagctcttgtgtctataaatttaaactctttgagaaacagcaggttttctattttgacggaattccatactattggggaaggatgtgtcattagaatggaatttcatctctgttgttgatgggtatagctattagctggtataatgtgggagcagaatgattctccgtgtaatcaggaaacctggactcacccaattaactattactcctaggcaagtaatttggtatcttaggttccactcacagatggaagaaaccaaaatatggccctgcctgtcctatgggaatttttcagaggataaagtgaaataataggtaggaaaatactttttaaaagtataaggattatacaaacgtaagttggtaaaaacagctttattattcattcatttaacaaatatttattgaaaacctattatatgccaggaacaagacagacaaggttcttgcattcatgaaatatatatatatacacacacacatgtgcacatatatgcacatacatacatagacatatatatacacatatgcacctatatacacacatacatagacatatatagacatatatatacacacatatgcacttatatacacatatatacacacacacatatatatatatacacgataaaatggaggatagctgggcacatggtggtgtacacctgtagtccctgctacttgggaggctgaggctggaggatcatttgaagccaggagttcaagacactgtggtgtgctgtaattgtgcctgtgaatagccattgcactttagtctaggcaacatagcaagacccaatctcttggaaaaaaacaacaggatactgttcgaaggacacactagtggttgtagtgcttaaaggagtgggctctggggccaaactgcctgtgtctgaatcctggcttataccttattgtctaaccttggacaaggtatttaacctcatttttacagttttctatctgtgatatagggcaaataatgaaatctactccacagggtggttgtgaggattaaattaattattgccaatattttgcttagaactatttgtgttactcaaaacaatgttattgatgaggatgctaaggatgaagtataactgggggaggggaaggaaatgggggtgggtactatttgagataaggtggtcagatgtgacttgtgtaggaccaagacctgagagctgaaaatgcgtccagccatgtgatgcaacacatcctccagggatgagcaggtaaaaagatccttaggcaggaaagagtgtagcagcaccaggaggaagctggtgatagtattagttctctgcgctttattttcatgaggaataagtgaatgaaatcagagtttggtcctgttcattttgtttctcacagtgccttgtgcatagtgggtattcgatacatcattattgaaggagtggatatttgtcatctaccactgtaggtgtttttggactccctcgatgcccaggagagagctctcacatctgtgacttcatccgaaaaacactgaatgctggggcgtactccaaagttgttcaggaacggtatgtatggttagctgaaaagattacagacctgtcaccgtgtgaaaatatcatgctgactttcatgctcacagtgattccagcagtagttccttgtgatattcaaatgagatctttttttttgagatggagtttcgctcttgttgcccaggctggagggcagtggcgtgattttgtctcactgcaacctctgcctcccaggttcaagcgagtctcctgcctccgcctccgagtagctgggattacaggcatgcgccactacgcctggctaattttgtattttcagaagagactgggtttctccatgttgtttaggctggtctccaacttcccgagctcaggtgacccacccaccttggcctcccaaagtgctgggattacaggcgtgagccaccacacccggccttcaaatgagatctttttgtactatctgctcaatttcattgtaaacctaaacttgctccaaaaagtctattaactaaaaaacaaagaaagaaaaacaagggcatttttctatgtaagaagaatgtaattataacagaataaatttccatccttaaaaaacaaacagaaagcctttagaaagtactaagctcaaggaattattgttggtatttagaggacagattctttatgtcattagctactccctatatcactgtccctgactactcaaatgtatttgggtatttagcatggccagcctggcataatggctcacacttgtaatcccagctctttgagaggccaaggcaggaggattgcttgaagccagaagttcacaaccagtctgaacaacatagtgagacccctgtctctgttaaaatctatttttaaaaaaaaaaagatgcagaattacttttgtagtatgtgcttgttcagttggttccaaacttaattgtatatcagaaccacagggaaattcattaaaaatggattcctgggctttatccttagaagttgtgggccgggcatggtggctcacgcctgtaatcccagcactttgggaggtggaggcaggtggatcatgaggtcaagagttcaagaccagcctaaccaacatggtgaaatcccgtctctattaaaaatgcaaaaattaactgggcgtggtggcgcacgcctgtaatctcagctagtcaggaggctgaggcaggagaatcacttaaaaaacccgggaggcggagcttgcagtgagccgagattgcgccactgcactctagcctaggcaacagagggagactccgtctcaaaaaaaaaaaaaaaaaagttttgatggtaggtctgacgtgctcttgatgatagctggagtttgggatcaactaatatcctgtgggttttccaagtgtctcattcttgtcaaataacaactttttattacagtatattcttgaagccattttccaagatacagccttgtgactgactcatgttgtaaccacctacagctaatagctgtcttttcttttcccactcgttggctacacaaatagccacaaagctgttttgggtcagcagtaccacctgatggttattatagaaaactaagatactctgtacctctagctccttttttttaccctcaggctacaccaagctttcccctttgcctggtttgattggctgtggctaattacaacttaattatttatattctacatattctctgttctcatggatttgcatggtatttaaacttcattcttcttcctttactctttattctcactcttgcccagttgcctccaaaacgcctatacttttctttctttgtgtgaaccaaaacaacccttggcgatcagaattctgttagtgatgctaagtgagcagtccgtcggggggtgacaagtgacacctaaatactgattaaggcggggcgcagtggctcatgcctgttatcccagcactttgggaggccttggtaggcagatcacttgaggcctggagttcaagaccagcctggccaacatggcaaaaccccatctctactaaaaatacaaaaattaggcaggcgtggtggtgcacacctgtagtctcagccactccggaggctgaggctagagaattgcttgcacccagaaggcggaggttgcagtgagctgagatcgcaccactgcaccccaacctagatgacagagtgagactctgtctcaaaaaataaaaataaaaaatactgattaaaagctatagattgatgtgtttatcttcacttcctccttaaactttaattaagtggtagcagaagaataaaaagtgataaacccacaagggcagagagaacagggagagaggaggtaagagatcataaaaaatggcaacatgtttttgaaagcaagcaagcagatgaatgagtgtgagaactgttttagcagagcagatggtgaaggcttaaagtaataaagagaaatcattttgtctttgtgatactgtcccaggttgcccctggtattagggaggattaattctggttgcaagaagaaacccatatcaagccaaagtaaattttaaaagaaagtaatactctgttggtgcctaaagcctcatagggcctagaatcaagaattgggagccatgaggagccagggtattctctctccagtgccattgttgcttctctctctgtgtcgctgcttctttctctccatgcagaccagcttcccctgccacccacatgatggaaggtggcctcgcacggcttccaaatgtttaattttctgttaggagattgtctcagtctgaggctagactctctttgtcccgattcagattcttcaggaagggaccatgccccagctcaggtcaggtctccccctctgctctcattagctgtggccagagaagtgggaccgtgcttactaaccataccccacctccctgtaaaccagtaggccgggcaggaagagtgcaagagaggcagagaccccaaaagatgtcttccacattcttcagataacttaaccttagcaaagcaaacgtgatatcctaatacgcacagtaactggtggggaagcccccggcttggcatggtgagggcaacgaggaatggtataatagttctctctctccttcctggatgtaaaactaccctctagttcccttttgcctttgcagatgctgtcagcccttcctagccttctccttcctccggtttgctccctgccatcccctgccccacgctctaccctcctacctctacactccctgccacaatgaatgcttcagtgttgccctggccttggcctccgtcttcccccgtaccagctcagaggaagctagagctttacatatcctgtttaattttcatagcaacttgccttccccaggtctgctctgggccccgctcccagtttgcaccccaccctcagtggatctcagagtgcttttcctcaattgtccagttttcccatgtctttgccctcagccgatgaacttgcaacttggttttctggaaatattaaggcatctactcaggctctctcagagactttcagccattcaaaaaagttagagagtaatgtaacgaactacaggcatacctcagagaaactgaggatttggttctagaccaccacaataaagcaaatattgttaatacagcaagtcacacaaagttgttggtttcccagcgcatataaaagctatgtttacactatactgaagtctattaagtgtgcagtagcatcatgcctaaaaaaagtacatgccttaattagaaaatactttattgctaaaaaatgctaatcatttgagtcttcagcaagtcatctttttgctggtggagggtcttgcctcggtgttgatggctgctgactgatcagggtggtggttgctgaaggttgggatgtagggtccagccccacagggtcggtgggtttttctccctgtgtgcggagatgagagattgtagaaataaagacacaagacaaagagataaaagacagctgggcccgggggaccactaccaccaagacgtggagactggtagcggccccgaatgccaggctgcgctgatatttattggatacaagacaaggggggcagggtaaggagtgtgagccatctcccatgataggtaaagtcacatgggtcacgtgtccactggacagggggcccttccctgtttggcagccgaggtggggagagagagagagaaagacagcttaggccattatttctgcatatcagagacttttagtactttcactaattttgctactgctatctaaaaggcagagccaggtgtacaggatggaacatgaaagcaggctaggaacatgaccactgaagcacagcatcacagggagatggttgggcctccggataactgcaggcgggcctgactgatgtcacgccctccacaagaggtggaggagtagaggcttctctaaactcccccggggaaagggagactccctttcccagtctgctaagtagtgggtgtttttccttggcactgacgctaccactagaccacggtccgcttggcaacggacatcttcccagacgctggcattaccgctagaccaaggagccctctagtggccctgtccgggcatgacagagggctcacactattgtcttctggtcacttctgagcatgtcccttcagctcctatctctgtatggcctggcttttcctaggttatgattgtagggcaaggattattataatattggaataaagaataattgctacaaactaatgatgaatggtattcatatataatcatgtttatgatctaggtctaggataactcttgttgttttatatattttattataccggaacagctcatgccctcggtctcttgcctcggcacctgggtggcctgctgcccacattggggtggctgtgctaatttcttaaagtgagacaatgatgaactttgtatcagttgactcttcctttcatgaaagatttctttgtagcatgcgatgctatttggtagcattttggccacaatagaacatctttcagaactggagtcaatcctcaaaccctgccgctgcttttatgtaagcttatgtaatatttattctaaatcctttgttgtcgtttcatcagtgttcacagcatcttcaccaggagtagattccatctcaagaagccactgttttgctcatccgtaagaagcaattccttatctgttttttgagattgcaacaattcagtcacatcgtcaggttccacttctaattctagttctcctgctatttccacatctgcagttacttccttcattgaagtcttgaatccctcagccattcatgagggttggaatcaacttcttttaaattcctgataatactgatattttgacctcttcccgtgaatcatgaatttttgtttgtttgtttttgagacagagtctcactctgtcacccaagttggagtgcagtggtgccattacagcttactgcaacatagcctcaacctcccaggctcaagcaatcctcccacctcagcgtcctgagcagctgggactacaggtgtgagccactacaccccactaattttttaatttttttgtagagataggatctcatttatgttgcccaggctagtctcacactcctgggctccactgattttccctcctcaccctcccaaagtgcatggtacccagcccgttaatgttcttaatggcatctagaatgataaatcctttccatcaggttttccgtttactttgcccagatgcatcaaagggatcactgtctatgcagctacaaccttgtaaatgtatttcttaaataataagacttgaaaattgaaattactacttgatccatgggctgtagaatggatgtgctgtggcaggcatgaagacaacattaatctctttgtacatctccatcagagcgcttgggtgaccaggtgctttttaatgagctgtaatatttgtttgttttttgagtttgtttttaaactttttttaattaaaaaaaatagtttttgagacagggttgtgctctcttgcccagactagagtgcagtggtgtgatcacagctcactgcagccttcacctcctggactcaagccatcctcccacttcagcctcctgagtagctaggactacaggcatgcaccgccatgctcggctacttttaaaaagaattttcttttctagaggtggggtcttgctatgttgcccaagctagtcttgaactcctggcctcaaatggtcctcctaccttggcctcccaaagtgctggcattgtaggtatgagccaccatgcccagctgcgtggtaatgttttgaaaggaatctttttttctgagcaataggtctcaacagtgggcttaaaatagtcagcaaaccacactgtaaacagatctgctgtcatccaggctttgtgttccatttgtagagcacaggcagagtaatttagcgtagttcttaagggccctaggatttaaaaaatggtaacccagcattggcttcagcttcaagtcatcagctccatgaggcactcacaagagagtcagcctgtcctttgaagttttgaagccaggcattgacttctcctctatagctgtgaaagtcctagatggcatcttcttccaatttaagactgtttcacctacactgaaaatttgttgtttatggtcgccaccttcattaagtatcttagctagatctcctggataacttactgcagcttctacatcagcacttgctgccccatcttgcactcctgtgttatggagatggtttctttccttgaaccttacaaaccaacctctgctagcttcacactttttttctgcagcttcctcacctctctcagccttcattgaattgaagagagttaggacgttgctctggattaggctttggcttaagggaatgttgtggctggtttggtcttctatctagaccactcagattttctccatagcagcaataagactgttttgcttccttattatttgtgtgttcactgaaataacacttctaattttcctcaggaacttttttttttttgcattctataaatgttcagagttctaaacctttaaaaggtttcaaatacatgtataaacacattctagaatgtcactctgactgttgcttcctttaacttcagtctcatctgctcctgggagggagagctccatctctgacgtagctggctctgttgggctttagcgccagcctgctccaccgagtggcgttttcaggaccactgcctctgggcagctcttccactctggctacggagcgtatgttgtagaaattttgatttctctccctgccaacctgggatagagtttgttcgaatttccccatgtgaggccttggggtaaccgtgcccattttgaggaggtgggggctggaagggaagaggaagtggagagagattggaaagaaagtataaagagtcccctttgctccagttcccagcaagttcctcatctccatctgagactacctcagcctggaccttattgtctatatcactatcaggcttttggtcaaagccattcaacaagtctctagaaagttccaagctttcccacattttcctgtcttcttctgaggcctccaaactgtgccagcctctgcctgttacccagttccaaagtcacttccacattttgggtaacttttcagcagcaccccactctactggtacttatttactgtattagtctgttttcatgctaccgataaagacatacccgagactgggcaaatagaggtttataatggacttacagttccatgtggctggggaagcctcacaatcatggcggaaggcgaaaggcacatctcacatgacggtagacaaaagaagagagcttgggcagggaaactcccctcttaattttattttctatttatttatttatttatttatttattttttgagatggattctcgctctgtctcccaggctggagtgcaatggcgtgatcttggctcactgcaacctcagcttcccaggttcaagcgattctccctccctctgcctcccaagtagctgggattacaggcacatgccaccgtgcctggctaatttttgtatttttagtagagacggggtttcctcatgttggccaggttggtttcgaactcctgacctcaggcgatctgcccgccttggcctcccaaagtgctgggattataagcatgagccacagaatctggcccaactcccctctttgaaaccatcagatctcatgagacttattcactgtcacgagaacagcacaggaaagacccacccctgtaattcagtcacctcccatgacatatgggaattgtgggagttacaattcaagatgagatttgggtgaggacacagccaaaccatatcagcatgataagtatgataaaccccagtgtcacaggagaagcaaatattgatgagtcctttgcctgaatcttttataatttctgtactatgctgaacagtctgtctcaacaaggtgtcttgttgacagactgtttcctaggtgcaagtcttgtcttctgtattaaagggtaaggcctgggacttgagggctttggccttttgtccttgttttttgagacagagtctcactctgtcgcacaggctgaagtgcagtgctgcgatctcagctcactgcaacctctgccgccggggttctagcagttctcctgcctcagcctcccaagtagctaggattacaggcgcctgccgccgcgcctggctaatttttgtagttttagtagagacggggtttcaccatcttggctaggctggtcttgaactcctgacctcgtgatccacctgcctcagcctcccaaagtgctgggattacaggtgtgagccactgtgcctggctggccttttgtccttttaaagtctcttggtggcctttgcactgagcatgccctgggcgtactgactgacctgtagcttgatcacctcattctttttttttcctacagcctcgtgcaagccgaatactggcatgaccccataaaggaggatgtgtatcgcaaccacagcatcttcttggcagatataaatcaggagcgggtaagcacccaaaccgggctcccatagatgtgcgttctttttcctgtttaggtcttcataaacaaatcagcagtgactgtttacccaaactgtcctgggcagacactaggaaagagaagttctgttttttttgggaggcagggcctttgagattcagttccctttagggaggttgaaattcatttgcctttcttcccttaagttctttccctctcctagtgttgaaacacacaggataagctcggcaggttgctgactgggcgaggtggaaattcacagctgctgtcttaatgagggaagctttcctgatggatcagtctgggggtggatttttctctagagatttacctaaaagagagatacagtaggcactgagtatgtcccagacacaaacatggtttggtaggttctggtaaactagatggctcagtttatatttgactcatctggagagtcttttggttttttgttttgaaacagtttgaagggaaaaacaaaccaaacaaaaaacaacacagaatagtatatagcagaacgacccagaatttgcagtttcttattttgtcttggctttctctgactagaagcctctcacctatgtgatggacacctatggagtgtggtgtaaactcatagttgtacctgtatgccatgctcagtggcatgtcagtcagataggatggtaagaaaagcctatagaaggccgggcgtggtggctcacgcctgtaatcccagcactttgggaggccgaggtgggcagatcacttgaggtcaggagttcgagaccagcctggccagcatagtgaaaccctgtctctactaaaaatacaaaattagctggatgtggtggcgatcacctgtaatcccagctactctggaggctgaggcaggagaatcgcttgaacctgggaggcagaggttacagtgagctgagatggtgccactgcactctggcctcggtgacagagcgagactccatctcaaaaaaaaaaaaaaaaaaaaaaggaaaagaaaaggctgtgtaagcaatcccgtgactgggtatatacccaaaggaaaacaaattgtcctgccaaaaagacacttgcactcgtgtttattgcagcactgttcaccatagcaaagacatgaaatcaacctaggtgcccatcagcggtagactggatagagaaaatgtggtacatatacaccatggaatattacacagtcataaaaaagaatgaaatcctgttctttgcagcaacatggatgcagctggaggccgttatcctaagcaaatgaacacagaaacagaagaccaaatatcacatgttctcacttataagtgggagctaaacattgggtacacgtgaatataaagatgggaacaatagacactggagactccaaaagctgggagggagaggctagggctgaaaaacttcctgttgggcactgtgttcactatctgggtgaaaggatcaacagaaccccaaacctcagcatcacacaatatacccttataacaaaactacacatgtacccccctgaatctaaaataaaatattttgttttttagaaaaaaagaaaaaaaaaagctgtacaggtatatcctggtcaggaagctggaaaacagcccatacccatggggaagaaacacagtggcacagggtcagggagaccagaaaacaggaaggctttactccctctgctggtgtctgatggtaatgaccttaggtgttgctggcctttctttcagggtatcaatgagtcctacaagaaaaacctgatggccctgaagaagtttgtgatggtgaaattcctcaatgattccattgtggaccctgtagattcggaggtgagacactacttaggccacatgccaggagagtaaatggcattaaaatagggctgctggccgggcacggtggctcatgcctgtaatcccagcactctgggaggccaaggcgggtggatcacctgaggtcaggagttcaagaccagcctggccaacttggtgaaaccccatcgctactcaaaatacaaaaagaaattagccgggtatggtgacagccatctgtaatcccagctgcttgggaagctgaggcaggagaattacttgaacccaggaggcagagcttgcagtgagccaagatcgtgccactgcaccccagcctgggtgacagagcgagactctgtctcaaaaagaacataaaatgaaattgaaatgaaatgaaaaaatacagctgcctgctggggaaaaaaccttcagtcccttccaccaacttttgtataaaacagttcttcacctgaggtccataaatgggacactgaagattgtaatcaatcccccaaccccaaaattctatgcaaaattatgtaattacattctctggggaaggatctataattttaatccattttccagagatcagagacccaaaaaatgttcagaatcactagcccaaaatatataaattcctaagcttggcctccaaggtctgccttgatctggcttcaccccattttccagcctaatctgccttgtctgcacgcttcatacactcttgatcaagccatattgtactacttgtgctttttctctcgtatgccttggttcatatatttctgtctctagaatgcccttccttggcttctccacctgacaatttctattcgtctgtcaaggcaaggatgccatccccattccaagcagaatgtgatcgcttttttagaatcatcagcctctgttaaaacactcatcacgttatgtcacaccaccagggattggccgattgtggcccacaggcccagtccatcctgctacccgttttggtgctacccacgagtaacaccaaacactaacataaaagaatgtttttaacattttttaatggttgggggaaagaattggacatataaagattatgtaaaatttatttagacatatcaagtatttggacatataaagattatgtaaaatttaaatttcagtgtccttattggaacagttttagttactttttacatactgtctgtggctgcatttgttacagtggcagcaatgagtagttacaaccatatggcccttaaagcctaaaatattttgtatctggcctttacaaaaacgtttgctgacctctgtactcaacagtgaattgtttccgtgccttgcaagactgggagctttttggaaacagattatgtattcatccttgaatgtctagagctcagcacaggaatttttcacatttattgcttaataattttaggaagcagaaattctggggaagtggaaagcggcctctcagaaagattaactcatccctcgggctccacccttaagaagagatgactcagacgcaccctatccatttttccttcttcctacagctttatgatgttcactttgttggcagttttagcttctaaccagtctcaaattattttggcagtatgtgctgtgtgtcatatctgagcttctttcctttgcttcttctgcagtggtttggattttacagaagtggccaagccaaggaaaccattcccttacaggagacctccctgtacacacaggtaactggcagggagtctatcttgggaggttggtgttttttcagctcccagttcctgaagctgctatgttctttggtgctggagccctttcctttacacctcagagcactaggtactcctgaaacacctgactcatgtccaatatgggtgaagcttgttaggctcttgattatgtgctctagcttattaggcactgggttacaaaaatccactacatcctgaaaccttatggtttccaaacaacaagagaaacctcatgtctgattcccttcttttgataaaaaggttttaaaactagctgccttggctgaggtacagtctgctacaaatccaggaagcctccatgcatgatgaggggcattcctttttttttctttgagacggggtctcgctctgtcacccaggctggagtgcagtggagcaatcttggctcactgcaacccctgcctcccagattcaagcaattctcctgcctcagcccccttagtagctgggattacaggtgtgtgccatcacacctggctaatttttgtatttttaggagagatggagtttcaccatgttggccaggctggtcttgaactcctgacctcaggtgatccacccacctcagcctcccaaagtgctgggattacaggcgtgagccagtgcgcctggccaagggacattacttttaaacattaatagatgtgaaatcctgtttctaaattacgcactgacaagggaggctcctgcaggaggttgagtgggactagagttttgaattttgtttagcagtaggtcctgtatcttaagcagaagttgcagtaatttgccacctccagttctggggccttctacactttaaggatttttttttttttttttttttttttttttttttgagacagtcttgctttgtcacccaggctggagtgcaatggtgtgatctcagctcactgcagcctccacctcctgggttcaagcgattatcctgcctcagcctcactagtagctgggattacaggcacacgccaccatgcctaatactttgttttgttagtagagacggggtttcaccatgttggccaggctggtcttcaactcctgacctcaggtgatccacctgcctcagccttcaagagtgctgggattacaggtgtgagccaccacgcccagccctaaggattttatattggagacagactctccaaaatgctaagtactacatctgaaccaatcaccgtctactagaattcctccatgttatttcagaggtcatttgtctcctcttggcttggcttttcttttgcactgggtgcctcaacttgggtggtgaggtaaaaagggaagctagaatctgatttgagaaaaaaaaaaaaaaaggcttgagaaattacagctaagaacttccttactgtgaaaactcaaaatgatgttggccacggcagaagcaccattctggcactgtcgtaactgcttatcttcccaaccagaggttgttctccagcatctaggctatgggtaatgacattttcaactccagaatatgaaagtgtccagggtttgttacctaacggttggatatggtttttctgttttgttcttttgagacagttttgctcattgcccaggctggagtgcaatggcatgatctcagctcactgcaacctccgcctcccgggttcaagcgaattctcctgtctcagcctcccaagtagctaggattacaggtgcccgccaccatgcccagctaatttttgtatttttagtagagacaaagtgtcatcatattggtcaggctggtcttgaactcctgaccacaggtgatccgcctgccttggccatccaaagtgctgggattataggcgtgagccaccgcgcctgtcctgggttggatgttttttaagttacctagctaatgttctgtctttggctcagtcccacttacctatggcattctgaggcagtgtcgtctatggcttgcccacctataggtagtcctctgactctgagcttttcaaaaatcagaatctagaacactgtatagagcaatctcaattgcatatctatttttaatacttagaaaaaactggccgggtgtggtggctcacgcctgtaatcccagcactttgggaggccgaggcacgtggatcacctgaggtcaggagatcaagaccatcctagctaacacagtgaaaccccatctctactaaaaatacaagaaattacccaggcatggtggcatgcgcctgtaattccagctactcatgaggcagaggcaggagaatcgcttgagccagagaagtggaggttgcagtgagccgagatcgcaccactgcactccagcctaagcaaccgagcaagactccgtcttgaaagaaagaaagagaaagagagacagagagagagagaggaagaagaagaagaagcgggggggacaggaggagggggaggagagaagaaagaaaagaaaggaagaaagagaaagaaagaaaaagaaaaaagagaaagaaaaagaagtaggagatattctttttggcatttttgaaaatacacctcaattttaatactcaggacaaactgcattttgaaaatatatctcaagttaacgtacttaccattttactccaaaacttcattaagctttttaattaattatggcctttccttctgcaggaccgcctggggctaaaggaaatggacaatgcaggacagctagtgtttctggctacagaaggggaccatcttcagttgtctgaagaatggttttatgcccacatcataccattccttggatgaaacccgtatagttcacaatagagctcagggagcccctaactcttccaaaccacatgggagacagtttccttcatgcccaagcctgagctcagatccagcttgcaactaatccttctatcatctaacatgccctacttggaaagatctaagatctgaatcttatcctttgccatcttctgttaccatatggtgttgaatgcaagtttaattaccatggagattgttttacaaacttttgatgtggtcaagttcagttttagaaaagggagtctgttccagatcagtgccagaactgtgcccaggcccaaaggagacaactaactaaagtagtgagatagattctaagggcaaacatttttccaagtcttgccatatttcaagcaaagaggtgcccaggcctgaggtactcacataaatgctttgttttgctggtgatttaaccagtgcttggaaaaatcttgcttggctatttctgcatcatttcttaaggctgccttcctctctcagtacgttgccctctgtgctatcatcttatcatcaattattagacaaatcccactggcctacagtcttgcttctgcagcacccactttgtctcctcaggtagtgatgaattagttgctgtcacaaaaggagggaagtagcacccaaattaagttgcttaagagaggaaatgtacatcttgtataacttagggagcgaagaaaatgtaggcgcgaaagtgaaaagtgaggcagctagttcttcctattccattctcgaccaacctgccctttcttaatatgactagtggtcttgatgctagagtcaacttactctgttgctggctttagcagagaataggaggaaccatatgaaaaagatcaggctttctgacttccatccccaaaacacatttaccagcatactccaaactgtttctgatgtgttccatgagaaaaggattgtttgctcaaaaagcttggaaaatactacacactccctttctccttctggagatcaacccacattagagtgtctaaggactcctgagaattcctgttacagtaaacaaaactaacgtaatctaccatttcctacactatttgagcatggaaatcatagtccccactctgtgaaaacttaacgctttttggaagacatttctgtagcatgtcagtttggagaaatgatgagctacgccttgatgaaagaaccgtgttggtgctgctaagtttagccattatggtttttcctttctctctcttaagccttattcttcaactaaaagatgaggattaagagcaagaagttgggggggatgtgaaaataattttatgaggttgtctaaaataaagagtagtttcttat

SEQ ID NO: 10 - DNA, 27948 bp, Homo sapiens
  source 1..27948: mol_type = other DNA
cgcttgcgcgcgggatttaaactgcggcggtttacgcggcgttaagacttcgtagggttagcgaaattgaggtttcttggtattgcgcgtttctcttccttgctgactctccgaatggccatggactcgtcgcttcaggcccgcctgtttcccggtctcgctatcaagatccaacgcagtaatggtgaggagcggggtccctaggtcaaggggactcgtgagcggtgagacgactgaaattactgcccgtccccggacacacagatgggctttcactctctttctctccctccctccttttcacacgcactcactccgggtctctgcactggcagtcattcttgcctacacaggggtgagagtccctgcgctgtacgtggtccctttcgcagtcctctgggagtgggcggaccttctccaaggctggtagacctcccagggaagttgggacttctaaattcacttcccttccaaaattctcccctgaaaatgccctgctcttatggggacctcggtctcctggcccctttactctcgaataaatattgcgcagttgcggtatgtcaggtaaacgggacagacaagaaccctgcgcttgaggagcttgtagtcgttctctcttttgcttaagcaggtaccgcagttctggcaggtctgatacccgtgtcattagggaaatggacagatatgaccgccagaaatgagttaggaaaaccccaaaagggccagatcctcaatgctatgttgaggaaaagttcatctaagggttgtggggaatcctgtgctcaaacataccttttgtatgttctcttttgtaggctctatctctctttttttgtaggctctcttgagtaggggtgaatccttatcccatgcagctcagtttaaaaacctgtccccagcccacctcactgtggatattctaaaggtgaagcccaggagatttatttgtttctcttagttttttttttttttttttttaaggtagctgcctgttccttcaggttaactccactttgggaatctctgtggaatcctaaaagtgaagctctcaggaaagagatgggtaactctggttttttcatactttataggtttaattcacagtgccaatgtaaggactgtgaacttggagaaatcctgtgtttcagtggaatgggcagaaggaggtgccacaaagggcaaagaggtaggttctatgagaattcctctaccacatttaatgtcttcctacataaaggatctgtgcagaagtggaatctgtgagagcctagtttctgatgctgtgctcttctcactcacgcctgtaatcccagaactttgggaggctgagacgggcagatcacctgatgtcaggagttcgagaccatcctggccaacatggcgaaacctgtctctactgaaaatacaaaaattagccagtcgtggtagtgcatgcctgtaatcccaactacttgggagcctgaggcaggagaactgcttgaacctgggaggcggaggttgcagtgagccgaaactgtgccgctgcactccagcctgggtgacagtgagaatctgtctcaaaaaaaaaaaaaaaaaaaaattggctgggtgcggtggctcttgcctctaatcccgacactttgagaggcctggtctggaggattgcttgagctcaggagttcgagaccagcctgggaaaaatgttgagaccttgtctctacaaaaaaattaaaaattatcagggtgtggtggctcacgcctgtggttccagctactcgggaagctgaggtgggaggattgatttagcctgggaggttgaggctgcactgaaccatgatcgagccactgcactctggcctgggcgacagagtgagacctttcctcaaaaaataaaaatggtcttcttggctgggcacagtggctcacatgtataatcccagcactttgggaggccgaggtgggcagatcgctttgagctcagcagttcaagaccaggctgggcaacatgacaaaacctcatttctacaaaaaatacaaaaaacattagccgggcatggtggtgcatgcctgtggtcccagctgctctggaggctgaggctggagaattgctggagtctgggaaagcacaggtttcagtgagctgaaattgcaccactgctctccagcctcctgggcaacagaatgaggacttgtctcaaaaaaaaaaaaaaaaaaaaaaagaatggtccccttccagatgcattgggattttatttagtcaggtccattctaaattgaagcaatcaataattttctgggttttttttgtttgtttgtttgtttgttttgagacagagtctcactctgtcacccaggctggagtgcagtggcgagatctcagctcactgcaagctccgcctcccgggttcacgtcattctcctgcctcagcctcccgagtaactggtactacaggtgcccgccactacgcccggctaattttttgtatttttagtagagatggggtttcactgtgttagccgggatggtctcgatctcctgacctcgtgatccgcctgcctctgcctcccaaagtgctgggattacaggcgtgagccaccatgcccggctctggtatgtttgtagaaagcaaactgcagccaggcgcagtggctcatgcctgtaatcccagcactttgggaggccgaggtgggcggatcacttgagatcaggagtttgagaccagcctggccaacatagcgaaacccccatctctactaaaaatacaaaaattagctgggtgtggtggcacgggcctgtaatcccagctacttgggaagctggggcaggaggatcacatgaacctgggaggcagaggttgcagtgagctgagatcatgccactgcactccagcctgggcaacagagtgaaacttcgtctcaaaaaaaaaaaaaaaaaaacaaactgcacagaattttaggttttagaaaactttgcttgcccaagctaggttctgcatgcacactacctgtgatatcagtttggtgaatgaaatcaataacctggttgaggagacaaaaagacgtttctgaatcaccaactaaccaactaacagaagacaacttgtgatgaatggcacagatgagcattgctagagcagctcagaggtggaaacttgctgagaatgggctgggcttagagggtggagtgtgaaggcttagctgaagcagcaagatggcacacatggggaccatgaagaagctggccacgagcagtgcagggcccaggatgcttggcagccgcaaaacagctgaaaaaggagacaaaggtcttcatgtctggcactgagctggttaggttttcttctgtaggcagtggggaaccttggaaggattttgaggagagcactgtgactaagacatttctgttctagtggcattgtggtgtagtgaaaaggtcactgggctaggagtatgaaaacctggattctagtctggctctgccactgctttgtgttctcaggcatgtttctgcccctcttcgaagtttagtttcctcatctataaagtgaggatgataataatgtctacctcacagggttgttgtgaggatttactcagcacattttttggactgcttccaaaatgctagacacttattgggtgctagggatacagaggtgaaggagacagactcttggactctcttccatggagcttaataaaataatacatgtagctgggcacagtacctgtaatctcagcactttgggaggctgaggcaggaggacctcttgaggccaggagtttgagtccatcctgggcaaatacagcaagacctcatctctactaaaaataaaaaacaattagccagtcatagtggcttgcgcctgtggtcccagctactccagaggctaaggcaggaggattgcttgagcccaggagttcagggctacagtgagccactacactccagcctgggtgacagagtgagaccctgtctcaaaaacaaataaataaaaaagataaaacatgtaaaaagcttgcttagcatagtacgtatagtagagatatttaggtggtatatttgagaaataaaaggattgaatactttccattatctgcccctaaagaattaagaggttcctaaaattcctttcaaccagctattatcagtcttttgtgatttgtttttgttgcttgtttagaaatatatcccttgttttacctcagatcaaatactgcttttggaataagatccgaacttcttagtggggcattcagagccttttcaagctctggtttttttttttgtttgtttgtttgttttttgagacaaagtctcactctatcgccaggctggagtgcagtggcacgatctccctcagtgagccgatttcggctcactacaacctccatgccccaggttcaagcaattctcctcactcagtctcccaagtagctgggattacaggcacctgccaccacacccagctaatttttgtatttttagtagagacagggtttccccatgttgaccaggctggtctcaaactcctgacctcaagtgatctggccatcttggcctcctaaagtgctgggattacaggcatgagccaccacatgtggctcaagctctgattctaatcaccctttttctttgtaccacatactcttcttccacatatcctatgccctggcaaatgaggcagtttactgctctgtgactgcctaattccctgctgcctttacactcttattcctttctcctgggatgttcaccctgaattatcaacatgagaatcagttgattgtcagagcaaggcttaaaactctggttttcgcgggtcgtggtggctcacacttgtaatcccagcactctgggaagctgaagcgggcggatcatgaggtcaggagttcaagaccagcctggccaatatagtgaacctgcatctctactaaaaatccaaaaacttagccggatgtggtggtgcgcacctgtagtcccagctactcaggaggctgaggcggaagaatcgcttgaacccgggaggtggaggttgcagcgagctgagatcgcgccattgcactccagcagcctgggcgacagagtgagattccgtctaaaaaaggccgggcgtggtggctcatgcctgtaatcccagcactttgggaggctgaggtggacggatcacctgaggtcaggagctcaagaccagcctggccaacgtggtaaaaccctgtctctactaaaaatacaaaattagctggacatggtggcgcatgcctgtaatctcagctactcaggaggctgaggcaggagaatcacttgaacctgggaggcggaggttccagtgagccgagatcatgccactgcactccagcctgggcaccaagagtgaaactccatctcaaaaaaaaaaaaaaacctctggttttctttgttgtttatgctctctgtagtttaggggttagaaatgggggaggtatgtaccaagagtctgtggctgtcccagaagtgtggatagaagtgtgattactgaagtgcttgccagcttttgcatttagtgattctatcctcctttttttttttttatttaaatctcattctgctttgatttcctttgtacatatgacttataatccccattagaaattgagctcatggtggcaggggttgtatatgtcttttttttttttttttttttttttttgagacagtgtttcgctcttgttgcccaggctggagtgtgatggcgctatcttggcttactgcaacctccgcctcccgggttcaagcgattcttctgcctcagcctcccgagtagctgagattacaggcatgcatcacacctggctaattttttatttttagtagagacggggtttttccatgttggtcaggctggtcttgaactcccgacctcaggtgatctgcctgtctcagcctcccaaagtgctgggattacagacgtgagccaccacgcccggcctatatatgtcttaattcatctttgactaccttccccctgtaggctgctgtcttcgtggtgcctaacaaatgtttgaataggcagcaaataactgcagatttcttttttctttttcttttttttttgagacggagtctcgctgtgtcgcccaggctggagtgcagtggcgggatctcggctcactgcaagctccgcctcctgggttcacgccattctcctgcctcaggctcctgagtagctgggattacaggtgcacgctgccacacccagccaactttttgtattttagtagagacaggggtttcaccgtgttgcccaggctggccttgaactcctgaggtcaggtaatccgcccacctcggcctcccaaagtgctggggttacaggcgtgagccaccgcacccagtcctgcaggtttcatctctaggcagtaaagccctcaccctagagtacatgcttcagctctgtcacattttgaaatacaaagttgggacaaatttaatatgtctgaacctgttgtaaagctatcctggtgaagtttgagttgttcctggagaattgcaggactctgatgatgtaaacttagaattgtgacctcattgcaggcatcaacaggaaataggtaaggcatgggcaggaagccgtaactggggaagtttctgggcccagaagaaaatgtaggtagtcttagggttaggtagcagctgtcaggaacttgcccctgcccataagatcctaaagggcccccatttgactctcaccagacagttagaacttgtttcctcctccgtgtcagccatcaagaggtgcttggggggctgtgcccagcaggacctcactgcccagcagatcagcaggggagccaagtggcctagatctgctgtggagtacccgactgtttgcctgcctgtctgccctcctcttcacctcattctcatcactgacgtctaccattggcttggaaatcagaaacccatatccatctagatggtaaaccattattaaggagtaactatttgttttatagctattcatacttagtggaacttaaagttggtaaagtttgaatttaggggtacccctgtctatagaaatttaattttttctatgttgtttttttgtttgtttgtttgttttttgttttttgagacagagtcttgctctgttgcccaggctggagggcagtggctcaatctcagctcaatgcaacctccgcctcctggattccagcaattctcccgcctcagcctcgggggggccaggcacagtggctcacacctgtaatcccagcactttaggaggccgaggtggggagatcacctgaggccaggagtttgagaccatcctggccaacatggtgaaaccctgtctctactggaaatacaaaaattagctgggcgtggtggcgcatgcctgtagtcccagctactcaggaggctgaggcaggagaattgcttggacccaggaggcagaggttgcattgaaccaagatcgcaccactgccctccagcctgggcgacagagcgatactctgtctcaaaaaaaaaaaaaaagaaaaaatgtatttggattgaacaatgttgtttcattgaaacttttacttgctccttgcagattgattttgatgatgtggctgcaataaacccagaactcttacagcttcttcccttacatccgaaggacaatctgcccttgcaggaaaatgtaacaatccaggtaggtgcctgtcatctggctgcagccagtgcgccagagaattcactttgcttattgactctttgctgattgattgtctggcattttagcatagtacatgggcccaggatgggcccttgagaattgataagagccatatattgtgacaatttgatttgtttttcagaaacaaaaacggagatccgtcaactccaaaattcctgctccaaaagaaagtaagtggatttctactagcttactatcatggaatttgtgtcaggaattatgtttctaggactcagagttgtggaagctcctcttttgcaggtggtttctatgtgggttgagtcctgcctgtgttccaagcatctttctctatgagaaagaatccaatctacagctatcaggccaacctttaagagacctggtgcatttaggaaatttgctgcctggcctagaaaccttttctgtagaatccagagcctgatgctgaggagagtaggaatcagccattggtaggccttttttcttccctcggggctcagccccctcagtggaacagtatgccttggaaagagattttgaaaatgggagacactaggcctgtgggttgtttagaagtacagttggtggcgctatagagagggatggctggggctggagagaataacagcattgcctcgtggtctaggaggttgggagtctctctgcagaagtagtctgtgaaaacctactttgacaacatgatagactgtgactctagggggtaagcttcccaaaagatccagcttaaagccagttgtaccttgaaggctggtgacctgcacagctctccaggtctaggggtcatcattgccctgaaatgattcagctacctcagggactcacagaatacttggctggagcttcaggttctgggggccctgagtggaaggtggtgccattgcaagcttgggcctgactattgtggtgctggccctttcttgctgggtgtaccgtaaggtcatgcaggagagttgggactcgcagcagtcccattccgtgttcatgtcctcaaaggatattgccccagctttgttttgttttgtttttcaaaggcagggtctcacttggttgtccatgctggaataccatgatatgatcgtagctcactgtagccttgaactcttgggctcaggcaatcctcccacctcagcctcccatgtagctgggactacaggtgtgccccatcacacctggctaattttttttttttttttttttgtagagacaaggtctcactatgttgcctgggctggtctcaaactcctggcctcaagtgatcctcctgcttcagcctcctaaagtgctaggattgcaggcgcgagccaccatgcccagccaatagctttttttctttaggatggagtctcgctttgttgcctaagctggtcttgaactcctagcttcaagcagtcctcctgcctcagcctcccaaagtgctgggactacaggcacacaccaccatgcccagctacacagctcattttaatggaaaaaaaaatctttaaggccctgagcagtagctcatgcctgtaatcccagcactttgaggggccaaggtgggcagatcacctgaggtcaggagttccaagccagcctggtcaacatggtgaaaccctgtctctattcaaaatacaaaaaactggccgggtgtggtggctcacacctgtaatcccagcattttaggaggccaaggcgggtggatcacctgaggtcaggagttcaagactagcctggccaacatggtgaaacccctgtctctactaaaaatacaaaaattagccaggcgtggtggtgggtgcctgtaatcccagctactcaggaagctgaggcaggagaatcgtttgagcccgggggggcagaggttgcagtgagccgagatcatgccactgtactccagcctgggtgacagagtgagactcggtctcaaaaaaacaaagaaaaaaaattacagatcatttggggctagatgtgatggctcacacctgtaagcccagtgctttgggatgttgaggcaggaagatggcttgaacctaggagtttgagaccagcctgggcaatatagcaagactcagtcttattataaaaataaaaaataaaataaaatcattagggaaataggacgattgtaaaaattcaaaacatggattatatatagccatcagcctgaacttataatactcagaaactgggtagaagttggttttggcagaggttgcagtgagccaagatcatgccactgcactccagcctgggtggcagtgtgagactctgtctctcaaaaaagatgggctgggcacggtggttcacacctgtaatcccagcactttgggaggccgaggcgggtggatcacaaggtcaagagattgagaccatgctggccaacatggtgaaaccccgtctgtactaaaaaaaaaatacaaaaattagctgggtctggtggtgcacacctgtagttccagctacttgggaggctgaggcaggagaattgcttgaacccaggaggtggaggttgcagtgagccgagatcgcgccactgcacaccagcctgggcaacaagagcgaaactcctcaaaaaaaaaaaaaaaaaaaagattcataatactttttctcaaggacttagattaggtctctctctctccagaaatgttttcaggatagctataggttcctgtacttactcaagacagccgctctttgtgggagatatccttgccctcaggagctcctagatttgcacaatgtggacaaagaggttttggggttactggtacttggtctttctaatttttcctttctaaggaatatgggaagttggcgagcccctttcctggtagctgggacctatttcaccttgtacagaaacttggaggtttgcccctgaccaccctcgagatcgtgcagcactgactggctactgctctcggttctccaggtcttcgaagccgctccactcgcatgtccactgtctcagagcttcgcatcacggctcaggagaatgacatggaggtggagctgcctgcagctgcaaactcccgcaagcagttttcagttcctcgtgagtaacgaatgtgcccccaaccaccatgtttgaggccctggagcacattgcttggtccctgtgctagaatatcctgagattcatccattcccccagcttcagaactggtctgctcctgccctaccaacacggctttcttatttggaaatcatctcttttttaaaaaaacttaattgaaacattacacacacataaacacagacatgaacacatagcattgagtatttagttctgtgaatttttgtaaactgaacacacttatgtaactaacatgatcagagcattaccagtacttcaaatcgcctgagttcaagccctgtttgtcacatgggggcatgttttcctgtggccatggaatcagtcttttggaagaggtgaaagactaggcagaagccctctgagatagttgaggagtctaaggtctaagtacacagagcattgagtatatagttcagtgaattttcataaacagaacacactcatgtaactaacatgatcagagcattaacagaacttcaaaagtccctgttgggcatatttgcagctcctaattcccccaagggtacccataatcctgacttctaatagcattaattagctttttttctttctgtattttattatttatttatttatttatttattgagacagagtctcactcttgtcacccaggctggagtgcaatggcgtggtcttggcttactgcaacttccgcctcctaggttcaaccagttctcccacctcagcctcctgggtagctgggattacaggcatgtgccaccacgcccggctaatttttgtatttttagtaggggtggggtatcgccatgttggccaggctggtcttgaactcctggcctcaagtgatccgcccacctcggcttcccaaagttctgggattacaggcgtgagccacctcgcccagccctctttttgtacttttttttttttttttttgagacggaattttgctcttgttgcccaggctggagggcaatgacgctatcttggctaacctcaatctctgcctcccgggttcaattgattcttctgcctcagcctcccgagtaggtgagattacaggcatgtgctaccatgccaggctaattttgtctttttagtagagatggggtttctccatgttggtcaggctggtctcgaactcctgacctcatgtgatctgcccgccttggcctctcaaaagttctgggattacaggcgtgagctactgcacccggccctctttttataccttttttttttttttttttgagatggagtctcgctgtgtcgcccaggctggagtgctgtggtgtgatctcagctcactgcaacctctgcctcccctgttcaagccattctcttggctcagcctcccgagtagctaggactacaggtgcacaccaccacacctggctaatttttgtatttttagtagagacagggtttcaccatattggccaggctgatctcaaactcctgacctcgtgatccacccacctcggcctcccaaggtcctgggattacaggcttgagccactgcgcccggcctatattaaattgaatttttttttttttttttttttttgagacagagtctcgctctgtcgcccaggctggagtgcagtgctgcgatctcggctcactgcaagctctgcctcccgggttcatgccattctccctcagcctgcaagtagctgggactacagccgcctgccaccgcgcccggctaattttttgtatttttagtagagacggggtttcactctgttagccaggatggtctcgatctcctgacttcgtgatccgcccgcctcggcctcccaaagtgctgggattacaggcgtgagccaccgtgcccggctataaattgaattttaagattttttaagtgagtcagatgaggtgtggaaaattagtaaatataaataaaaatttgtaatgtgaattatttgtcagtctttaatagattatataaattagatgcaaattgtgtaagacacacaaccattatactttacatatatcaaattcagctctaatacgatgaaggtaaatgaatgggtcatgaccacgtatgggaagtaatgaggtgttgtggattggacctttctgtattgaatcaatctggttagttattgccccagttccctgtcaccctagattttcagtctttgctcctgttaaccacctgggttcctgaggcttgagagaagtcagaaaggcctggcttttctccctaagaccagacctggcctggcctgagaacccatgcttgggtgaagtctaaagagttcacgctctcagaggcttttcccttcatgtcaaagcccatactgaactgttcacataccctttaagatattttgaccccaggagccagcccttgcagaaagggtgagagtgtgggctgaggtgaagggaaaagcacaagctctgcacatactgtaagccttaccgagcaggcaggtcgctctcccggcccataaccagggccatgggctcaggtgagatgcctgtggtatacttgcctgcttctccagtgactcttgttcccctacagctgcccccactaggccttcctgccctgcagtggctgaaataccattgaggatggtcagcgaggagatggaagagcaagtccattccatccgaggcagctcttctgcaaaccctgtgaactcaggtagacacactgagctgtctgctgttctgcttctagtgaggcacagatagtttacatcctgtcctaaacctggcctaccttggcacctgagttcaagccctgtttgtcacgtgggggcatgttttcctctggccatggaatcagtctttcattatcaagacaaaacaagaactgtttcacttctgtggttgttgagaaagtagccaagatgcataggaagagcttgggttagaactggagtgcagttatcactatttgacttcatattggccaggccactactttgtggacttgtccatcccgagagtcacatctattacttctttttgcatatagtgatttaagagtaaggatctagagaaggcctctccctgggaaaggcccagtactcagtaaatagccagagaagagtaggctggcttaaactggtaacagagtgggcttcctttttttttcttttttttttatgttttcatagttcggaggaaatcatgtcttgtgaaggaagtggaaaaaatgaagaacaagcgagaagagaagaaggcccagaactctgaaatgagaatgaagagagctcaggtacctttcttgggagactagggtaagggtttttggacaggtgtccttaaccgaaactctacgggcaacagagatacagttgggccccagcatttctgaggctccagttcttgaggccccaattctttttttttttttttttttttttttttgctctgttgccctggctggagtgcagtggtgtgatctcggctcactgcaacctccacctctgggttcaagtgattcttgggcctcagcctcccaagtagctgggattacaggcatgtgccgctaattttttgtatttttagtagagacagagtttcgctattttgcccaggctggtctggaatgcttggccttccaaagtgctgggattgtaggcatgagctgttgcgcctggcctctgacgctccaattctgatatccaggaaatttaactggtttatcaggattcagagaacaaataattcagaaatgtttctgaaggccctcagatgaggaacatttcatgctgactgtctagtaagcaagcccatcacatgctcacatggcgtgatggccagaggggctgcagggcacaattggtctgctctctcctatcctcccccaagttgtacgtatttggagggcagggactgcagtacagtccccttatttgggttcattgcttctgggaagcccgatctgctgtgcctcctaaaatgtggaactggccctagttccagttcctagcgtgctttggcgtatgcttaggcccctctgccaatctcttccccagtgctttgtacctggcttctcaacccagagccagggcagggactttgacaactatgaagggtggtgagcaaagagctgttgctgctgccgcataggggtctgagagcacttatatcttaacagtctgccctttttcactctcgtctcaaaccaggagtatgacagtagttttccaaactgggaatttgcccgaatgattaaagaatttcgggctactttggaatgtcatccacttactatgactgatcctgtaagtacatccaaagaacttctctttcttaagtgtacaattgagagacagaaaacttctctttacaggaatgagggcatgcaggaatctttactcacctttgagggttttattattatttttttttgagatggggtctcactctgtcacccaggctggagtgcagtggtacgatcttggatcactgcaacctccacttccctgggcttgagtgatcctccccacctcatcctcccaggtagctgggaccatagatgcattccaccgcaccctactgattttttgtatttttggtagagacagggtttcaccatgttgcccaggccaatctggaacttctgggttcaaggaatccgcctaccttgacttcccaaagtgctgggattacaggtgtaagctactgtgcctggctgaggttattttattttacttttttttgagacagagtctcgctctgtcgcccaggctggagtgcaatggcatggtcttggctcactgcagcctccacctcccaggtttaagtgattctcctgcctcagcctccccagtagctgggattacaggcatgtgccaccacgcctaggtaatttttgtatttttagtagagatggggttttaccatgttggtcaggctggtgtcgaactcctgacctcgtgatctgcccacctcagcctcccaaagtgctgggattacaggcgtgagccaccatgcccagccgaggttattttttaatatcctttggtgggctgaagctagtgaggcccacatggggaggggtctgatctttataaactgggttccacccccataccataggttggctagattcctgcattagtaaaaatcatgaaagtagtgctgaaactcttgtaggcagcagagtgagaaaaatgggaacaaaatccagtgctcccttcttgtgctctggagtatctaatggaggatgcaggggtcctagtgttagatcttggcctctgactgggccagacatgggattggaaggggtgggagttctggacaagctcgcttttgaaattgctctgaccctttgctgttggttgcctcctctcatccgcttgcagatcgaagagcacagaatatgtgtctgtgttaggaaacgcccactgaataagcaaggtaagtcctgttcagtcaggaagaggcttcagactgactaatgggccttctgtttccagggagcaccccctgaaatactctccttctgcagaattggccaagaaagaaattgatgtgatttccattcctagcaagtgtctcctcttggtacatgaacccaagttgaaagtggacttaacaaagtatctggagaaccaagcattctgctttgactttgcatttgatgaaacagcttcgaatgaagttgtctacaggttagtcccttgcatccatttttccctccttgtgcccttccatcccctttttttgtgggacatcgtggtaacactactcacagacgtgctgaattctgaggctcttcctcgcttcttgtgttttctttgggtcacaccctttggcagcttagtggcccatccttgagtggatactgaatgaggtatcacccgttacgtgctgaggcagggctggccaggctccaggggttcttctgtgccttatgcagccacaccattgcccactggggttcacagatttggggaactccagatctgctctatctgctttttttttttttttttttttttttgagacggagttttgctcttgttgcccagactggaatgcaggggcacaatctcggctcactgcaacctccgcctcccaggttccagcgattctcttgcctcagcctcccacatagctgggattacaggcgcctgccatcacacctggctaattttgtatttttagtagaaacagggtttcgccctgttggtcaggctggtctcaaactcctgacctcaggtgatccgctcgccttggcctcccaaagtgctgggattaaaggtgtgagccactgcacctggccccagatctgctctttctaatacagcacccagtaccctcatagggatatttacttattttatttttatttatttatttgttttttgagacagagtctcagtcagttgcccaggctggagtgcagtggcgagatctcagctcactgcaacccccgcctcccaggttcaagcaattctcctgccccagcctctcaagtagctgggattacgggcacgtgccaccacacctggctaattttttgtatttttattagagacagtttcaccatgttggtcaggctggtctcaaactcctgagttcaggtgatccacacacttcggcctcccaaagtgctgggattacaggcgtgagccactgtgcccagccagtagtgtctcttctgctggaagctggatgctgagcttaggcttttatgctgtgtctccagggtcagaggaaaggtcagatggcttagagtatgggccatcagcttgcttctggttagtcggcccagtgatcccccaacacccatcccactgccagtttgctaggagtatttcagatttgtaaagtggggttggggtcaggtgggaccactgaggcaggagaggagtgctattcttagaaggaggaatcgaccctagaactctgcagtggaagggtggcaggacatgttccagggagcacagtttgggaacagatacaaatactctacccctcttctaggttcacagcaaggccactggtacagacaatctttgaaggtggaaaagcaacttgttttgcatatggccagacaggaagtggcaagacacatgtgagtattgaggcctggcggggaaagagcctttcccttgtgcacccctggctccctataaagggagacaatgagtttgttgagaaaggccccttgttacagatgccccatcaccagatagccttgccatgtcagatgcagggaggggctttaggtccagccttctggctttgttgtggcccactgtagtgaaggagccagtagtgctctgctctaggccaacagcccttttccatggtcttctaccccttccctttgcagactatgggcggagacctctctgggaaagcccagaatgcatccaaagggatctatgccatggcctgtaagtactgtgtactgctgcttcagggttgggcacagaaaggcaggttgtttgcttagcaaagttctctccctcagcccgggacgtcttcctcctgaagaatcaaccctgctaccggaagttgggcctggaagtctatgtgacattcttcgagatctacaatgggaaggtagctggcaggaagccccttgtttacactgttggggcccagcactttttaaaaccttgaagctggctagaagttgaggccaaaaacctattagctgattagctgtcaagccactgatgggccattctgccctggcatacacatgtaggtggtttaatctgatggtgagatggcacctaagttcaagaagtatggcaagaatactcctcagggcgccctttcaggtgcaaggtttgcctgtgtgtgtcctgacctccctcggccgacctccttcatcccttcttccccgattgtgcacgttcagtctcatattcattctttccctgcccgcaccaccatatatctcttccacccctctctctattcactgtgtgcttctgcagagttgctttccttagagtgggatctagataataaaaatagctaatatttatcattaataagatattaggggccaggcgtgatggctcacacctgtaatcccagcactttgggaggccgaggcgggcaggtcacctgaggtcaggagtttgagaccagcctggctaacatggtgaaaccccatctctactaaaaacacaaaaaattagctgggcatggttaggggcacctgtaatcccagctactcgggagtctgaggcaggagaatcgcttgaatccaggaggcagaggttgcagtgagccgtgatcgcaccattgcactccagcctgggcgatacgagcgaaactccgtctcaaaataataataataataagatattaggagctatgcactattctaagcactacctgtctcacctttacagatgagatgcaaggctagagtggttattaacttgcccaggctcacacagctagtaagttaccagagtcacagcaaactgaggcagttcggctcagatcccaagtatattgacctctgctaggctgacatccatcagttcgtattctctgcctttcctgctgctggctcttgtccgagctgggcaggctagtaggaggaagcagtcgggtggggtgccgggtgcccagtggccttagcctcattccccctgcctggcacagctgtttgacctgctcaacaagaaggccaagctgcgcgtgctggaggacggcaagcaacaggtgcaagtggtggggctgcaggagcatctggttaactctgctgatgatgtcatcaagatgatcgacatgggcagcgcctgcaggtgagagtcctggtgaggggaaggagcgaccttctcatgtctggtttatgagtaaagtctagctctgagcacatttctgtttacccagagtgctgctttgcccagtttggtaagggctgcgaaggcctctgctttacggggtctcaataagacatatgaccccagggccagaggcttatcagaaccaagtcaggtcaggcacagtggctcacacctataatctcagcagtttgggaaaatgaagcaggaggatcacttcaggccaggagttagaggttgcagtgagctgtgatcgcaccactgcactccagtctgcatgggcagagcaagatcctgtctcaaaaaaataaaaataaaaacaagtcaaagtgttaccccaaaggcatgcttcctggcttctttgggttctccttgctcttccctccctttgtggtggaagtcgggagctctgggtctgttctgggctggaagtaatgggttcataccccctctgcacagaattaggggagcacttttccactagggctgtagacattggtacagtggggcgctacgcagctatagaggcccagggagggggctgccctctacagggtcctcaagttctggcaggtggttcatgacagcttcccccttccctttgggccctttagcagagggaatttatccttccccgtgtccttctagggctccaggtctgacaaaggccctagtccagaatccagtactaatttggctgccaggaaaatgtattaggtccagagctggagggagaattgctacccagggagggcaagatggaagcctgggacaggaaaacaggactttttcgcctcctaacctgtgtccctcccttcctagagaacttctgtggacttgggtgccatgggggctggtgaccacagaatctcataacctttctttaccacagaacctctgggcagacatttgccaactccaattcctcccgctcccacgcgtgcttccaaattattcttcgagctaaagggagaatgcatggcaagttctctttggtagatctggcagggaatgagcgaggcgcggacacttccagtgctgaccggcagacccgcatggagggcgcagaaatcaacaagagtctcttagccctgaaggtagtggggcagctagagctggttggccgggagagctactgggaagggatggggagggatcagtgcaaggaaagaagggacctcagttgttcctgctgcccccacaggagtgcatcagggccctgggacagaacaaggctcacaccccgttccgtgagagcaagctgacacaggtgctgagggactccttcattggggagaactctaggacttgcatggtgagtagggtcactttgaaggtgatggtacaggaggagacagagttgctttccacagagacacttagtcctgtccctgggctggaagctcagcactgctggctgcctgggtttccaggctgtaccgtgactgggcttccagaccctgctttaatgcacgagactccttgtggcctaaccaagcgtggaggaaaggatctattccctttaagatgtgtaggtgcagctcttggtttgggagaggtcattcctgcattacctgatgaaaagggggttccagaattcggaagatgggcctttgggtcagcaggagagggaagtccttgtcttttccatggcctccctcaggttcactggctcccagcctagaaaatagaaatagcctggatcataaggctgtgtccttgaatgacgtcctctttcctgttttatccccaagcccctgtatgtgagatctgccatccttcccctcaagagaatattctcccctaccctttgggtaggagtcctttcatgaggaaggtgggattttctgactaagctctacctaaggcattatcctttggcctaagggaactgaagtttccagcagaagccacagagctttaagataggaccttgggctgggcgcggtggctcacgcctgtaatcccagcactttgggaggccgagaggcaggtggatcacaaggtcaggagatagagaccatcctggctaacatggtgaaaccccatctctattaaaaaataaaaaaaattagccaggtgtggtggcaggtgcctgtagtcccagctactcgggaggctaaggcaggagaatggcgtgaacctgggaggcagagcttgcagtgagctgagatcgcaccactgcactctggtctgggcgacagagtgagactccgtctcaaaaaaaaaaaagaaaaaagaaaaagataggaccttggtagcaagactgtctcagtgaaggaataatgaagcaaaagataattagatgtgtctttgaaagcaggaaaccaatgtctgaggcaccttaatttgcagtgcccatggggcaagtggcctagcacagcgcggtgctaaatgactcctcccaccaataccatgtgggtctccaaagcttgaagaaacaccctgactggaggcccctcagggacaggctatatagcatcctcaccgtgcctctcagcctttaatcacccacccctcttttgcagattgccacgatctcaccaggcataagctcctgtgaatatactttaaacaccctgagatatgcagacaggtactagtacctacagctaggtgggatgcggaacaggactgggcaagggaagggcagtgatgagaggggaggaggctctggggcctcagggcctactgtatactcctctgtgactctgaacctgaggcttgggagttccgccgtgatgctaggtctgtcccaatcctctccgggccctgctggagagtcagctgggtgaggggcttttccagtccagctttagttttctctctccttggctgaaggcaaggttgccattccatccccttggagcctcaagcctcgaagcctgggcggtgccacattcctctggtgagtaccaagggggtgctgtgggatctgagacctccttgtttcctcagggtcaaggagctgagcccccacagtgggcccagtggagagcagttgattcaaatggaaacagaagagatggaagcctgctctaacggggcgctgattccaggcaatgtaaggaccaggatgcggccaagcaagacagaagtgtggcctgctgaggcggcacctgggtcacataattgtctttctttttggccctctcagttatccaaggaagaggaggaactgtcttcccagatgtccagctttaacgaagccatgactcagatcagggagctggaggagaaggctatggaagagctcaaggagatcatacaggtaggcagctggccctggacagggagctggatgcagcacggccctcagtatgctccacaccattcccagaacatgacctgggccttgttcccacaggtattcacatagcaagaagcagccctctacaccagcactctttaattctttgcctgttaacccagctgttcttctaattatcacaaccccttctgcaggttggcacacataggctttctgacatcacactagccagagctagtctctcctccacgctcctgatagaggatttgaagggtgatccatatgcagggatcttgtcttgtgttttggtgaatgttgcaactcttgtgctgaatccaagggccaaaaaacatgaagtataggtaataggccctaagggtatgacttgagatcaatcctgtctcttccattcacaaactgatttccttgtgaaattcatttagcctcactgggcctcagtttttgcatctctgaaatggtcaaggtaggatggttgtatttgagcgttcagtaatatgcttataaagtgtcagcacagtacccagtgtgtggtcagggttcagtaactggtaggtgcccctgctactgtaatccctactgtggaagagcaagtgactgggaggcaggaatttacgtcccaatggtggggcgctcagaggattgcagagcaggaaggaagaacttggggcaggtgtaactgaggagggactgtgaagggtaagtgctcaggcctctcctccccttcctggagtgctcaggggtacagagttttgtaagcacatggcactttcaggatgaatgagaggctcaccgtggtcagagcaaaaggagtgaacaggtgatggagggtagttaaggctgtggacaggtcaacagggatctgatgctagagtcttctagatggttcatctcacaggcctggactgcatcatgaggaagcctttggagggtgttaagcagagtggtgacatgggcatgtcagagctttagatatatcatatggccaccatgtggagcctggtttgggggcttgagaaaagcaaaggtagaggcagttaggagattgttggaaagggttcaagaaaaactattgccagccaggcgcggtggctcatgcctgtaatcccaacacgttgggaggccgaggcgggtggatcatgaggtcaggagttcgagaccagcctggccaacgtggcgaaaccccatgtctactaaatacaaaaaattagccgagtatggtggcgggcgcctgtaatctcagctacttgggaggctgaggcaggagaattacttgaaccagggaggcaaaggttgtagtgagtcaagatcgtgccactgcactctagcctgggtgacagagcaagactccatctcagaaaaaaaaaaagagaaactagtgcctagaccaaactgtgtccgtgttcatgggattggaatgaggacatgagattcatgaaccatttagatatacaagcatgaaaatcttacaaggtaccccccaaaatatgtactctctctctatatatatatgtttttgagacagagtctcactcgtcacccaggctggagtttagtggtgcaatcttggctcactgcagcctccgcctcctgggttcaagcgattctccttcctcagcctcctgcgtacctgggattacaggtgcgtgccaccatgcctggctaattttttgtatttttagtagagatggggttttaccatgttggccaggctggtcttgaactcctgatcttaagtgatccgcctgcctcagcctcccaaagtgctgggattacaggtgtgagccaccatgcccagcctatatatctggttggtttttgtttgtttgtttgtttgtttgttttggggggggatggagtttcgcttttgtcccccaggctggagtgcaacggcaccatctcggctcaccacaacctccacctcccaggttcaagcaattctcctgcctcagcctcccaagtagctgggattacaggcatgtgccaccacgcccagctaattttgtatttttagtagagacgggatttctccatgttggtcaggctggtctcgaactccctacctcaggtgatcctcccgccccgacctcccaaagtgctgggattacaggcgtgagccaccacgcccagtcgtatatctattatttaaaaagaatcatttgaccgggcgcaatggctcacgcctgtaatcctgtcactttgggaggctgaggcggccacatcaactaaggtcgggagtttgaaaccagcctggccaacatggtgaaaccccgtctctactaaaaatacaaaaattagccaggcatggtggcaggcatctgttatcccagctacttgggaggctgaggcaggagaatcacttgagcccaggaggcgaaggttatagtgagccgagatggtgccactgcactccagcctgggcaacagagcaagactgtctcaaaaataaaataaaataatcatttggccaggtgcagtgagtcatgcctgtaatcccaacactttgggaggtcaaggaaggaagatcacttgagctcaggagttcgagaccagcctgggtaacatggccccatctctacaaaaaataaaaataaataaatatcccaaaggtggtgtgtgcagcaaaaattataataaaaagaactgagggtagggatagcattaggagatatacccaatgtaaatgacaagttaatgggtgcagcacaccaacatagttcatgtatacatatgtaacaaacctgcacgttgtgcacatgtaccctagaacttaaagtataataataaaaaaagaaagaaagaaagaaaaaaaccatttagggagcagaattgaggaggatttggtgacaagtacggtgaaagaataaagtcactcgggctgggcgcggtggcttatgcctataatcccagcactttgggaggccaaggcaggcagatcacaaggtcaggagatcaagaccatcctggccaacatagtgaaaccctgtctctactaaaaaataaaaaaaaatagcctggtgtggtggcgcgtacctgtagtctcagctactcgggaggctgagttgtatacctattatttaaaaagaatcatttgaccgggcgtgatggctcacgcctgtaatcctagcactttaggaggctgatgcaggcagatcaactaaggtcgggaatttgagaccagcctggctaacaaggtgaaatcttgtctctactaaaaatacaaaaattagccaggcatggtggcaggcacctgtaatcccagctacttgggaggctgaggcaggagaatcacttgaacccgggaggcggaggttgcagtgagccgagatcacgccactgcactccaacctggcgacagagcaagactccgtcttaaagaaaaaataaataaataaataaattagctggctatggtggtgtgtgcctgtagtcccagctactcgggaggctgagacaggagaatcacttaaacctgggaggcggaggttgcagtgagccaggatcgcacaccacttcactccagcctgggtgacagagtgagactccatctcaaaaaacaataaaaataaaatcactcaaatttctagcttgggcatcaggaccaatgatgttattcatttgacataagagatggggataagcttgggataggaggccggaagtggtggctcaagcctgtaatcccagcactttgagaggccgaggcctgcggatcacctgaggtcgagagttcgagatcagcctggccaacatggagaaaccccgtctctactaaaaatacaaaattagctgggcgtggtagcacttgcctgtaatcccagctacttgggaggctgaagcaggagaatcccttaaactcggggggtggaggctatggtgagccgagatcacgccattgcactccagcctgggcaacaagagtgaaactgtctcaaaaaagaaacaaagaaaacgaaaaaaacaagcttggggtaggaagagggtgaattcaagctaaggatttccttggggagagggtgaacagccagggtatgggtcagggaccagaggtaaagcatcttactcaggtgtctgcattgcagttggtaggaccccaggaatgatttgctaaatggttattgaactgacaaggtcctccctgtgttgtagcaaggaccagactggcttgagctctctgagatgaccgagcagccagactatgacctggagacctttgtgaacaaagcggaatctgctctggcccagcaagccaagcatttctcagccctgcgaggtgggtgtggctggatggggtgcaggtggacgatggtggcctctgctggctcttgggcagctgcaggtgatggcagctctgccctgagtgaatgggggctcctcagactctcactaaccccatatgtaccgctaccctttcttccagatgtcatcaaggccttgcgcctggccatgcagctggaagagcaggctagcagacaaataagcagcaagaaacggccccagtgacgactgcaaataaaaatctgtttggtttgacacccagcctcttccctggccctccccagagaactttgggtacctggtgggtctaggcagggtctgagctgggacaggttctggtaaatgccaagtatgggggcatctgggcccagggcagctggggagggggtcagagtgacatgggacactccttttctgttcctcagttgtcgccctcacgagaggaaggagctcttagttacccttttgtgttgcccttctttccatcaaggggaatgttctcagcatagagctttctccgcagcatcctgcctgcgtggactggctgctaatggagagctccctggggttgtcctggctctggggagagagacggagcctttagtacagctatctgctggctctaaaccttctacgcctttgggccgagcactgaatgtcttgtactttaaaaaaatgtttctgagacctctttctactttactgtctccctagagatcctagaggatccctactgttttctgttttatgtgtttatacattgtatgtaacaataaagagaaaaaataaatcagctgtttaagtgtgtggaa

SEQ ID NO: 11 - DNA, 11855 bp, Homo sapiens
  source 1..11855: mol_type = other DNA
gtgcttgtagtcccagacactccggaggtgaggcgggagaatcgcttgagcccgggaggtggaggttgcagtaagccaacaccgtgccactgcactacagcctgggcgacagggtgagtgagactccgtctcaaaaaaatgtggaatagaacaaactttagttttaggaactagactttatattgtagatctagttgcaattgacacgtccttgttttatgggaggctacatactttaaaggtttccaggggagcaaataattaattatgattttgtgtatgtgtgtttgtggggggtagtcatcaggaaatgtctgaggccttttgccttaccgtgtgggtctggctaatgtgtaatgttttgactcaagattgtaaagtcaaattattcatccggggagaggatggtcgtgtaactgaatcagcctcccaagatgaactttccctctggcgtaagtttaggagtcctgatattttattttcctttacaacagaaagcagcaaccctgtaattaaagagaacaatgaaggaagctatctaagccatgagggttactgaggatctgcgctggggttaaggctgcgaacttaagaaatatttggatagacagttctcatggcttggtgtggttagacgtggtcctccgtgggcagcagctaagacgcttactccagtttgggcattgagggcacagtgcgtagtggtcctggaagtaaagagaatcctggttttccgcagagatctaggattaacctaagcgttcgggttcgggagcggccacaagggcgcctcactccaacctcagccatccgcaacagggtggggtattagtatttttccgcacccgccccaacgagggaaagcgccgagtcattccggcggggcgcgccgggcggggctcgggccacatccccctcctctctctcctcctccggcacccccgtccgttccgactctcgcgagatccctactggctataaaggcagcgccccggagagctcttgcgcgtcttgttcttgcctggtgtcggtggttagtttctgcgacttgtgttgggactggtgagtgtgggcagtgcggcccctgcggagtgaggcgcggcgcgcccttcttgcctgttgcctcttcctcctcctgtccggggcccgcccgcgctcgggtgggggtgctgtgatgcgtgaggcagccgggggaggcccggagtccgagactgcttgagcgctgcgcacacccctctcgtgggccccccacgtaggtgcgggaacctggttgaaccccaaggcaagcgtggactcgagtcgagtcttcccccggcaactcgagcacgtggcgcggcgtctgggcgggctggtggtgggggtctccgagactagcctcctgccggacggggtgggttcgggaagcttctggaatggacctgtatccagactcgtggctgtagaagacagcctctatgtatttggctgttccgggtcctgagccttgactagctgcggagcttcgggtaccctttccccgtctttattttcctgtacgtggaatggagttagcgatgagcccaaatgtccccgctgaagcactctctctgctggtgctttctccagtgctggggagggacagggggcacctgaagtggggtttagggatgtggccctctacgctgggcagatcccctgaaggggcccggtggcggcctgaatcccagcagcctttaccccgaattggttgggttttgtacttgggggccacttgggaaagaaggattggacgagaaggccatttgggggcaccaagttgcagcatgccttagtttttggtttttgttttttgtcgttaaaggtgttaaggactttttaaaaaacagttaaaagtttgctaagatccatgcttacaaaatttcttttgcttgtggtattgtgaactaagaactttgggacttggaaaagctttcagaccgcggcttagtgggttaaatctctgttttttgagctagagtctcgctctgtcggccaggctggagtgcagtggcgcggtctcggcttactgcaacccctgtctcccgaattcaagcaattcttctgcctcagccttaggagtagctgggattacaggcttgtgccaccaagccccggctaatttttgtattttttttttttttttttttttgagacggagtctcgctctgtcgcccaggctggagtgcagtggctggatctcggctcactgcagcctccgcctcccgggttcacgccattctcctgcctcagcctcccgagtagctgggactgcaggcgcgtgccaccacccccggctaattttttgtatttttgttagagacggggtttcactatgatggccaggctggtctcgaacttctgacctcaggtgatctgcctgcctcggcctcccaaagtgctgggattacaggcttgagccacagcgcttggccaagatctcaatactaatcttggtgttgatctgggtgaatccagtgcaaccttccttttcagcagtaaattgattcttatacttgttttcgccctgggatattagccccaaagtcaggaacccaccttcacaaatggtgaagggaattctagggcttacacaatacctaaagatttgaaattaagcagatgccaatcaatatcttggtcttgcctcttttttttttttttttttttggagacagagtctcactctgttgcccaggctggagtgcagtggcgcgatctcagcttactgcaacctctgcctcccgggttcaagtgattctcctgcttcagcctcctgagtagttgcgattacaggcatgcaccaccacgcccgactaatttttgtgtttctagtagagacggggtttcaccatgttggccagactggtctcgaactcctgacccggtgatccgcccgcctgagcctctcaaagtgctgggattacaggtgtgagacactgcgcccagtggtcttgcctcttaaaagttggactgactggaagggcgcggtggctcacgcctgtaatcccagcattttgggagactgagttgggcaatcatctgaggtgaggagtttgagactagcctgaccaacatggagaaatcccgtctctaatagaagtacaaaaaaattagccgggtgtggtggcctgcgcctgtaatcccagctactatggaggctgaggcaggagaatcccttgaacctgagaggtggaggttgcagtgagccgagataatgccattgcattccagcctgggccccaagagcgaaactccgtcaaaaaaacaaaacaaaacaaaaacaaataaaacaagttgaattagttataggttgtgtgctgtcttggacaaagctacctggagaaaagtcaaatatgcttctgatgttatgaaggcaggtggaggcacagtgatgggaaaggtcaacgtgacttttggggagccaaacaaaagtgtttgtggcattgtgcatttggattctggtttgagagtcttcatctgcctctctctctgcttctgtataatgaataagatgccactgcactaattatggttcagaaagaatgagaggttatctcagtatataaagaaattgccttgctgtttttaaatgaaaacaaaggctgagattcagagacttgtttcgttccaaaagttggaaagctcagactgtgacccttgactgctggctggagcttcttactaaaacaacatttaatgtattcagggacactggacaatgccttgattgtttacagctaagtctctttaagtaggtgaaggctgctggttatgtagaaaattaaggcttgtttctaattcatttctgttatttctagctgataggaagatgtcttcaggaaatgctaaaattgggcaccctgcccccaacttcaaagccacagctgttatgccagatggtcagtttaaagatatcagcctgtctgactacaaaggtgagagaattaacactgggctcattgagatggagttattttatattctaggggtggcttgttagatttgtgtcaatgttgtttgactgtaaaatgttttgtctcctaggaagaagtatttaggttgttaccttcatgttgaagtggtgattatcaagtgattacagggtatatatcctaggaccaaaccacttctggagaaaccacatgcttcattatgtctggacatactagctcaattatcttttcagtattcctcgtctattttctttctttatttttatttttgagacagggtctcattctgtcacccaggctggagtgcagtggcgcagtcatggctcactgcagcctctacctctctgggctcaggtggtcctcctacctcagcctcccaagtagctgggactgtaggggcatgctgccatgcctggctaatttttgtactttttttttttttttttttttttgagatggagttttgctcttgttgcccaggctagagtgcaatggcgtgatctcggctcaccacaacctccactgcccaggttcaagcaattctcctgcctcagcctcccgagtagctgggattacaggcatgcgccatcatgcctggctaatttttttttgtatttttagtagagacggggtttctccatggtggtcaggctggtctcgaactcctgacctcagatgatccgcccacctcggcgtcccaaaatgctgggattacaggcatgagccaccacgcctggcttaatttttgtactttttgtagagctgggcgccatgttgcccaggctggtctccaactcctgggctcaagccctctgcctgccctagcctttcaaagtgctgggataacaggtgtgagccactgcctctggccctcctctattttattattggagaaatactcattatctcttgttataagagacattctacatttaaagtctcagagctcactcaaatctctggagctgtgacactgctcgttcagtttgtttgggtcacgtatatatcacagctgttaatattaggctgagggctaggcactttcccttgcctgttttgaccccggaggagagttgatattacagatggaacaactctcctttctgttgtcatagtttttttttttttttttttttttgagacggagtctcgctttgtcgcccaggctagagtgcagtggtgcgatctcagctcactgcaagctccgccttctgggttcatgccattctcaggcctcagcctcttgagtagctgggactacaggcgcccgcaaccatgcttggctaatttttttgtatttttagtagagacggggtttcaccatgtttgccaggatggtctcgatctcctgaccttgtgatccgcctgccttggcctcccaaagttctgggattacaggcgtgagccactgcgcccggcctctgttgtcatagtttcatgcagacacttggcaagttctgttgaggctcctcctttctttaccttgtagttccagagcagctcgatctcctgggacagttgaggatatagattccttagaatgctaacctgaaactcaggtgtcaagtgtccttttctcagtggtgtagcattagtccctggagttagtttttggtagaacatttgactaggtttcctgacataatcacactttgttcttggggcttctcccagcaaacaaggtaagttgcaccatagggaggtgacctgggcccaggggtataagcaggaggtctaggaggagctgttctctgccctccagagcttgacctgctgaggccccaaagtgcttgttaggcaaagctggaagggttgtttagatgagttagtttccagtgatactgcaaagtggtaaatgtcaaaaagggctgcttgtttggctttttttttttttttttgaggtggaattttgatcttgtcgcacaggctgtagtgcagtggcatgatctcaggtcactgcgacctccatctccccggttcaagtgattctcctggctcagcctccccagtagctgagatttcaggcccccgctgtcacacccagctaatttttgtatttttagtagagacatgttttaccatgttggtcagcctggtcttgaactcctgacctcaggtgatccacccgcctcggcctcccaaactgcctcccaaactgctgggattacagacgtcagccaccatgccaccacacccagcctgtttgacttttcaaacattgctgctacctggaaatgagtgaatatttggaattgttctagtatttaagcctggtgggtgtggcgagaaggctgcctggccagtttgaagatctgttatttcagtggttaatcccagtgacttcattaaaattgcagctagaagttctgttactcactagtacttttgtcttttctgtctctctctgtctccctctttctctctctctctctgtgtatatgtatatatatatttctgttgttttgagacagtcttgctgtgttgcccaggctggcctcaaactcctggggtcaagggatcctcccacctcagcctcccaagtagctgggactacagacacgcaccactgtgcctggcttaaaatttttcctgtcctgtcaggcacgttaggaacacatgtgatcacttaaaccatgcttgttccattactatggttcatcacgggagaagtgcaaaggctgtgacttcttattggtgtcttatctctacagcagaggagtactgcaattcagctttctctgggtattgttaagcattggcattaggccatgcttataagtgcatccttgcttttgctatctttggagaacttggtgtttatgttaattttagccactcagaaaagatcaaaattagactgaacagtgtttactctgtattggtagctatgacatggaggcaggagaataaagtatgggattggaagtttttttcattcaggtattcctaatgcaccaggttctaaaagtagcttctaggagacatctgtattgagcatcttggcagttagtggttattgtgtcagccatcaacttgcttctttttgtataggaaaatataaagcaaggaagtctgtgtcaaatgctaaccatgactccgattttccccccaggaaaatatgttgtgttcttcttttaccctcttgacttcacctttgtgtgccccacggagatcattgctttcagtgatagggcagaagaatttaagaaactcaactgccaagtgattggtgcttctgtggattctcacttctgtcatctagcatggtaaatctcttggtctatttggcatgtgaacttttttttttttttttttttttttgagatggagtcttgctttgtcgcccaggctggagtgcagtggtgtgatctccgctcacttcaagctctgcctcccagtttcacgccattctcctgcctcagcctcctgagtagctgggactacaggcgcctgccaccatacctggctaattttttgtattttcagtagagacggtgtttcaccgtgttagtcaggatgttcttgatctcctgacctcgtgatctgcccacctcagcctcccaaagtgctgggattacaggtgtgagccactgcacctggctggcatgtgaacttttaaaacagcaactgggaagctttggcaatagactttcaagtattgccttctcattgaagggagtgcaaagtctgactttctcttattgctctcatgacctggcagcagagaagaagcagcttcaattgcagttgagtgtaccctagtgacctaccttaactgttctcagcattcactttattgctggaaaacggaaaaaaaacagtctttttggaaagttagattaggaatatgggaaaggggaaagaggaatgcgtacagtcaagtcaagagtttgaatgtaactgtatgtttgccttttgccatagggtcaatacacctaagaaacaaggaggactgggacccatgaacattcctttggtatcagacccgaagcgcaccattgctcaggattatggggtcttaaaggctgatgaaggcatctcgttcaggtatgtcatcaggacaagtatccagttggctgaaagccttttatttggagagatctagagccctgatctgtagagactccttgtcatttcattcctttatgcaggggcctcctcactaaggccaggccagtaggagtgtggagaccagtccatttccttcaggcttcaagcctctgtattctaacaaagcacatctctaaacctgtattgcttttcctttcatctcttttcccaggggcctttttatcattgatgataagggtattcttcggcagatcactgtaaatgacctccctgttggccgctctgtggatgagactttgagactagttcaggccttccagttcactgacaaacatggggaaggtaagccatctgtctgataacaggacaacagagtggtggtatgaaggggtgggttgccccttcacacctgtgggtgtttctcgttaggtggaatgagagacttggaaaaagacacgtagacaaagtatagagaaagaaataagggggcccaggggaccagtgttcagcatacagaggatcccgccggcctctgagttcccttagtatttattgatcattcttgggtgtttctcggagagggggatgtggcagggtcataggataatagtggagagaaggtcagcagataaacacgtgaacaaaggtctctgcatcatgaacaaggtaaagaattaagtgctgtgctttagatgtgcatacacataaacatctcaatgccttaaagagcagtattgctgcccgcatgtcccacctccacccctgaggcggttttcccctgtctcagtagatggaacatacaattgggttttacactgagacattccattgcccagggactggctggagacagatgccttcctcttgtctcaactgcaaagaggcgttccttcctcttttactaatcctccttagcacagggtgtcaggctgggggaccccggtcaggtctttcccttcccacgaggccatatttcagactatcacatggggagaaaccttggacaatacctgggtttcctaggcagaggtccctgtggccttccgcagtgtttgtgtccccggatacttgagattagggagtggtgatgactcttaaaacgagcatgctgccttcaagcatttgttttaacaaagcatatcttgcacagcccttaatccatttaaccctgagttgacacagcacatgtttcagggagcacagggttggggataaggttacagattaacagcatctcaaggcagaagaatttttcttagtacagaacaaaatggagtctcctctgtctacttctttctacacagagacagtaacaatctgatctctcttttccccacagtggtagaatgggaaagatagtaggaacagaagctaccaaataagaaaatgggtatctctcttcataaattgaagcccctggattacagtgtgttgtgagggtgagggtaatggaaaagcttgggaaggagaatataaaggctttttattcaaagtatacatactcctctcttctgtcctgctcatttagaatcagtcactcccaaagatctaacttactgaatgtaggatgatctcacagatgtattagggcaaaacaaaatggttgggaatcacctctagagataaagcatgccattttttaaataactttattgagagaagaggttaatccatatagttcatatttttatttatttatttattttttgcaagatggagtcttgctctgttgcccaggctggagtgcagtggcgcagtcttggctcactgcaacctccgcctcccctgagccattgcgcccagcccagactagctttctaaggcctatttcagctctgatcttgtaatttaaaggaaatgaagttattagagtctggattagtggtgtatgtttgggaagacccaaaggtgctagcttggctagcaccaagtaatctttttacagggattagagtctgattatatagggatcagtgagcactgataaccaagaggtaccctttgcagaaggatgtgtgggcagttagcctggacagatgacacatggctcagctgacacctgctgagactgcccccttgtgggagatgaggttcagcattaagaaggaggcagcagtggcaaagtaggccctttaactggactttcctaggaacctacatataggttagtctcctgaacccaggctttcataactcagaagcttgcttcttcagactctgttggtctctgctgcttcccatcccactggaacatgtacagcctcttaaataggtaccatttaagagccaatgaatgccaaacactttttttttttgagacagagtcttgttttgtcgcccagactggagtgcagtggtgtgatctcagctcactgcagcctccacctcctgggttcaagtgattctcttgcctcagcctcctgagtagctaggactacaggggtccaccaccacgccccactatttttgtatagtcccagctactcgggaggctgaggcaggagaatggcatgaaccccggaggtggagcttgcagtgagctgagatcgcgccactgcactccagcctgggcgacaatgtgagactgtctcaaaaattagccaggtgtggtggtgggcgcctgtaatcctagctatttgggaggctgatgcaggagaatcgcttgaacccgggagaccgaggttgcagtgagacggaggtggagattgcgccaccgtactccagcctgggcaacagagggagactccatctcaaaaaaaaaaaaaaaaaaaaaaaaaaagaaaaataagagattagtccccttgcctcattttcttcaggctagcctgaggcacattcttaggcattgtcaggaaaaggttgaaggctgtgctttctgtataaatctatgaaaaatttcaaactctgccttttgcttaccaaggggtagatggcagttacttaatgaaacaagcgggggcttctgttaagttcttgatcctttataaggttcaggctatccagtttggtagagttagaagaatgctgagaaggcagactgagtttgctgtcttcagagctctgaagggctgtcagaaacagtttagtgttaagggtttacatagtcctatgtgtgtcgtttatttagcttttttttccccttaaggattagagagtgttggcaaattatttaaactttgcctttttttgtggaaaatttaaatttcaagtgctacatgaataaattaggcatgatagtatcttaaggctgtggtgatgattatatgtttgtaaaatggttagctcatactaaaagggtgaatgatctaagactgattgcaggggtaggtttcctggtatctgagtgttcaggtgcagaactggttttgtccataggagaatggtggtgcataccattgagaaggttattaattagtggtgcctttctcttgcagtgtgcccagctggctggaaacctggcagtgataccatcaagcctgatgtccaaaagagcaaagaatatttctccaagcagaagtgagcgctgggctgttttagtgccaggctgcggtgggcagccatgagaacaaaacctcttctgtattttttttttccattagtaaaacacaagacttcagattcagccgaattgtggtgtcttacaaggcaggcctttcctacagggggtggagagaccagcctttcttcctttggtaggaatggcctgagttggcgttgtgggcaggctactggtttgtatgatgtattagtagagcaacccattaatcttttgtagtttgtattaaacttgaactgagaccttgatgagtcttt

SEQ ID NO: 12 - DNA, 32744 bp, Homo sapiens
  source 1..32744: mol_type = other DNA
acagggccgcggacgcccgggcagccacggcggcggggccgcggcgggcgccggctcagcccgcccctttctcccgccgcctccccgccccgccccgcgccgcgccggccgctgtcagctccctcagcgtccggccgaggcgcggtgtatgctgagccgctgccgcagcgggctgctccacgtcctgggccttagcttcctgctgcagacccgccggccgattctcctctgctctccacgtctcatgaagccgctggtcgtgttcgtcctcggcggccccggcgccggcaaggggacccagtgcgcccgcatcgtcgaggtgaggcccgggcagcaggcgggctccttggggcttgacgggatgcgggccggcctgtcccgccgcccctagtccgcgccccgcggagtcgccgagccgcagactacgagtcccggcggccaccgcgccgcccgcgtggcagtggccgagggccgccggcgcgcggcgtgccgggacttgtagtccgcgcccgcccgccttgggggccaccgcttgaggtcgctttgttcctgcgccccttcttttcttacattttggggaccagattcgtctctagagtgggctgggagagggatcccggaggccaacctttgggggtcccccagcgcgcagaggttagcgtgtcgctgatcgtgtggcaggtgaaggcagcaggagcgcggatttgggttagaggccgtgtgcgcccacagttgtctgaaggagagacctatttttcttctccgcgccttccctctggttccctaaactccgcactgtcaccgaacgtgtctttactctagaaaggaggcccgtggggcggggtgttattttaggcgtgctgtgggctgccgctggcactctcgagccccgtccccgcaagctttagggcggagccagccctgaggctcggcccgggtcggggatggggaaagccgggagtgctgttctgagatcaagcttcaacctttggccctgctgccaactcacgctcggccctcggtcacttcctgtctcccagcctcagttagcccttgtaatacagtaaaaagagtctctgaacccagattttctcaggatataaaacacctcccaaatgtaaaatgctgttacttttttttcttttgctttgagacaggttaccagttcaattcttttaacaatttttgagctagatgtatggttggttagctgcattgacactgtgggaaaaaaaggcttcatggacaatctggggaatgcttgggaaagaaggaaaacaggatatctagaaacagaagaggcgaccattggtggcctctagtgaaatcactctgaaaccctgtaaccaacaaaagtttttttgacctagaacttataatttcctcctcttctaggatatggccaatattagcatggggcttttgcttctctccttatatgttcataacaatcaactcctgtcctgtattttattccctaaatagcatccagagaaagttagatgagttcaacaagtcattatgtgttggacagatgtatttataaatattgatcattttgccaggcgctgtggctcactcctgtaatcccagcactttgggaggccgaggctggcggatcacgaggtcaggagttcgagaccagcctggctaacatggcgaaacgttgtctttactaaaaatacaaaaattagcctggcgtggtggcgggcgcctgtaatcccagctactccgaaggctgaggcaggagaatcgcttgaaaccggaaggcggaggttgcggtgagcccatatcgcgccactgcacactagcctgggcgaaagagtgaaactccgtctcaaaaaaaaaaaaaaaaaaaaaatcattttaggtgtcaaagtggaactagtccaactaaaaaaatacataacatttacatcctcttaaaaaaatttttttttgttggttctctttcttttgttgtttttttgtttttgtttttgtttttgtgacagtctcactccgtcaccaggctggagtgcggtggtgcgatctcagcacactgcaacctccgcctcccaggttcaagcgattttcctgcctcagcctctgcatagctgggattacaggcgtgcgccaccacgcctggctaatttttgtatttttggtagagacagggtttcaccatgttggccaggctgatctcgaactcttgacctcgtgatctgcccgcctcagcctcccaaagtgctgggattataggcatgagccaccgtgcctggccttgtcacttgtcttttaaaaagtaaagagactggctgctgcactccagcctgggcgacagagcgagactccgtctcagaaataaataaataaataaataaatggcaagtgaaaagtgggagtgatttcaaatttttgtttagtatatgtgatctttcttaaatagcatgatgggggaaggggcaaagactttagagtcaaagagatataggttcaaaccctgactctgccatttactgtttctctaggcccagagatgttgttgcctttagttccctgtgaaaagggaaaacatagaaatggctgttttgtatggtatttgtgaatattaaatgaggtaaaatatctggcacacagagacagatgcagatagtttttttctccactttaaacttctgatcttattacctctactttaaacttcctgatcttattatattggttatttttattggtgggttttgttgttgttgtttgttttgagatcgagtctctctgtgtcacccaggctggagtgctgtggtaccatcttggcccactccaacctctgcctcctgggctcaagccatcctctcacctcagtctcccaagtagctgggatgacaggtgtgcactgccactctctgctaactttttttcaggtttttgtagaaaccagggctcactatattgcccaggctggtctcgaactcccagactcaagggatcttactgccttggcttctcaaagtgttggcattacaggcatgagccgccatgcctggcctggttatttttattgcaaaatagtatttttcttttaaattactttatgcgtgttatatttgaatgcatttaaatacagtatgctgtttctgaatcataatatgcctttaaaatatctgtacctaaattaataatacccatactactacactggttaaaaaataatctacacattcagggctgggcgcagtagctcacgcctgtaatcccagcagtttgggaggcccaggcgggtggatcacgaggtcaggagattgagaccatcctggctaacaaggtgaaaccccatctctactaaaaatacaaaaattagccgggcgtggtggcaggcgcctgtagtcccagctacttgggaggctgaggcaggagaatggcatgaaccggggaggcggagcttgcagtgagccaagatcacgccactgcagtgcagcctgggtgacatagcgagattccatctcaaaaaaataaaataaataaataaataaatacataaatgaaataatctacacattctgcaattattctttattctgttcagtaatggcaaataatattttaaacttgttaattatcagttacaagattccatgatgagatatgttctgtaatgtattatattattaagatttcaacaattatttgaccttaaactgttatcttctttaatgaaaagtattctcttgagtctagttgccataaactttattaagctgtcaatcaactaattccaaatagtttataatttagcaattgctattccctagctggctagacagacactggaatatctattttttttttttttttgagacgaagtgtcacgctgtcggccaggctggtgtgcagtggggcaatcttggctcgctgcagcctccatcttctggattcaagcgattctctgcctcagcctcccgagtagcttggactacaggtgcgcgccaccatgcccggctaatttttgtatttttagtagagacggggtttcactatgttggccaggctggtctcgaactcctgacctcgtgatccacccaccttggcctcccaaagtgctgggattacaggtgtgagccactgtgcccggcctggaatatctattgttagtgaagtcagcggtatgttgtttttttcctttgtgaatctctttattttgactcaatatttttttatacaggcaattataaactaaattccaaaataatgtaagttttggaggtttttttcctgtaggaaaaaaattacataaatccacggtaaattctccaattaatctggctgaagctaatgcagctcacagggcacctgaaattgttactttagtatgttgatttccaactcaggctgccagaagtacatatttgagtcctagctacagaatcttcagttgacaggaagagaagaaaaagagaaaaccaaaaacccttagggatatcttgctctctaaggcactgaaattagtgaagtgggtattgttagagggaagctggtattttttctctggaggtgaattctgctctgcaaattgctcctggagacctagagaaggtaaaggcaaatctgatacagtgtcttctgagagtgttctgtactgggaaggaaagattggagggaggttttgggattgattttgcacatttatttgtactgatgtttttcagttttgtttgcttttctccttccttccttccttccctccctccctccctctctccttccctccctccctctctccttccctccctccctctctccttccctccctccctccttcctgttctttctttttcttcttttcttttttttttaccaaatacccagacttggagaatttgttttattttctaattgtttgtaaatctgtatcctctaatactgaatttgtttttgaaaatgagctattttctaaatcagtgtgatacttagagttaagtttccagaatggaattattgtgcaataatttagttataaaatcatgatgggaatactgtgtcattcttgaatttttaaaattaagctttatttatatttgttgttttggcccaaatgaaattatgtcaatgtaacctaaatttatatttgaaaataaccaccattttacatgcattagttggaagaaatatttaaacctctcttttaaagattgtgaacattttgcttacataaacaaattatgactaaagcttataaccatgccaaattgctttctgtagcacccagaaaacttttttttttttttttgagagagggtctcactctgttgcccaggctgaagtacagtggtgtgacctcagctcactgcaacctccgcctcctgggttcaagagattctcctgcctcagcctcccaagtagctgggactacagacacatgccaccatgaatgccatgttggccaggctggtctcgaacttctgacctcaggtgatccacctgcctcagcttcctaaagtactgagattacaggcatgagcctttgcgcctggcctcacccaagaagcattttatcatctgtgtcaacttcctccagggcctgtgtgggtaactcttactttgcctggccatcctacttactgcacttagaaaaagttttggatgataattgactttaagcatatataaatcagaaacttgatttcatttatctttgtgtccccagtgttgaacattgtgcctgacacatagtaactgcttattaagcacttattgaattataagttgaatacgttggattcatagagtttattgtttgtcctgaagatgtaaaatttttaaaaattcgatccccagagggcgctccagtggcagttggctctcccattttaaggaccagaagtgtttgaatgtcttcctctgatttctttttctttcttcctttccttttttttttttttttttttttttaagacagagccttactctgtcgcccagacgggagtgcagtggcatgatctcggctcaccgcagcctccgcttcccgggttcaagcgattctcctccctcagcctcctgagtagctgcaattacaggcacccaccacaacgcgtggctaatttttgtatttttagtagagatggggtttcaccataatggccaggctggtctcaaactcctgacttcaggtgatccgcctgcctcagcctcccaaagtgctggaattacaagcgtgagccaccgcatccggctgccctcttccctcccctccccttcccttccctcccctcccctcccctcccctcccctttccctttctttcctatttatttatttatttatttgagatgagctctccctctgttgcccaggctgcagtgcagtggcacaatcgtggctcattctcactgcagcctccacctcccaggctcaactgatctttccacctcagcctcccaagttgctaggtctacaggtgcatgccaccatgcccagctaattttttttattttgtagaaatggggtctccccagagcaagactccgtctcaaaaaaaaaaaaaagagaaatggggtctccctatgttgcacaggctagtctcaaactcctggattcaaacgatcctcccacctcagtctccaaagtgctgggattgcatcgtaagccagcgtacccagcctgtcttcctcagatttctcatgtaacacttttgtttactctcaatgaatgaatcaatgatatggttgtgaaaatctgctgagcagatttccaagctcctcattacaaattctcaaacagagcagcattcagaagaaactagataggaaaatccactggatattaaggtccagtgtttaagaatatgcttctttccttctggtggaataataattttttttttttcgaggcagagtttgagttgcccaggctagagtgcagtggcacgatcttggctcaccacaacctctgcctcctgggttcaagcgattctcctgcctcagcctcctgagtagttgggattacaggcatgcgccaccatgcccggctaattttgtatttttagtagagacggggtttctccatgttggtcaggctggtctcggactcctgacctcaggtgatccgcccgcctcagcctcccaaagtgttgggattacaggtatgatctaccatgcctggcaaattttttcttttttaagaaagtttacattatctggtccacaggatacttgactcttcagaagcaccactgtttgattaagggtgcttatgacatgggatttttgttaagaacttggaggaggggagatcttcagattatttactgcccttaattttgaaaactttcattttttgcctttccattttaagttataagagtaacacatgcccatagggaaaatgttacatcttttctaatcctgagatcaccagtagtaactgcttgttatgaactgctttcccatctctttctcaatgttcttgtgaacaaaaatgcaaatatttatattttttaccttcaagtgagattagtgtattttttgctgactgtatcatagatatcctttcagttctttacctatagatttaattcatttgtgtttttttgtttgtttgtttgttttgagacagagactcactcagtctgtcacccccaggctagagaaccttggcactctcttgtctcactgcagcctctgccttccaggttcaagagattctcctgcctcagcctcccaagtagctgagattacaggtgtgtgctaccacgcctggctaatttttgtgtttttagcagagacagtgtttcattaggtatttctttatagcagtgtgagaatggactaatagagtctactttaagatttttatttttattttttattatttatttatttatttggacagagtcttgctctgtcgcccaggttggagtgcaatggtgtgatctcggctcactgcaacctttgcctcccaggttcaagcgattctcatgtctcagcctcccgagtagctgggattacgcccagctaattttttagtatttttagtagagacagtttcaccgtgttagccaggatggtctcgctctcctgacctcatgatccacccacctcagtctcccaaagtgctgggattacaggtgtgaaccactgatcctggccaatttttattttttggggacagggtcttgctcagtcccccaggctggagtatagtggctctatcactgctcactgcagccacttggctcaagcgatcctcctgccttatccttcagagtagctgggactacaggctcacaccaccaggcctggctaattattttttattttatttttttgagatggagtcttgctctgccacccaggctagagtgcagtggggtgatctcggctcactgcaacctccgcctcctgggttcaggcaattctcttgcctcagcctcccgagtagctgggattacaggtgcctgccaccacacctggctaatttttgtatttttagtagagacagggtttcaccatgttggccaggctggtcttgaattcttgacctcaggtgatctgcccgcctcggcctcccaattagccaggcctggctaattattttttgtaaagacaaggtctcactgtgttgcccaggctggtactcactcgactgcttcaaatgctaatctcttccggaaataccctcacagatgataatgtttaccagctatctgggtatcccttaatccagtcaagttgacaccaaaaattaaccatcacaaacattattatatttctatcaaaagtatatgaatatcatcttggaagattattttaatttttacaaatttgttaatctattttctgagatttttgagaatcttttcctttttctcttttttcttttttttttttttttttgagacagggtctcactctgttgcccagcctggagtgcaatggtgccatctcagctcactgcagcttctgcctcccgggttcaagaaattctcctgcctcagcctcccaagtagctgggattacaggcacttgccaccatgcccagctaatttttgtatttttagtagagatggggtttcaccatgttggccaggttggtctcaaactcctggctttgtgattcacccgcctcagcctcccaaagtgctaggattacaggcataagccactgcgcccggcaattctttttttaaagtgaaatggcataattaaccatttgtattttttttttttttttgaaacggaatcttgctctgtcgcccaggctagagtgcaatggcgtgatctctgctcactgcaacctccgcctcccggattcaagcaattcttgtgcctccacttcccgagtagctgagaatacaggcacatgccaccacacccagttaatttttgtatttttagtagagatgaggtttcaccatgttggtcaggctggtcttgaactccagacctcaagtgatccacctgccttggcctcccaaagtgctgggattacaggcatgagccacaatgcccggccctctgtgtatttttaaaaaatattttcctggccgggcgcagtggctcacacctgtaatcccagcattttgggagccaaggcgggtggatcaggaggctgtaatcccagctactccggaggctgaggtaggagaatcgcttgaacctgggaggaggacgtcgtagtgagccaagaccacaccattgcactccagcctgggcaacagagtgagactccgtctcaaaaaaaaaaaagtctcaaaaaaacccacaaaacttccctgtacttgtcatttattcagaaaacattttttgagagccaggcactgtgatattggttgttgagttgagtcagaagacgcagattggccagttgcagtggctcatgcctgtaatcccagcactttgggaagccagggtgcaagaattacttgagccaaggagttcaagaccagcctgggaaacatcaaaagcccatccctgcatggtggcgggcgcctgtagtccagctactcaggaggctgaggcaggagcatggcgtgaacccaggaggcggagcttgcggtgagccgagatcgcgccactgcactccagcctggatgacagagagagactccgtctcaaaaaaaaaaaaaagcccatctctacaaaaaattagctgggcctggtggtgcgtgcctgtggtcccagttacttgagaggctgaggtgagagaatcacctgagaaagagaattcaaggctgcaataagacatgatcacgccactgcgcttcagcctgtgcaacagagcaagaccatgtcttaaaaaaaaaaaaaagacgacagaccctgctgccaaaagtttacaatgtagtgaggaaacaaggaaattaattggtgatgactacaggatagaatgataaatcctatgatataaatataccaaatatcccatttagggacgtttagggaagggacatctaaatgtcaatttaatgagtcagggagggcttcccagaggaggtgatgtgtatgagctcaattttgaaggacagtgggaaagaagcagttgggagatggaaaaacgcttagagcagttatccttgtatagggttactgaaggattcaattctgagtaaagtgtgagagggtaaaccgacatacgtgaggctgactcaaaaaacactcccttgaatgcaaacagatatgaaagaactttgcaggtattaaagttcaactgtaaattattattattttttctttttttttttttgagatggagtctcactctgtcacccaggctggaatgcagtagcacagtcttggctcactgcaacctccacttcccgggttcaagcgattctcctgcctcagcctcccaagtagctgggattacaggcacacaccaccatacctggctaatttttgtatttttagtagagatggggttttaccatgttggccaggctggtctcgaactcctgacctcaggtgatctgcctgcctcaccttccacagtgctgggattacaggtgtgaaccaccatgcccggcctaactgtaaattatttcaaaattgtttatcttttagttttgcctccctaactagagtgtaatgtctttaagggtggggaccctgtcttttccctctcatttcactacacgtttttcatttatttatttatttatttttacaaggactctggctctgttgctcaggctggagtgcagtggtgcgatattggcacattgcaacctttgcctcctgggttcacgcgattctcctgcctcagcctcctgagtagctgggattacaagcgtgcaccaccatgcccggctaatttattatatttttagcagagatggggtttcaccatgttgctcaggctggtctcaaactcctgacctcaggtgatccgcctgcttcagcctcccaaagtgctgggattacaggcgtgagccaccacgcctggccttcattctactacatggtttttgaaatgccttagtcatccttcagatcttagcttaaagactctcaaacgttctcagtttatgatgcccttagtgtctcagtttttttttttcatagaaactctagtgcaaaagaaatacctaacagctatattaagtaagtaattaggtctaaacaatacttaagaagtattttctaacaagttagtagctgtttgaagaaatgatacatagaaattaggataaaaaattaggagaaaaaaagtagcaatttaatttctttttttttttttttgagacagagtctcactctgttgcccaggctggagtgcagtggcacgatcttggctcactgcaagctccacctcctgggttcacaccgttctcctgcctcagcctcctaagtagctgggactacaggtgcccaccaccacgcccggctaattttttgtatttttagtcaatctcctgacctcgtgatccccccacctcggcctcccaaagtgctgggattataggcatgagccactgcacctggcctttttttttttcttttgagatggagtttccctcttgttgtccaggctggagtgcaatggcttgatcttggctcactgcaacctccacctcccaggttcaagcaattctcctgcctcagcctcctaagcagttgggattacaggcatgtgccaccatgcccagctaattttgtatttttggtagagatggggattcaccatgttggttggactcctgacctcaggtgatccacccaccttggcctactaaagtgctgggattagaggtgtgagccacaatgcctggccttttttttgttttgttttgtttttgagacagagtctcactctgtcacccaggctggagtgcagtggctccatcttggctcactgcaacctctgcctcccgggttcaagagattctcctgcctcagcctcctgagtagctgggactacaggtgcccgccaccacgcccggctaatttttgttttgttagtagagacggggttttaccatgttggccaggctggtctcgaactcatgacctcgtgatccgccagcctcagcctcccaaagtgctggcctcccaaagtggctcccaggcatgagctactgcgcccagcctaatttcattcttaagtaaccacacttactaatgaaatgtatatgcctgttgtgtactgtttctcatacgctggaatcatattggacacttccacctgcatttcttattaattttatctccctgtctcttttctttctctctctcttttttttttcttttttgagtcggagtttcactctggcgcccaggcttgagtgcaatggtgcgatctcaactcactgcaacctcggcctcctgggttcaagcaattgtcctgcctcatcctcccaagtaactggcactacaggtgtgcgccaccatgcctggctactttttatatttttagtagagacggggtttcaccatgttggccaggctggtctcgaacctcagacctcaggtgattgcctgccttggcctcccaaaatgctgggattacaggcatgagccaccgtgcccggcccgtttgtttgccttcctctccccctccccatctctcctcctcactcctctcccctctcctccccttcccttcccttccccaagtgattctcctgccttagcctcccaaataactgggattacaggcgcccgccaccatacccggctaatttttgtatttttagtagagacgggtttcaccgcgttggccaggctggtcttgaactcctaacctcagatgatccacccgcctcggcctcccaaagtcttgggattataggcatgagccattgtgcccggcctattttatttttttattttctttctttcccttcctccttctgttcctcctttcttccctccttccctccctccctccctttcttccttcctttcttctttccttccttccttctttccttttttccttccttctattcattcattctctcattcattcactttgttgcccaggctggagtgcagtggcacaatcatagctcattgcagcctccaactcctggactcaggccatcctcccacctcagcctcatgagtagctgggactacaggcacatcacaccatacctctctaatgtttaaaattcttgtagagagaggtttcattatgttgcccaggctggtcttgaactcctggcctcaagccatcctcctgcctcggcctccccaaatgccgagattacgggcatgagctgctgtgcctgtcccacattaattttcatgtgatacttgtttttatcacagcaatagcccataaaatcagcctcacaaagatatgatgtaattgaaaggaatgtgccatgatctttttgttgttgttgtttttggtttttgttgttgttgagacagagtgtcactctgtcatccaggctggagtgcagtggtgcaatctcagctcactgcaacctgtgtctcccaggttcaagcgaatctcctgcctcagcctcccgagtagctaggactacaggcatgcgccgttaccatgcctggctaatttttgtttattattagtagagacggcatttcaccatgttggccagggtggtctcgagcatctgacttcaagtgatctgcctgtctcagtctcccacagtgctgggattacaggtgtgagccatcgtgcccggtccatgatcttaagttgaaaattaactatcttgtgttcacttagtgtcacattgactattgctgtgtttcctttaaaaaattaaacccagggcactattgtgaatttgctgtaccacattccagtttagatgctaatgcaaaaggattgtaatcactgaagacctccaaaagtcacgtaggagtacagtattttaacgggtagctttctgaattgaaatccagaggattagagaaatcaatctagtagtgggactttttgtccaggtaagagagagaaaggatggggactctgctgggagtatagagacagcacatatattttgatgtcttatttttttgtttcatgttggcctagtcacactgattcttactaccttaaagctaatacttttagcccaattgccatatgaaaatgtgtttgctcttacattttagttgctttaatctgacaaattaagaacatttttacagactaaacatgtgataagagcatttagaactttaatagggaacaggtgtgacagacatactgtttgctgacagttttatgctgcctggtgcgtaaagttaacaaaccatcactttggtaaaggaaaaagcaccagttgttacttactagtctcagaggccttcactttgagggactgggtcctatgaaacatgttcttccatgcctggtttccatcagtcttctccagaagacccataagctggttccattccccgttggaatgtatcctatgtcaacaagcaattgaatatgcctaatttggggctacacaaaagtctgtttccatacccactttgtgtttggagcttccagaatgtgttagtcattgattggtattggaaaatgttacatgtttaatttaacccacaagctttacctgtataattatgtatgatttagttaggtaataacatgaattttcattttcttggtgcctactgggagtatagagacagcaaagatgttttgattgtataattgggtgttgacttaatggttaatttaggttttcaaatagagtttttccttgctatgtatcatttgaagggcaagggaagtgaaaagtggaaatggtaatgtttcagaagtggggaaaggcaaggaggaagcaaaggaagcaagaaggatggtcagaatcaggctgaatcaaggtgggtcaaatatgcctagctttctgtgtgtggataaagtttctgatctcatctgcaagccaggacataacaaaatgatcaactttgagtttcttctttaactcccaccagtagattctgttattcaatggccatagtagcttgaagacgaaagactgcatctccatatgggtcacctaggaattacctcagaggcctgttgtggaataatagagttattgagagtgaggagacctggattcaagtgccagatttctttccagtaactggcaagtcagcttatctcaatttccccttttgtaaaacgaagcgtatagaggagtagatggtcttaccagctccaaaacagatctgtacctcaaaacttctgtgttagatagcatataacccaatatagtcacacccaaaaggcaaaatatccagttactatgaatatgtgtgccttctttgctattctgtagcgtacgagttggagcaccaaggaattatgtttaataaattcctttatttcatgttcatctagaacttcacagtggtaacattgcacctataaagttgagaaaaggaaagctttttgaaatgtaacagttgcttgtgtgtatttttaattaaaaaattttaagaaatgtgctattagggccaactttctaaatgttcttgtttgtttgtttgtttgtttgttttggagacagggtcttgttctgttgcccaactttctaatttttctttttttgagacagggtctcgctctgttgaccaggctggagtgcagtggcgcaatctcggctcactgcaatctccgcctcccggttcaagtgattctcctgtctcagcttcctaagtagctgggattacaggcacgcgccaccacgcccagctaattttttgtatttttagtatagatggagtttcgccatgttggccaggctggtctaaaactcctgacctcaagtgatccgcccacctcggcctcccaaagtgctgggattataggcatgagccatcttgctcagccttattattatttatatagaaacagggtctcactgtcttgcccgggatggtctcgaactactgggttcaaacagtctgcctgcctcagcctcccaaagtgctggaattacaggtgtgagccaccatgctccacctactgtttttttttcttgagacaggaccttgcgctgtcaccaggctggagtgcagtgacatgatcatggctcattgaagcctctacttttcgggctcaggtgattctcccacctcagcctacaggcacaagcttgtagtcccagctacttggggccaatttatgggttgaggttggggagggggtgttgttttggtagaggtggggtttcaccatgttacctaggctggtcttgaactcttgggctcaagtgatctgcctgtcttagcctctcaaagtgctgagattacaggcatgagccactgtgcccagctattttggttgctcttatttaaagtagagtgtgcgtacattatagaaaaattggaaaatacaggccaggtgccgtggcttatgcccgtaatcccagcactttgggaggctgaggtgggcgaatcacgaggtcaggagttcgagaccagcctgatcaacatggtgaaacaccgtctctactaaaaatgcaaaaaaagaaaagaaaaaattagccaggcgtggtggcacgcacctgtaatcctagctactcaggaggctgaggcaggagaattgcctgaacccgggagggcagaggttgcattgagccgagatcacgccactgcactccagcctgggcgacaaagtgagactgtctcaaaaaaaaaaaaagaaaagaaaaattggaaaatacagatcccccacccttccctagctcctggtaagttctaatctactgtctctacgagtttgcctattttaggtacctcatataagtagaattatatgatacttgtcattttgtgtctggcttattttacttaacataatttttgtttgtttgtttgtttgtttgtgacggagtctcgctttgttgcccagggtggagttcagtggcacgatctcagctcactgcaacctccgcctcccagattcaatgattctgcctcagcctcccaagtagctgggactacaagcacatgccaccacgcctggctaaatttttgtatttttattagagatggggtttcactgtgttagccagggtggtctcgatctcctgaccttgtgatccacctgcctcgagctcccaaagtgctgggattacaggtgtgagccactgcgcctggcccataatgtttttaagcttcctccatgttagcatgtatcagaacttcctttttatggctcaataatgttccattatatgtatgcagcacattgtgcttagtcattcatctgttgatggacacttaggttgtttccacctttggttactgtgaataatactgcagtgattggtgttcaagtatctgtttgagtctgttttcagttctttggggtatatacatagaaatggaattgctgagtcacatggtaattttgtgtttaacttgttaaggaaccactaaactattttccacaggagctgcaccattttacatatccaccagcagtatacaaaggttccagtttctccacatcttcaccaatgtttattttttttgtttttgttgttgtttttaaaattatagccattctagtaggtgtgaagggttttttgtttttttttctcctcagaatagtgcatttaaaaaattgtctttggccgggtgtaatggcttacacctgtaatcccagcactttgggaggctaaggcaggtggatcatttgaggtcaggagttgatgaccagcctgaccaacgtagtgaaaccctgtctctactaaaaatacaaaaaatgagctgggcatggtgttgcacatccgtaatcccagctactagggaggctgaggcaggagaattgcttgaacccaggaggcggaggttgcagtgagctgagattgcgccactgcactccagcctgggcaacagagtgagatttcatctcaaaaaagtaaataaataaaaataaaaagatgtcttttaattgggttatatatcttcttatcgagctgtaagagtttatatatttcaaagataagcccctaatccagatgtatgatttataaacattttctcccatcctgtgggctgtcttttattttcttggtagtggtatttctttaaagtaaaatgttttaaattttgaggagatcttacatcttgtacaatagaacatccagtatgctttctattgcctatggtgcagagattaaaaaggctgataagctagtccaaaactacaaaaataaagatgtaactggtatctatatagtgccacgagttgggagtgggaaagagacggggtagtggtaaatggaaaggaaggtggggagggatagggggtcacagattctcattacttctttgaccagttcaagggcataattgagttcaagttaattaaatcagattagtgggatgcccattaagcaaaaagtcacctattttgtaaatggttttcagtgctttttctattgtgtagtcatgacaggaaaaaaatatggaaaaattttccataagattaccacttcttaggtcattttccttgatgaagttaggctctaatcaagaaccaagaggcccatgtagtctgctgtacattatagaaatgggtacagttatttatggtcatcattaaatcccatgctgggctgtggtttgattgcgatattgtttaaaaatgtattatcactaaactgactttaattttagattgagcaaaatatacttatgaaggtaaattttataccaaaatttaaaaaaaattactacttttcaagccaaatgatgatttctctcacacttctattagcacaggttattggagtaacaatgaaggtgattctttgttatctaagcagtgattgatgtttttctaaaaagtcaattaagagaggttacttggcacaataaagttatgaaagtgctccaatgggttattttggagactaagagtagtatgcttatattgtctatgccatagaagtggcatttctagaatatcttgcttataattttaaactcaaatgtctggagtagagcttcattgaaatatgtttccttttaaacttttgctgctgtaccttatggatcctctcaactgagtatgtctctaaatttccttctgtttctaggctataaaactggactgttttctgtcccctgtaactcttcatgcccatgcagtgtgtttctgtgttactatattatacttttgtttctcctttgtttaaggagtggatcactttccagaaaaatttttatctaaacacttgaattgatttttgtatttagagcagttcaccaatatgtctccagagctgctattctctatcatgatttagttttaaattttagataagtttttgattgtgcaggtactgtttcccttttttttaataccatatggtggtttttatattgggattcttatccttacttcatgtgagacaactgaattttattttgctgtgctcttaggatttgatgttaataaaacatttaaatcatcagtctttccttgtgatatttaccttttgttttgagatggagtctcactctgtcacccaggctggagtgcagtggcgtgatcttggctcacttcaacttcggtctcccaggttcaagcaattctcctgcctcagcctcctgagtagctgggattacaggcacccgcccccatgcctggctaatttttgtatttttagtagagatggcgtttcaccatgttgtccaggctgggctcgaattcctgacctcgggtgatcctcctcccttggcctcctaaagtgctgggattacaggcgtgagccactgcgcctcgcctgatatttactttttaaagatgtataggttgggcatggtggctcagtcttgtaaacccagcactttgggaggctaaggtggaaggattgcttgagcccggagtttgagaccagtttagacaacatagtgaaccccatctctacaaaaaataaaaaaatgaaaaaattagccaggcatgatggcatgctcgtagtcccagctactcgggaggctaaggcggcaggatcacttgagcccaggaggtaaaggctgcagtgagctgtgattgtgccactgtattccagcctgggcagcagagcaagacactgcctcaatagatagataaagatgtatggatagtgcatacttttttaaaactaaaatttttaaagtttatatgtatatgtgtatattgtaaaaaaaattcaaacaattttggaagtacacaaagtaaaaaatgaaagttctctttaatctcatcctaccctccttatgtaatcacttgtcaggtttttgcgtgcgtgcctttctggatgtatttgtactcagatataatgcacatgtgtatgcacatacacatagtgcttattgttttgtgacttgctttttttttttttttttttgcttagcagtgtatcttggagagcgttccatatcggaacatacagatagttctacttcataatatgcacaatagtttacttagccattcctatattggtggaagtttagatttgttttggtggacatagacatttgtttacaaaagacactgctgtaaacattcatgtacatatgtctttgtgcacatgtgcaacagtgccataactcctagaaatggaattactgagtcaaagtttgagcaaacttaaacttggattgaataaacttaaataatttgcccaagactgaactgatttatacttctatgaagtatgaagatactggtttctccatattcttaccattgctgaatataacattttattttatattaattttatgaacattagttttataaaatttttacttttaatccagtggaaaatggaatcacattgtcttttttttttgagatggaatctttgtcgctcaggttggagtgcaatggcatgatctcagctcactgcaacctctgcctgctgggttcaagcaattctcccgcctcagcctcccaagtagctgggattacagacacacactgtcatgcccagctaatttttgtatttttgtggagacagggtttcgctatgttggccaggctggtcttgaactcctgacctcaggtgatccgcctgccttggcctcccaaagtgctgagattacaagcatgagccaccatgcccagtcttttttttttttttttttttgagacagagtctcactctgtcacccaggctggagtcagtgatgtgatctctgctcacttctgcctcagcctcccaagcagctgggactacaggcatgcaccactatgcccagctaatttttgtatttttagtagagacggggttttagcatatcggccaggctggtctgaaactcctgacctcgtaatccacccgcttcagcttcccaaagtgctgggattacaggtgtgagccatcatgcccggcctttttttctggggggacagagtctcgctctgttgcccaggctggagtgcagtggtgcaatcttggctcactgcaatctctgcttcccgagttcaaatgattctcatgcctcagccccgcaagtagctgggactacaggcatgtaccaccacacctggctaatttttgtatttttagtagagacagggtttcactatgttggccaggctggtcttgaatttgacctcgggtgattagcccacctcagcctcccaaagtgctgggattacaggtgtgagccaccgcgcccagccagaatctctttatatgcaatatatagtatcccatcacctttgtatagtgaaaatattttcctccaggctgttacttattatctgattatacttatgatgcctttctttgttcaaaagtttttattattaatgtggtcaaacataaatcctagctgttttggttcttgtttagtgccaagcaagatgtcttttcctatctcagtttattttcctctagtactgtcatagggtttttacttgttttgtgttttagaactttaattcacctggcgtttagttttgttgtagtgtaatgcagagatctaattttattttttcccagatggatagccagttgcacaagtatcatttactaaatagaaataaataaaagcacctattttaggtgcttttattacttgttgaattcttatttatacttgggtctatttctggagtcccttgagtttcattgttctatttgtctatttttataccagtaccaccctgttttacttgctgtagttttataaaatcttatgtcacaaaagggacaagtcctcatttgtagttattaatattatttcagttttggccattcactcacatttactctttctgataagtttgagagtcaacttaccaagtttcatttaaaacaaaccaaaaagacaaatgccaatcaaagtttgcttaaagttgccataagtttatagattaatttgtggaaaactgaataattacagtatgaatttttctatctagtaatacagaatgccttctatttatttatttgagacagggtcttgctctgtcacccaggctgaagtgcagtggtgcaatcaaggctcacggcagcctccacctcccaggttcaagcaattcttgtgcctcagcctcctaactagctgggatctgagatgtgtgccaccacgccaggctaatttttgtatttttagtagagatgggatttcaccatgttagccaggctggtcttgaactcttggcctcaagtgatccgcatgccttcatctcccaaagtgctgggattacaggcatgagccaccgcacctggtctgcctttttttttttttttttgagaccgagtcttgccctgtcgcccaggctggagtgcagtggcacgatctcggctcactataagctccgcctcctgggttcacgccattctcctgcctcagcctcctgagtagctgggactacaggcacccgccaccacacctggctaattttttgtatttttagtggagatggggtttcaccgtgttagccaggatggtctcgatcttctgacctggtgatctgcctgcctcggcctcccaaacaaagtgctgagattacaggcgtgagccaccgcgcccagccctgccttctttttatgatattgattttatttgtcttacactaaagtgtttttaatttcttcatataattcttacacatttagttttacatttattcctaaatgtcaccagcatctggtgagggccttctcactgtatcatcccatgatgggagccaaactcatccttttacaaggaaaccactctgtgataacgtgataatggcattaatggattctttttttttttttttcttttgagacggagtttcgctctattgccttggctgaagtgcggtggtgtgatctcagctcactgcaacctctgcctcccgggttcaagcgattcttctgcctcagtctcctgagtagctgggattacaggcacccgccgtcatgcgtggctgatttttgtgtttttagtagagacagggtttcgccatgttggtcaggctgattttcaacacctaacctcaggtgatccacctgcctcagcctcccaaagtgctggggttaaagatgtgagccactgcaccggccaatctgttgttttttatgtcaaatacaatccaagcagaaatccattcttgagggtggggcttccatgatccaaacacctctcattaggccccacgtcccaacactgccacattagggatcaagtttccaacacaggaacttggggcacgttcaaaccatagcacataatattgatattgagccagtttggtatttctgttcctctatcggcgtgtaatttgtagttaagccactgattattttggactttggtctaggagtaacctgtatgagtttgtctatctcttctctgacctatcttgagtgctgtcatagtaggtctttttttttttttttttttttttaagggacagagtctcattctgtttcctaggctagagtgcagtggtacagttatagcttactgccgcctctaactcctggggctcaagctacccacttggctgagccttccgagtagccaggactacaggtgcacgtcaccatgacaggctaatttttccattttttgtagggatgacatcttgctatggtgcataggctgatctcaaactcctggcctcgagcaaccctctcgtcttgaccttccaaagtgctgagattacaggcatgagccacagtgcgtagtccctgtttttagaagtttgttcttcaagagattcttctagttgtaacatctaataatgatattttgctgtggctgttagtatagtatagtatgtgtagatgtcatttttggtagcatacatattatttctgttttataaataaacagatctaagaaagattaaacaaattacccactgtcacactgggttgtgacagagttataaaactttagttttagttataaaaccttaagcactctagttcagtgttctgagtgtgtgatttcatgtaaggttcaggttcttgtgatctttgctgagttctttgtgtttctccaaatttatttccccattagtttgataattttgcaaatgctcaaatgttatgtttgcttaatattattatttaggattctgtctcctttgtacatttttctggtgttgattcttaaattcaaataaattctagttcctaaagagcacctgagatactaaaatgtgattatttcatgaagaggatctttacatgttgcattttcaagcagttgaatcttttgggccaactttcttgcttttgaaattccttaggcaaatgatattctcattttaatgttatttacctttttataataagaaagaagtacaggccaggcgcggtggctcacacctgtaatccgtgcactttgggaggccgaggtgggcggatcacgaggtcaggagatcgagaccatcctggctaacatggtgagaccctgcctgtactaaaaatacaaaaattagcctggcatgttggcgggcgcctgtagtcccagctactcgggaggctgaggcaggagaatggcgtgaacctgggaggcagagcttgcagtgagccaagatcgcgccaccgcactccagcctgggcaacagagggagactccatctctaaaaaaaaataaaaaataagaaagaagtacagtgtggcctgtttagtggttgttaagaaaccttttttctttttttttttttttttttgagataaagtcttgctctgtcacccaggctggagtgcaaaggcatgatctcagctcactgcaacctctgcctcctgggttcaagtgattctcctgtttcagcctcctgagtagctgggattacaggtgcccgccaccacgcctggctaatttttttgtatttttgtaaagatggggtttcaccatgttggccaggctggtgtcgaactcctgacctcaagtgatccacccgtctcagcctcccaaagtgctgggattacagacctgagcccccacacctggcctgaaacctttcttttataaggagaaataggagaggctggtcttgaactcctgacctcaagtgttccacctgcctcagcctcccaaagggctgagattacaggtgtgagccaccacacccagcctgaaacctttatcttataaggagaagtaggagaggctaggccttcatctgagtgatttgatgtatacaaagatccatgttacctttgctgtgtgcctttctccaggtattctcttaagaactgaattaactgattcctaggcttttagaccacctgcaacaatatctaggttgtagtgatacatgagagacttcttaagatattgcttcttcctagaaataagatgagtatgtaacttgtatgttctacagtgacaataagaatttatcatttaattaacaagactaagtgagcgtttcctaagagtaacaagacccctgtgcctatccattaatgctggaagttttcaaattattgcctctgagctcctggactccctgaaggtgtctaagcctggtctccatctttgaccattttccattccttctaatgtagggaatgcaaattgattcaaaatggctgagatgaattaaaagaaataaaaatactggaattgaccaattacagaataaaattaaagtgtgaaaattccagtttacgtttcctatagggtccatttggcatataaatcagatgctataatcctctattatctgagaagccatccgtaaaatgttagagggacatccaggccttacatagatgaggaaacaatctgtttagtggcttctaactcactcttaagttttatttattctattttcttgccattgcttctgaagaatcagcttccccaagcagacaatcatcaagtcattaaagtcataaagactttaagttatgcaaatatggagaattacttttattaattagtagtgaggctcaagtcattttatagatgcaagtcactattgcatcctttgttaatataacccttttccttcctctgtgtcagcacattgcttggcactttgtagacagcaaatatttatggatttacagtaagtcgaagtgttgcctgaattaaggttttgttacatgaatattgtcatccaaaagaccaccaggatggctacatagtagaaagaagagctttattggtgatatcagtttgcatactggggagagagtccctggcatagattgtgctccatctttgaggaggagatgggcaggttgggttttatgcttcacagggcttaatattatatagtagtcttaaatatgaagctggtttgggagaaaagctatacatatttatgaggggaattgggcacatgtgcaatgggtaaacatatgtaacatacatcccatgttcattttggggtgggcttttagcattaaaataaggtggacttgttgggcgtggtggctcacacctgtaatcccagcactttgggaggccgaggccagtggatcatgaggtcaagtgatcaagaccatccaggccaatatggtgaaaccctgtctttactaaaaatacaaaacttagctgggcatggtggtgcgcacctgtaatcccagctactctggaggctgagacaggagaatcacttgaacccaggaggcggaggttgcagtgagccgagatcgcgccactgcactccagcctgggcgacagagcaagactctatctcaaaaataaatacataaataaaataaggtggaatttggctctttaggtcaaaggcgaactataggacacaaagacaagtttgtgtgcaacctctataaagtggctgaaactggcttaagatctgcaactgcatatcagaaaagaatgtttctgaggctggtcctctgtccaatcacagttacagtggtctgggttgtaaatcagagttaggaggggtctgataatttgcaagagtgtgattttttcttgtagccgtaggaatttagaaatttgccatgtcagccaggccctgagccccggacctgtaagcaacttttgtttccttaaccttagggtccatcttagttgataaagggatgtctattttggtctttcagatcacaagggaaaaacattgaggaaaatgttgtaattgtctgcaattgaatggattatatccttcctttttctcctttctaggatataagcttttaaaatactactcttttttttttttttttttgacggagttttgctcttattgcccaggctggagtgcaatggcgcgatcttggctcaccacaacctccgcctcccaggttcaagcaattttcctgtctcagcctcctgaatacctgggattacaggcatgcgccactatgcctggctaattttgtatttttagtagaaatggggtttctccatgttggtcaggctggtcttgaactcctgacctcaggtgattcgcctgccttggcctcccaaattgttgggattataggcgtgagccacagcacccggccttttttttttttttttcgagacggagtttggctcttgttgcctaggctggacggcagtggcacgatcttggctcactgcaacctccgccttctgggttcaagcgattctcctgcctcagcctccccagtagctgggattacaggcacacaccaccacgcccggctaattttttgtatttttagtagagacagggtttcaccatggccaggctggtcttgaactcctgacctcaggtgatccgcccgacttggcctcccagagtgttgggatcacaggcataaaccaccacgcccagcctggagatggagtttcactcttgttgctcaagctggagtgcagtggcacgatctcggctcactgcaacctccgcctcccgggttcaagcaattctcctgcctcagcctcctgagtagctgggattacaggcacatgccaccacgcctggctaatttaaaatattactctttattagaaaaagaaacatgcttcatgctaatttggaggttatctgcaaaagctttctacttaagaaaatatttagcttcgttgagaacttccatactttaatatgtggatttgcgatgaaatatgcatggtcaaatgcaatgcacacatttacaaatactgtgagagcaaactaaaaatgagattaggaatccactagcaatttaagtcagatattatactcagctttctcccactagatatttttttcttaatgataagcttcctttaagagtgattataggaaaaacccttttttccaacctctatgggtgggactggaaggaattctaaaaagttggccagtaaatatctgggcagtgtattcttacagtcaaaggaaagtaagttccccagggatggcaagtattttttctggaaaatccttatcatatgtcttatttatattacagatgttcctcaacttaaaatgtggttgtgtcccagaaaacccattgtaagttgaaaatgtagtaagtcaaagtgtgctttaaacttacaatacagtattttcagtttacgatggatttggaggtaacccccatcataaatgaggagtgtactgaatgtgtatgctttcacaccattgtaaagtcgaaaaatcctaaattgaaccatccgaagttagagattgtctgtaactggtaaaagtactattagaactgttttgaggttgggtgtggtgcctcaggcctgtaatcccagcactttgggaggccgaggcgggtggatcatttgaggtcaggagttcaagaccagcctgaccaacatggtgaaactgtctactaaacatacaaaaaaatttgctgcgcatggtggcggctgcagtggtgggcgcctgtagtaccagctacttgggaggctgaggcaggagaatcgcttgaaccctggaggtggaggttgcagtgagccgagattgtaccactgcactccagcctgggcaacagagtgagactccgcctcaaaaacaaataaacaaacaaacaaaaaacaggcacggtggctcacgcttgtaatcccaacactttggaaggccgaggctgacggatcatgagatcaggagttcaagaccagcctggacaacatggtgaaaccccatctctgctaaaaatacaaatattagccaggtgtggtggcgggcacctatagtcccagctcctcgggacgttgaggcaggagaatcgcttgaacctgggaggcagaggttgcagtgagccaggattgcgccactgcactccaggctaggtgatcgaccgagattccgtctaaaaggaaaaaaaatgttttgaaacagataatagacttacataaagtgttgctgggatgttgtgggctctaaagctgttgtttgcagcaggtaccagactggtgcatctggatgacctccccccatagtacctgcagcattttggggtgtttgggtgaaggtggattgttgacagcacataaccagcatttagattttaaggatctgcctttagatatgggttcatggccaaaagaaaaaaaaagattctaaggtttagtagtcttatggagaatgcaacataaccttagtcttcgatgcttcatagatgtaaatctaaaggacgcctaatagttttatatatatattttttgtttgtttgttttgttttggtttggtttttttgtttgtttgtttgagacagtcttgctctgtcacccaggctggcgtgcagtggcgcaatctcagctcactgcaagctccgcctcccgggttcacgccattctcctgcctcagcctcccaagtagcaggactacaggcgcctgccaccacgcctggctaattttttgtatttttagtagagacgggggtttcaccatgttagccaggatggtcttgatctcctgacctggtgatccacccgcctcagcctcccaaagtgctgggattataggtgtgagccaccatgcccagccatatatttatatttttaatatataataatataaattatatactatattacatataaattttatatattatatgccataagttatgatataaattgtataatatataatatatgaaaatgtaatttatatattatacattatgtgaatttatatatgttttgttttgttttttagagacagagtcttgctctgtctcccaggctggagggcagtggcatgatcatagctcactacatcctgggctcaagttttcctcctgcctcaaactcctaagtagctgggactacaggtgcacatagccttgcccagcaaatgtttttattttttgtagaaacatgttcactgtgttgcgcatgctggtcttgagcgtctgacctcaagcaatcctctcaccttggcttcccaaagtgctagaattacaggtgtgagccactgtacctggccgtacccaatagttttaattcacttcagttgctttaaaaatacatttgtatttaatatctctgctatgttccctctataatgcaagagaagctcagtagcagttcagtggcaatttctaattgccacattaatgggaggaagtgcctggcatctggatctcttcctgccttcaaagacttgccatttgtgcatcatttgtaccctgaagatctttttttttttttttgtcttgtgttttcgttgttttctgaatttaggagagatgcagttgctaagaaatgagataagttaggccagttgggatggctcatgcctgtaatctcagcactttgagaagctgaggcaggtggattgcttgagcccaggagtttgagaccagcctgggtaacatggcaaaaccccatctctacaaaaagtacaaaaattagctggatgcagtggcatgtaccactagtcccagctactcgggaggctgaggtgggagaattgcttaagcctaggaggtggaggttatagtgagctgagatcgtgccactgcactccaatctgggtgacagagtgagaccctgtctcaaaaaaaaaaaaaaaaagtgagagaaattgaacaagatggtttgatatttgaccccataaagttgtcaacatttgcctagttgtagtaaaatagagtaccattttgtacttgttgtgaacatggtgcttttttctccctccaaatcttagtgcatgatccgtaaaggttattgaattgtttttcaacttcttaaaggaaaaatttcagttaaaattttaggcacttattctaaatgaattgagtttatatatttgtcactagaaaattactatctttaggtcaggcatggtggctcatgcctgtaatcccagcactttgggaggccgaggtgggtagatcacctgaggttaggagttcgagaccagcctggccaacatggtaaaaccccatctctactgaaaatacagaaattagccaggcatggtggtgcacgcctgtaatcccagctgcttgggaggctgaggcacgcgaattgcttgaacctgggaagcagaggttgcagtgagcagagatggtgctccagcctaggcgacagagcaagaccctgtctgaacaacaacaacaaaaagccacgatttttagttcaatagtagcttgtaattgtagttatagtatttgtaagttgctatggttttgagtgttgcttttaagactgttgttagttacccactaagttttaattgcaaggaaatttcagagaatgtgaaaaagttttggttaagactggaaaatatctattcttgctttcctcaaaactggcttcagtgattacttaatgacagcagaatgctttgaaaatatgctctttaaagtctagctgttactaaaataccataataacttatatgtaagtgatagttgcttttttgttgttgctgcaactgtggtaagaggaaagcattattag

SEQ ID NO: 13 - DNA, 6680 bp, Homo sapiens
  source 1..6680: mol_type = other DNA
tctttgccctcgcgacgccgccacctccggaacaagccatggtggcggcgacggtggcagcggcgtggctgctcctgtgggctgcggcctgcgcgcagcaggagcaggacttctacgacttcaaggcggtcaacatccggggcaaactggtgtcgctggagaagtaccgcggatcggtgagtgcgcggggtctggcggcgccgctgggcccggcctcgccctggcggggcctgctggggacgccccgcagcccggtcccccgcgcggtgtggctccgaggacgctccagccgcgcggccgccaaaccccggcccccgccccgctcggccgtgacctctggcgcggcgcccccatcccgcgcccggcccggcccggcccgcggctacgtggcacggccttggcgcggaggaacccgaagcgctcgcagtcggcgcccacttcgctaccggcacctttgggcagcggggtccagaccttcgccgggaggccgggcaccactgcccagcctttgccattcacgggtgaaaaaagtaaccgtagcatcgtgcggcctttccctctcccgtcctcattttctgcatctggaacggggagtggctgattcggagtccagtgaagaacactgtggagatcaatgtgcagggcagagagagagttatttcagatgcacggagacctcacacggatcatccctgggagagggcacaaaggcccagagagggcaggcattcgcacaaggtcacactacactagaaagacggggcctggaagagaaccccaccgccacatccggggtcctctctaggccaagtccttagatggcagctcaggggcacacataagagtcatccaggctaattgccccctcattaccaagagggaatctaagctcagagaagacttcggagaggaagggtatctgggttgagtctttgaatacgagtggattttagcaagactaagaagcaaacagcaagaagggggtgggggggcgcggggccaggagttccagctgttgtgcttcaaagagtctaaagctggaggctacgagtggtggaagatgaggctgaaacgactggcaagggagcaggcgggaccttgaacactacattgagaggcctgcatgtcacattatgtgcagtgaagaactcccagagtggacctcttcaggatggacctggggactggtgtgaaatggctggggagttgaaatctaatgaacaggtgggccagcgtccagttttggatgaaccacacaaaaatagatgtcaacatttttctcctgggagcaacaccatctttagtgaagaccagtactctataagccttgaaattttcgattatgctgggagtcttggggacagtaatccctgcttgattgtcccccagagtgtcgtgagtttcaaatcagatgaaggcgtggatgcacttagtaaactgtagagtgctttgcacctgtgtttggtggatcccagcaggaacttcatttagaactctgggcaaagaaccaagaacagggcccgctccaattcaggcctcctgttctctctagggcagctcaccagagagccccaggtttagcgtctgaccagctctgctacttattaattcgttgttcattattgaacacctactgtatactaactagatactaggtcaggccctggggatacagtggtgaacaaaacagatacatttccactaaatggagcttacatggggtaaggagaagaaagacaataaacaaggaactgagaaatgcacgaggtaattcctagtagtagtaagtgctaagacaaaaatagaacaaggtcacacagctagtaagacagtaagaatttgaacccagacagtccagctccagagtctatgctcttagttgccaagttcagcagtaaaccagggaacagggagtccagaaaagctgtaattggtgctgagttaacccaggctaggcttgctgcttgggcaatatgctcattccttcacctgcaaacatttactggctcctactacatgtctgacactgggtccagctctgatgacatagtcatgagcaagattgacatggttgatgccctcaggctaattgggaccatagtcatttagaccagtatggatgaatgggtgaccacttgggaatgtgtggggttatgtgtagtgtgtgcctttgtgaatggtttacttcttctgtgtacaaatctgagtctgtgtctgtgcttgtatatgtacatatgtaaattaactgtgtgtacttgggtgtgtctgtctgtgttttggtttctaaggaccaagctttttggtttcagggatggaactagaagccagattttcccccttccaaaagagcgggcagacatgcaagttgtgagttaaaaataagcaagctttggccggacgcagtggctcacgcctgtaatcccagcacttcaggaggctgaggcgggtggatcacaaggtgaggagttcgaggctagcctggccaacatggtgaaactccgtctgtacttaaaaaatacaaaaattagctgggcatggtggcgtgtgcctgtaatcccagctactcaggaggctgaggcaggagaattgcttgaacccgggaggtggaggttgcagtgagccaagatcgcgccactgcactccagccttggtaacagagcaagactctgtctttaaaaaaaaaaaaaaaaaaaaaaaagctttaatgttctcattgcccagggatccagcagggggaaaaaaaggaagaaccctaactgaggaagggagttaacagtcccagtttctcaccattccaggcacagtatggtgtatgctgacctcaaattgaggaggttgttctaatagccagtggccccaggcatgggtcctttctcacctggtggaggtagggtacaggaggtacagctcagtggttcaatcatctagcccagtagttctcaactaggagtgattattccctttagggcacaattggcaatgtctggagacattgttgattgtcaagactgggcatctagtgggtagaggccagggatgctgccaaacatctgataataaataaacaggacatccccccgacaacaaagaattatctgacccaaatgtcaattatggaggatagggctaggctgcctaggcaccggctagggttttaaatccattaataatatatacctagaagctaaaaacatagcatttgagccaaaattctaatcaaagtcttataatcaagttccattagccagctttgtatttattgcctaaaggctttaataaatttaaggattagtctaatgataaaagaaagtggtaggctgggcatggtggttcatgactgtaatcctagcactttgagaggcttagctggtaggattgcctgaggctaagagtttttgagtccagcctggacaacatggcgagaactgtctctaccaaaagtaaaaattaaaaaattagccaggtgtgatggcacgtgcctgtagtcctagctatttgagaggctgaggtgggaggatcacttcagctcagaagtttgagactgcaaacggttggggggatgtcctgttatgattatgccattgctccagcagcaacaacaacaaaagtggtgttagttctctggagaggagggggacaaaaaggtgattgccctggagttatgagggttcttttctcaagaaaacctgtgtctatgttcccatgcaggcgtttgtgtttgtgtgcacacttactcattcatctgaaacttactgagactttttcatatgccaggcccagagatgaagtggacatagctcctgccctcagtaggttcacattctagaagggagactgacacagtgcagagtggcgagtgctagctgactgagccaaaaattgagcccaggtctccctttgtaccccctcttatcagttctcagtatgtgctcaccagtatgtgtgccccagtctgtggatgtgctgtgtgtgtgggcatgtgtggtgtttgctaacatgtttgtatcgtggtgcatgtgcatacctatttatgtatgttgtatacttatgttcacagatgttcatgtatgtgtgcacacatctgtaagctcctgaatgtttgatttcatatgtgcctgtctgtgtgcatgtgtttgtgtatgtgtgagagcactggacacacatttacatatgtgtacacagtgttcttgtatgtgtgaggcagtattaactgttgagggagtcacatatgtggatgtgtcagggcatgtacaggttcatgcctcttcactggcttgtctgggctttgttttgttttgtttctgtcatacaggtgtccctggtggtgaatgtggccagcgagtgcggcttcacagaccagcactaccgagccctgcagcagctgcagcgagacctgggcccccaccactttaacgtgctcgccttcccctgcaaccagtttggccaacaggagcctgacagcaacaaggagattgagagctttgcccgccgcacctacagtgtctcattccccatgtttagcaagattgcagtcaccggtactggtgcccatcctgccttcaagtacctggcccgtaagtcctggtctcttcatcccctcacacctcccttagctggctgaggccatggctccctgggcagcagaagccactggctggttgggtgacctggggccccttccccttcctgatcatctcaggtggactgatgctttgttccagcactaatctttgaggagagtggaggcaggtagaagctgaggggtattcctgcctaagaatatctccatacctgctgcctctcacttgtccctcagaagtcactcttttggacttttctgggatcctgttttcacattcaggggctcctagaaggagacatttaagtcagtgtgaactagatgagtttatggacatatgatggagaaaccaaggcatagacaggggaggccacctgcttggagaaagctgaccaagatagtagacaggcatcttcaccctgagtcagtggcggagtctgtaggccatggagggagaccttctaagctaaaataccagatcttagtatttgagaacaagatcccttctccagctgcagaagcctcagagccacagaatgggctcatgggctaagcttgccattctgaccatttcttccctcaggccttctcctctggaggccccatttttgccttttctgattccgtgcttctggtggcctttgtatcccttgccaccaccccaccctgcaacccattcacctggaggagtaaatgagaagcaagagtgcagcaaacaaaaggtcccttactgcggcaggtttgtgttttgctctgtggctcagtcctaatgttgatttttttctctgtgttcttttattagttccttcccagttctcacagttatagatcaaacccggccttgcttttagaagcacctggggagctcttaaaaatgcacaaggctgagacctactgaagcagggcccaagaatctttattttaagcactcccctgacccccagtgattctgatgaaaccagtccatggactaacatttggaaaccattaaaactgaactagagaatagggtgtagactattcagtagttcgaagtcattaataaaggaggatttgataccactttatcaagcacgtcacagaatcctacagcagtcgttctcaacctcggccccactttggaatctcccagggggcttttgaaaaatgctgatgcctgagcctcaccctcagagattctggttggagtggtctggggtgtggactgggcatcaggattagctgccaccagggaaagatggacactgagagtgaagtcccaggagagggtacgcagggtagcacgctttgctctccttcctttttctctagagacttctgggaaggagcccacctggaacttctggaagtacctagtagccccagatggaaaggtggtaggggcttgggacccaactgtgtcagtggaggaggtcagaccccagatcacagcgctcgtgaggaagctcatcctactgaagcgagaagacttataaccaccgcgtctcctcctccaccacctcatcccgcccacctgtgtggggctgaccaatgcaaactcaaatggtgcttcaaagggagagacccactgactctccttcctttactcttatgccattggtcccatcattcttgtgggggaaaaattctagtattttgattatttgaatcttacagcaacaaataggaactcctggccaatgagagctcttgaccagtgaatcaccagccgatacgaacgtcttgccaacaaaaatgtgtggcaaatagaagtatatcaagcaataatctcccacccaaggcttctgtaaactgggaccaatgattacctcatagggctgttgtgaggattaggatgaaatacctgtgaaagtgcctaggcagtgccagccaaataggaggcattcaatgaacattttttgcatataaaccaaaaaataacttgttatcaataaaaacttgcatccaacatgaatttccagccgatgataatccaggccaaaggtttagttgttgttatttcctctgtattattttcttcattacaaaagaaatgcaagttcattgtaacaatccaaacaatacctcacgatataaaataaaaatgaaagtatcctcctca

SEQ ID NO: 14 - DNA, 32744 bp, Homo sapiens
  source 1..32744: mol_type = other DNA
cggggctcaggtgcctggcagcgcggccggggcccaggaaggggagggggcgaacgctggagcgaggcgggggcgggtgaggagggggtgacgccggacgcgtcgacagcgcgagggttcgcgcgtgagctgcgcgggtcgggcctggtaccgagctttcctgggggctagcaggtcgtggacgccggctcctggaggagagccggtaggagggagtgtgaaggtgtccgcggcgtcgtcgacggcggcgccggccatggaggagacgcagccgccgccgcagcctaagctgcccctgtgcgacagcctcatgatctgggtgagtgcgaggaggcgagagggcgagggggccagggggccgaggcgaggagcctggggcgcccggttctcccaggtgagctggggctacctgcacagggtcccggcgcaccctgcccttctcacctcgtgcccttgaccgagagaatgccacctgcgggtcgacgggcaggtgtgtgggcgcgggttggtgtccgggggtgggggtaaaggaagctctgggagcgtaacagtggaggctctggtctcaaccagaggattcgacctgcctggtgccctaacagctgggatatgaaccaagcacccatcctcttttctccccgctgccccattttctccccctgaacagcgcccgagccctccactttctggatcgccgactctcttgccttggtccgcttgggcgtgaagaccctttccgaaacctaaccctgcatcctcaaactaccttgctctacctggacacaggtggccaggaggtggctggctgttttagttcccggaccaatgctccttcaggactctagaacatccgattttgtagaagccgcttcaaagagatgtttgtatttcccgtatggagaaaaagatgtgttgggagtcgggggtcgttttccctttttctcgctggccctctcctcctctaaatggacagcattttctttaaagaaaatgagttgacatttttctttaggatttatctgtgtttaggatttttgttaatttgtgttgggtctggacaggcatatctgtccccagattgttcaatattccagtcagcaaaatgacatcccacctcttagagttacttagatatcagtgctggcattcaggtgtggttcttaacccatattgagtaaagatggtgtttgatgagccacaaggtgctgttgatgatgctcatcccaaaccagttgtttagttgcgtctaggggagtgtgtgcagatggaatgtaaacagacgggatcaggaggctgtaatcggttgagattccctagtgatctaatgcatctaattccaaagaatgagaaatctaggtttatggaaatgtgtgaagcctattggaaatagccataatttaaagcatttacactttgtaagtaaataacttttgcttttagtggaatgcaaatatttagggtttgtgagttaaaagcaattagctaactgttcagctgaattttcatttgaaataggtattggggtggaagtgctgtatttaagactgtcgtagaaacaaggcaacattacttttaatgatttgttttgttaaaacagactaattaaagggtgtatccgaatctgctacattattgtaaacctcaattgactgaagtgttaagcttagtctttatgatgtcattgatttacatgtgaggtggtggagaagcacaggattttcttttgtgttgtaatattttaaaatattatgtgactgtatccactcttttaaccagaatttattgacttccaatgttgagctaggcactggggaggactggagtggtagccagagctgtgtgtaattacagtggaaggtaaaattccgtaaaagctgcaaatatgttgtaaaccaaatgataaggaatcacagataacagagtaaaattggtcgttttcttcagtcctctcttgggctgctgagcactgtggagaaaattgaatgaccgtgcaaactgttgcctctactaatgctgttactgtcaaacgcaccttttctcctaacattgcccatacttaagaataaccagacagtttctctcacattcctcttagcaaacctttatcagtattctacctgagcccccaactcttattcctctggggcaaatgaccacctccttatccttggctctggctttagactccatcccttccacctcttttaaaacgttattgtatcatttgttccctttctgtatttacaactactttctctccattggctcctttctctgtatgtataaacttgctgaagtattccccttttttaacagagaacaaagagccactattccgtgttaaagtcatactgtatttcccctttccttcacagtaaaatttgagttgttttattctcaccctttatgcttcactctcattcagtcttcaacccactacccttgagtttctttcctctaagactttcacttcattaccagtttgctaaatccactaagtgttatattaccattttcttacttgatggttcctttgtgaaattatcttgtcttggtttctggttatcttgtctgttgccttttctttacctctttagatgatttccagtgaagtttactgtcttttttttttaattaactaattatttttgcctttgccagcaaccgcactgttgatcttacctcacctacccaactttctccaaactcacctcaagcaacagttcttcaagcctatcatgctgcattgactttctatttgttgaagaagctaagctgttttaatgcatcagggatttttttccctctacctagaatattctctttctagttcttccagtggttggctgcttccgtcattcaggtcttgggtcagatgttgcttttcagggactctttgttacaaccatttctaaagtttgtctcccacccttatcccactgtaacctgttaacctctttctgtcttatctataacacagtactttctaaagtaatccagttggcttttgggatcagagctcttacatgacctattttctgctctgtccctaggagaacactgacaactattgccaataagacaccaaatcaaagtggtgatagtaaatatcattgccttggttctcacctcagagactagtgtttcaccattaagtgtgatatagcttagttttttataaatacttgggagtgaatttttaactgggtcatagaggattgttggatttcagcaagtagaaatcagtggaaattagttctccagacacagggaagagacactagtagtaaaacaaatggtctcctttggctatagattaaagggagatagtggaacacacacatttgtcatgataaccctggctcaaagatagaagattaaaaaaagttatgatggggccaaatcatggagataagacagttgggaataactcttctttcagcgctaggaggagaatggagccaacatcaacagaattagagaagtcatcaagaaaagttagttatgtgaaggaatgcctcttgtggcaattttttaaaaattgcattttatgatttggaactcaccgtcttaaaataattggctcttagaaatgttgtactgctacttagcagaaaattcagggcaaaagggtaaatgtgggtatcatttacatgttggaggacatgtatgagagtttgaagaaatgtttgtataaagataaatttaattctgctacttggttctgtgacattggaaatttgtttaatatctttggaccttactttcaccaataaaattagaaggttggaccaaatatatttaaatgtttttcttggttcttgcattctttgacaggcagatgaaggaaagagtaataattaatatatgcctaaatttagaaaattattaaaacctcaattatttttatgaagatcttaaaacttaaagcaatggttgttttttttgtaatgagcagctggaggaggagaatatgaaaataaagttgatccaagattgagtttttgttggctgttggttgtgaaaaccccattttccttgatttctgtgacatttatattaaagtagtttaggaacagcatttccacatttctgattatttgttttatttagaaatatagaagagagtaaggtaattatttgccagaacactgtgtttagcggtagacacctgtggaaaccctgtctgtcttttttgggtcactcactaaaaagactttagttagaaagaatacattttcttttgtctgctttgacctcactcgccccaataagcatttttttttttttttttttttttttttttgaggcgaagtctcactctgttgcctaggctatagtgcagtggcatgatctcggctcactgcaacctccacctcccgggttcaagggattctcctgtctcaccctccctagtagctgggattacaggcatgtgccaccacacccggctaatttttgtatttttagtagagacagggtttcaccatgttggccaggctggtctcgaactcctcacctcaagtgatccacctgcctcggcctcccaaagtgctggaattacaggcatgagccactgcacccagcctccccactaagctttttaattaattcactcttcttggttgtaagcctttcaattgagtgaaatcaaattacattctgttttctaatttattttgcagctattttaagaacttctcagagacactccaatgtccatggcaggaaggaggggaaattgattttaatctgaacatagtggtcatggaggtagtcccttagcatgtgtacctcttattttgcctagtattctgtgcctctgaaattgtccttttaaaatcatgaattgtgtcaattttgtaaaaagttaatgatgtaacttctaagttacacattaaaagttaatgtttaagttggaagggctgaaaagtggaagtcacagtttattttccttttaaagatgccctaattcttggagtttctcttccctgtacatccacccagttgcaaaatccttcttattttgtattttaaatattccattaattcatcatctcctctcagtcaatattatgctgattccctctactctatttttgtcatcagagccattgcaggaaccttctaactggtctgcctgactcaggcataaagctactctgtgtcactatctgctctccaaaatatgccaaagaatgttactcttccttattacttttcagtgatttttcatcacccagagcagtggttctccaaaattgacatatttaagaatcagttggagattttcttatttaatatgtctagagattctgatacatattgtttctaggccctatacttggagaaaccctgactcatagctaatgtgctaacagctgttgagcttatgccacatgccaggccctgatataggtatatttgctatttcacttaattccccaaccatcttgtgaggtagaaactactctactgtttcttattatgtagataatgccattaagtgtaaaataagtccaagcttcttgtcatggccctttggagtcctgtctctttaaccctgttggttgtcaccccttccccagccttctttgcactgcaaatccagtgatactgaactgcatgttccctaaaaataatatctcttctcatgtatctgtacttttatcatattcctatttcctgaagctttttttccttgactatttctttacttagaaaatatgctactcttccctctagaccttccattcagaaatcatctccgagaagcctttcctaaatacaaaccctaattagattagttgacacccattttttgcagaacattttgtgcatactgtaatcatgggacttaccatattgtctagaaatgatttatgtctcttcctcctctccttaacttttgactgaagctttaagggtagaaacctggtggttttcctttgtagccccatcatgtgccacagtgtctcacatagcgtaggagcttagtaaagtgtctctgtgtgttttgaaaataactggctaggtttagtttgctggtatcattcatctgtgttgtgttagataatggaggtctgaatctccagttgccaactctgaaaatgcacagaaccattaaaagtgaattatggcgggagagaattttattggattaagatagttaaatggtaaactaagaaattattagtgaacagtgaaatgggtgagtatgtgtgggaaaagagaatcatagtatatttaacttaaggtgtttataggttgagattacctttctagaaagtttatgatccattttagctctgatgtaatttgctttctaaatttttttctatctcatatttgcttattgtaaaaagaggttattattccgcttctcttcaatatatacatgaatatttaacagatatatgtgaaaagttagtatacctaaagccaaaatagatagaaacaacttgacgtgatagatagggcttgattcttcaagacgtaaggccaatttttagataggaaacagaagtcctgtcttatttcagagctcatggataaactgtaagtaggtttagacttgacatttctagcctttgtttttctatcaaatgatatgagtgaaattttaagttgcaaatgttgggttatctttaagttctttttctgatgttctgctaaatatagacaaaacacaagactagagttatatacctggttttgtattattccaaattatgtattacttatgcatggcatcaatatgttctaatgtcctaggcatgattttgtgaaatgtttagtttatttttataaagttacacagccatagagacatattagcatagttccatttgtttgtctgggtctacatttaaacaaaacaggaccatgttttttttttttgttttttttagctgttttcaatttatgtttgcattttgtaatgctaccttgtaggtataaagaagcagtaagatcatttgatttatgtcattttagctgcagacattcaatactgcctcaccttgtcaagatgtcaaacagctgactagtggagttgccatggcacaagttcttcatcaaatgtgagtagtggtcagactctccctgaaaagcattgtaaacccaatacataccaaggaagaaaacttggacttgaattccaaaggttgttgcaactttatcttacccagtgacatattcaggaatatggcaccaaggcattcttgcaggtagggaacaaaaagtttaccacctcattattcctggcttgttcatagagatacatcttaactggatatgtgatcaggattcttatttattcaagttaacttattttaaacttgttatgagcatgttcacactattttaaaactataaaagaaacaagttaatgatacaattgcttatggtgttttctttggttgtactgttgtcattttaaggtatccgtgcatggagattattatcttaaaaattattgaagcataaaatattggattttgaaaaaatttttaaagaattaaattttaaaatgtatttctgaattaatagtagtttatgagttcaccaataatgaaatgaggaatgaatgaaatttgaagtcacaggtactgggaaactttaataaagtggttgtgtttaggctggacccattttatgtaatcatataatatcaaaagtttctaaatccatttttcccctaatatttgccaacattgtttaagggttagggttacggtctgtaatatgagctgcaccctaagtaggacaaacaaggccaattctgcactcacaatttattaattaataattataacaactttatattagcttactttgagaccagaatcctatctcgtcttcactgttttatagtcagattatttgtcaccatcatcttgtaaagatttgccatgatttacattgaaaaccctttagatgggttaacaaaaatcctatgcctgtcttagaaaaacaattaaaatgatataaaaatcctacttgtttagaatcttcaaaatgatctcttgcgaatagactgatttaatggttaatttatgattaatactttaaaagacaaacttaactaacatgttaacttttgaggaggttgacagttattgtaaaacataccttactcccattctgtcttaaaaatatttcttaaatgtttgattggccgggtgcggtggctcaagcctgtaatcccagcacttcgggaggccgaggagggcgaatcacaaggtcagcagatcgagaccatcctggctaacatggtgaaaccccatctctactaaaaatacaaaaaattagccaggcatggtggcgggcgcctgtagtcccagctactcgggaggctgaggcaggagaatggcgtgaacctgggaggcggagctcacagtgagccgagatcctgccactgcactccagcctgggtgacagagcaagactccgtctcaaaaaacaaaaaacaaacaaacaaaattttatttatttatatcttaattgattttgaaatgatttaattcatcagagccaaacattctggacatagttcttttctcatgatttgagaaagtcatcattgttttttgtcactagaatttatgccttgccttcttctcatcatgctatgttgtgaatattggtgtagatgcagcaacattgtggttggtatgaatgtaaggctggtatgcattcactcatttcaacagtcccattcagagctgtcctttctatatgttttggtgggctttggtagctttatgccagaatacaatcaaaagaaacctgtttttaccatgatgtgatgcatatagctctttgacctcctatgctctagcactggacctgatgtttggagtagagtcagtaaattttagctaatttttccacagtctgttggattatgctgttaatgctgatcttccctctctgtgctttttctttatttcttctttcttttgtctgtaacagtcttctaagagcttttctgcagtaacaataaaatagtcaatcagaaattctctgtcaccattaacaaatggccagtgccctaaaattaaccctaaatatctctctctttctctctcgttctctctttgcttcattcacttgattttatatgttcttaggtgtctgagcctccttatcatccaggggctactttttatttattttctttttaaactcctttacagttttggaacttttcagaagtctggatcctggatagtgagacataaagcatacatttttccttagttggaccagtatgtcctattccgattaaaaggttaattttaccatatgtctttgaacatttcaaagcactttaaatatgttacaatttttttttttttttgagatggagtcttgctctgtcacctaggctggaatgcagtggtacaatcacggcccactgcaacctccgcctaccgggttcaagtgattctcctgcctcagcctcctcagtagctgggattacaggcgcatgccaccatgcctggctaatttttgtattgttaggagagatggggtttcaccatgttggtcaggcaggtcttgaactcctgacctcatgatccgcccaccttggcctcccaaagtgctgggattacaggcgtgagccaccgcgcccagctcaaatatgttataatttttaacatattgcattgatgactattgtggctgacatcgtgtcacatcaaaattgttactgaaggttagaagagaaattctgctttttaaggaagcagcaaaatttaaccaatagtttttttctatttacttgaggcagatatttttccaaatagtaatatctttataaagtggtgtctaaactgtttaacttagacataaagagtcatggagttattgctagggttctacagtttcttaattattatcttcaatttgaatatgtagcacataactctctttttcaaatgcatgtagaagcttcagttattttaaaaacacatgggaaaaaactatacaactgtgttagtttcctagggccactgtaccaaagtgccacagaccaggtggcttaaaacagcaaaaatcaattctctcacacttttggaggctagaagttctaaatcaagctattttctgggctatgctccctccaaagcttctaggagacgattctcctttgcctcttccaaattctggtagtcccaggcattctttggtttgtggcagtgtatctctactctgtcttcacatggccatcttacctctgtctgtgtctcttttcttataagggcaccagacatatcagattagggcccatcctaattcattatgacctgatcttacctttattacatacatgaagaccttatttcaatcacactcacaggggataggacttaaacatatcttttttgatagtacagaacaactgtaaatagtgcgtgccatatcttcaaaagaaaggcttagcttcttcactttaagcaccagttaacctctctgttcctattgtctttgactaaactttttttttgtaagagggagaagaatgagacagataatgtaggatattcagagaccttaagaatcatgcatttatttgcttattcatttagcagatatttgagcatttaacatgataaaccatgatagccaacatctgaatatatactaaataaaagcatcattatagaacttatttgactttctttcatttaaaatttactagtttagtgaggtagatgttatttttaccttcaatttatacaagaggacagaggtataagtagttgaaattgcttttggaagttaaatgatgagtaaataacaaagctaggatttgcatcagtttggtctgactccaagttcagtgctcccaaccagctgtaatcattgaaatgtactgaagtcatcccaatagatttttactttgcagtattaataaaatgaaagtcagttgtgtataaagtatagatagatgtccatataagcatggacataaagtgtagatagttatgtgtacagtatagatagatgtccatgtaagtatggacatccatctatggacatctatccatggacatacttacatgaacatctatctatactttatatacaactgtccaaaatatagaccacagtttaatgggttaatagagaagatttctggatatttcaagaagaataggctctgggtatacattgaagtgacacaactatattgtttatagtaactagtaggtatttcttactacctgaattcagttggtaaaactgtggaagataaatacaccggatggagttaaaatgtagtaattcttacttagttttattagaaaataattggaccatattttggttcattagtcctgtgtcccctttcttatttgatatcccttgagtgttattgaagttctgggaaatataagaaaaggagctaattattgggtgccaagactctaaggcatgtagaggttgtagaggttgcagcgcaaaaggaaaaaaaaaaaaagagatgccctgagatttctgaggttggagatcaagtttaatagtggaaaaggttgactgccattatagttgtttgagaagggtgaatttgtgtataagaaagcaggagatatatttttactaagttagaaagtatttctctgggctaaagttgatttgagatagaaaggaagatgaggaggaatgtaagacaaaaggaattatcttggaaaaactagagaaaaatacattacatctagatccaatttctaaaggtaattatagcatagaatcacatacttggatttttttagggtcagttagaagactggggtggtagtcagggttgtccagagaaacagaaccagtagagggtgagtgtgtgtgtaatctttgtctcaatatacacacatgtgcacacacatgcagattctttttctttttttgagacggagtttcgctcttgttgcccaggctggagtgcaaaggcacaatcttggctcactgcaacttctgtctcctgagttcaagcgatgctcctgcctcagcctcccgagtagctgggattacaggcatgtgccaccatgcctggctaatttttttgtattttcagtagagaacgggcttctccgtgttggtcagcctggtctcaaactcctgacctcaggtgatctggctgcctcggccccccaaagcgctgggattacaggcatgagccatgcgcctggcccaagattttttttttaaggaattggctcatgtgattgtggaggatgaaaagtttaaattctgcagggtaagccagcaggctagagactcaaagggcagctagagttggaaagccatctgctggcacaatttgctctttctttgggggagttcagcctttttcttaaggccttcaactgattggatgagacccacccacattatggagggtagtttgctttattcaaagtctactgatttaaatgttagtatcatctagaaaatatcttcccagcaacatccagatgggtttttaccaaatatctggttactgtggcctagccaagttgacacataacattaaacatcacaactggcgtgactcctctggttaggagtttttattacttaatctgatataaaaaggaagtgaattggacagttttgactcattaactcgattcattcagtcatttcaagtaaatacctggttagcagtgtagcatttacacatttagataaattgtttcggtaattgcagacttggcatctgggaatagttgagcacaactaatattaatctgctcaaaagaaaatggttatgtacaattattatatgttgattatgaataaaaaataaaatgattacaaattccaaataaatgaattgaaagtagtgaagccatttttttttttcttttggttatcatagccagaagagttatcttctggttttagaacatatgagcagaaaggtttcagttttgcgttcttaaattcaatttacaaccttggaaaagaagctctttactttttcccctattttagttggcatacctgtaaagtaagaatttagatgagacctttaagacctcttccagcataaacattctgtgattttgaagttgttttacccttagaacatttatcacattctccttcgagtatagttatttgtgctttttacttttctcctttaataactacttctctaagagtcaaaagggtaaattatcttcatattaatcttgctcaattccttactcagagaaagcatctagatatttgtttagaataaagtctattaatgtagttcactatatatagtcaaatgttgttcttcaaaaccttattaaatacacaaaaatttagtatagcaattctttgtcttggccatcagtatcaatatgggactttgcttttcattaaaactaaacttgtctttgtagacttctcatttaaactcattctgcttaattctactcagttgaatagattaattttgggccttgccatgtgctattaatagtatcactcagggcaaattacttagactctctcatcctcaattccctaaatagtaagactggaaataataatggagtatttgccaagttaccatcatatttaaatgaaataacttggaacaatatcaagtgcttgatacagagtagaaactcattaaaatgttggttttttacctcttcacggttgtgacttttgcatcttcctggtagcagggcacctagtattaaatatttagtaaatgtttattaaattgaaggtgcaaataacttaaataacttaatatgataaattattgctatataagtaatattcagtattgttattaaggataggctttaagacataaagtaactttctctgttggctctatttaattttttgtgtaataaaaacattttcatctttagtattttttttgttgttgtttcagtgatgcagcttggtttaacgaatcttggttaagccgaattaaagaggatgttggggacaactggagaataaaggtatgcagaacaaatgggagaagcacttgatccaaacagtggtcctaaagttagcactaagttaaccaaatctgtttttcaaattaacttatagtactttttgttgtgtatagtttgagttttaacacatgtattctctcatgtaactaccatcataattaaatagaaaatattcctattaaccaaaaatatgcacttcaggcccattctctattaatccctacccccagccttgccctaggtagctatagatctgttttatgttactatggagttcatttctggaactctgtataaattgaatcatataatatgtactctttttgtctaacttcattcactcagtgtaatttttcagtctcattcatgttgcctgcattagtagttatttctttttttgctaagcagtatttcattagactgatattttgtggtttgtttagctattcacttgttgatggatgtttgaatttttaacatttttgactattgtgaatacaacagctacaaacattcatatatgaatctttggatagatgcatatttaatttctcttgggtgaatttctgggtggaattgctaagttgtataagtatgtgcttaaccttataagaaactgccaaactgattttctatttttaagtcagttttgttgtgtcttgtaggacatttgtttcatacaggatgtatgatttgttgatacacagtccttaactgaattactgtgctaataatgtgctaataactgatctttaatgatgtttccttttcttttcctgctattggttatttgtgtcttttgaatttattttccttgataagtctggctagatgtttttcaattttacttatttattttttaaagaattagtgtatgttttctattccattgatttttctgatttttattatttcctttctctcacttaacctgttcttctttttcttgcttcttaaggtggaagcttaaataatcaactctaaacccttttttcccctaatattaaccaccatcttagccacatcccacatattttgacagactgttactttattttcattcagttcaaaatatttggtaatttcccttataaagttttctcctttgacctatgagtaaattagaagtaggtaattcaaattcaaaatatttgaggattttccagttgcctttcttttatttattggtttctaatagatctgagacaatactctgtattgagaagttattttacatttattgagtcttattttatgaccgaacctatggtctgtcttggtgaatgttccatgtgcatatgaaaacagcatgcattctacagttgttatataaatatagattttgttaaatttgttgatagtggtattttccatatctttattgatattttttcttattatactatgtgtatagtgtagtatagactctgtagagagcccttaaatctctaatgatgatttcgattttgttgatttctcctttgcatttttttgctttttacttcatgtattttgaatttctgttattaagtttattacacactatatttcttgtgtgttcttgaatgaattcacttattatgaaatgcttttctttatccctggtaatattcttttatttgaaatcaaattagctctaatattaatgtagccactacagattttttatgattatatttttcattagtatttctttttccattcttttaatctgcctatgtctttttattgaaagtgtttcatgtagacacctaatagttgggtcttacatttttatccagtttgacaatctgtatttgattctttattgtaaaaaaccttctatttcttacattcatgtttttgttcaaatccttgaacatctttaaactagaagttttaacattgtctcaattcttttatctttcatttctgaacccatgtgtattgactgagttttctcctaattttggttcccactttcctgcttcttcacatctgtagtaattttttaattggatgctaaacattatgaattttattattgaatgctgatttttttttttaagtttttttttttttttcctgagacagaatttcgctcttacgcccagcctggagtgaagtggtgcaatctcagctcactgcaacctctgcccccgaggttcaagcgattcttctgcctcagcctcccgagtagctgggattacaggtgcccaccaccatgcctggctaatttttgtattttgagtagaggcggggtttcgccatgttggccaggctggtcttgaactcctgacctcaggtgatccaactgcctcagcctcccaattaagtatattcttttgaggagtgttgaattttcttcttgcaagcagttaaggtacttggaatcagtttgatcctttaaaggcctatttttggctattgtggggggcagaactaaagttattctttcctttaggactaaagtagactcattactaagctgtgacctttttgggggtctttagtgaatgttttgtgcgtgtagcatggtgtcttcattctggctagtgagaatttcaaaaattttttggcctgtataatctttgggaatggttcagtttatagttccctggattgttatttctttggaaagaacattcagtttcacccatccacatgcaaactggtatttagccaaagagtcaaaggaaccattttacacaaatctccagagcttgctcattccatagctcccatcttttcatcgtctgccttgcaaattcaaactgcccaggccttcctgaacttctaatgtcttatctcttcaatcggtgagaacatcaggcttggtgtttggtttccacctccctatgctgtagtctgaaaattgcctcaagacagaaagcttgtactagtgtagggcccattttctgtttgttttcattctttcagaaagcagagttctgtactacttacttgtctaaagcttgcaaacaattgtttaatgtattttgtcttattttctagttattagtgacaggagagaaaatcaaaacccagttaacttgctcatgactgcagctggacatgcctgtgtataaatttttacagtgggcccttgagttcattgtgacccactttaaatagaatcaccctacttaactaaacactgattaaatctctgatggttaaaaagcatcatgtgtttgtatttatagaactctattataatgtttttgttgttctttttaattaggggaaagtttttattgtctttcatgctgacataacttttctttcattattaatctgaaataagaatctcttatttttttcacattaggccagtaatgtaaagaaggtccttcaaggaattatgagttattatcatgaggtatgaaaaccatctgactttgtttaaatgcatcatgctatacgaaaattactttaagactgaaaaatcacttggttttttgtttataatattttactggaatgtaagtcataattagaacatgttttattgtcatttttatagaatgctcatttgtgaaaataagcttggatatattgatttgtaagataacattgcttaggtattgatactctccgaattgattttcaagtagaattaccttcatctttaatatatttgattttgtgcaatactataaagtagactttataattaattgaaataattttctatttaaagcaatattttgacatttcttcccagcgtaaacagtagcaaagacataaatgagattatgctcatacaagtaaattggaaaaaatgcaaaataaaagtagtattataaagtcactttagatagtacattagtcaaatagttttgttttttcttattcagcatcataacaagttctctagtagggtttttgatataagagagtttattgctgaatgattggcagcttttgaatgacttttccattaaagaatttttgtttctattctttaaagtcgtcacacaattaaacttgtaatttcttcccaaaatgtttaatattctctaaaatttttcaatttattaaatacctaaaactaattctgaagctgttttaatgccaagaacccttttaatcagctaaaaaataagaaaaagaaagataagaccaggaaaaaaaattaatccattagatttgttgctcatttgtaaaagtacagtgatttacattgtgtttctctgttaattgattatatatgaaaatattatgaatattctttggcttaacatatgcttattatttaatggacaggcataagttttatcatagtagactaggccaagtgcttcttaagttaaattcttctctctgacagtgaaatcaaaggatatttgatgtgaaaccaaaaggaaatatagtgcttttggttggttactcagaattttggaatgttgcctgaacattgctaactggttttaataattatttatttgtcatttgttattttatctgagttgtttcgtgaatttataatttattttcattgtaatattaaatgtagcaaattctttgcagccgacataaatgagtgatctaatttattttaatattgtagtttttggggcagcagatttcagaagcacttatccctgatttaaaccaaataaccgaatgttcagatccagtggagcttgggaggttgctccagcttattttaggttgtgcgatcaactgtgaaaagaagcaaggtaagtgaatttcaatcatttgaggatttctactttctagaaactttctacattgctatataagctagcattaaatcatactattaaagcttggcagaaagcaccctgaaacgtaaaccagaagatctgaattctagcccaactctgtcgttgaaaagtggcataccttgagtgtcctatttgtacctggattctgatattcatattcagtggctaaattagatgtattttagtttaattagtttaatatacccagtacataagacttagtggatagtcaataaaaattgtacttattcatttgatacattatgtctattttacatgtaagaaccttatgtggattcagttttcataaataaatattcagctactaatttataattcaagtttcttcagataatattctgctccattcagaagcatatctgtccaatatatcctccagataagtggtctaatgatataaatggaattgatgcattatattggtatatccaaacacagtgatccatattttgctgagtacaaaaggatcatatttggttgcatgtaatgatgaatgatgaactgaacaggcccagacctccttcccttgagggctttaatccgtttcggtggtgagacttttgacgctgatgtttttttgcatgattcatccaaacttgttcttagtacaccacctttatgaaagaataatgttgagtgcttaagtttgcaaaatgcaaatacttcaagccagggccttggaaaacattcaacattgtctgactaatgaagaaaggatataagctgggataaatttacctacaaactctgaaaggagaaaaataaaacaaaatacatgaaattaattgtagtttatcaattataaaaggacagtgactaggtgtcagagaatttttatattagtccatctctactatttactagaagtttttttctaggacaagccagtacttctctgtaggcttttatttctcacttataaataaagttaaagatctgtatattgggtttttcataaaagcagggacatttgctcatggaaggttaaaacttctctaaatatttaatcacaaattgacaagtagtaatttatttataaatctagtaattttttgttgtaatcgtgattatttttattttttcattgattaatgctttgttaatattttcattgctggttatttgtaacttatttttgcttaattaatcttaaccaggtttgtaagtttcgttagtcttttttaaagagccaacttttggctttgattctattttgtttttactatttagttttgttgtcctcttttatctcatacgtttttcttgtgaattaatcagctgttccttttctaagctataattgacattttaagtggtaattttgccttaaagtgattattttgttgcatcctaaaaattttaatattatatgtaatattttcataatttacttctaagcactattgagcaattttgtccagttttaaaaggaattcaattcctagatacataactttttaaaagctttcacacttttgtattttgctgtatgaattgatttttaaaatgatttcaaggtactgactgcaacaatctcaatcttgaaagaatgaattcatttgcttaacaatactcagtttatcttggtgaggaaggaagacatactggtggacaaataatgtatttacataaaggattatctgtgggtagatgaatttttatagtctattaatttgatggctaaggtactatgtgtaaagagtagatttttttcagatttgatttttttaaatcatagaacatattcaaaatataatgacactggaagagtctgttcaacatgtggtcatgactgctattcaagaggtaagttatatcatgttcctatgagtataaaaatcctaaaccaaattatacaaaacttttcatactttatgcttttcttttttaaaaacttgctctttgttgtaagtttacttccccttagctagtgggtcttccttttttacccccaaaaatattttaaaaggcctttaagcccaattttagtacctctgcattttaaaagctggttaataaattaatattatcaagtctctttaaatcagtggtcctcaacctttttggcaccagggaccagttttgtggaagacaatttttccacagacccggggtggcgggcagggggaaggttttgggatgaaactgttccacctcagataatcaggcattagattcacgtaagaagcgttcacagtggggtttttgctcctatgagaatctaatgctgccgctgatctatcagcaggtggagtccaggtgataatgctctcttgcctgccactcacctgcttctgtgcagcccagttttaacaggccatggactggtgccagtccatggcctgggggttggggacccttcctttaaataacttcaactaagcaggaaacgcaggataaacagtctctgaccagaacagtctctgaccagacaggagtttttcttttttcttttttttcttccagttataacaatctttcctgaatttttcatttatatataccatatgcattttcaaaatgttagatctgtgagcaaatatggtggtacttaggtttagttttaccaggtaagttggattaaagctagtctagttatctaagttgagccaggaaggattcagaattaatgtggtgcagagttgattcttaatatcagcctaaaaggctgagatggattgcagaggagacttcaggaaaagcagactttggaaggggcatgacttagagggagacgtcatacaggacttttgtagtctgtactccctgagtttgcattgttggtttggattcagagtatccctgtacataagtaaatctgcctttcatctcagagttattttacaggatctttttttcatataatcgtaactcctacttttaaaatgacttctcaaaaaggctgcattaaaaaagtattaacttataatgtatatgaatccctttaaaaattatttaatgtgttcactctttatcagtaatatgtcttttaggacttgtattgaaatttgtcagtacacaagtattttgaatatatctatgtatttaaagcacaatttacttatagtgtcctcactaatatgcttgaatttgtgttattaagttaaggctctaataaagtttttatctgaatagcgttctaaggatcctcaaattaaggcaaggaaaagctaaatataaatcattttactatcctttcaagaaaatatattttacttcataaacatcacattgttatacttaattttattattttaatttcctagttgatgagtaaagaaatattgagctctcctccaaatgatgctgttggagaattggagcaacaggtgagtattttagtatggaagaaaaatgttgaaagcaatgttagggtttctttgccaattactctcataaggcttacaaagagagcatatacaataatattttcttctgtgaaatttggtttattcttctgcatgatcccaattgaatggcagtggtgttggtctccagagatttttgtgatcatgttgaaagagttgagtggcattgaacattccttctgacacttgtatatttggaccatgctgtatggtaacacagtgaaatagaggacaattaaaaacaaactctgctaagttttaatttatttaataatgtaatttttttcactgttgctatcctctcacttgatattgaagaaatagctcaaaggccctgtactcaaggctcctttccttcaggactgttttacagggggaaaagacactcttctcccatttataacccaatctgggttatagagtaaagggtaaaaggagaggcaaatgcattaagtactttttctgttatatttttaaacacttcttcttttatgagtgtcgccagtcatctcaagaagtatttcaaaagaaaatgtttaaagaaataatttatttaaatgtaaacatgctgtgttttttcctaaacatttttctgtaataaaactaaacaatgccttctctaatacttgtaaaaatattttgcagggatttacataaaatgtagttctgtgggactgtagccttcaatgttaatgaggtcatgtaaaacaaagacaacaattttttttattattattatactttaagttctgggttacatgtgcagaacatgaagttttgttacataggtatacacatggcatgatggtttgctgcacccgtcaacctgttacctacattaggtatttctcctaatgttatccctttcctagccccccaccccccacaggccctggtgtgtgatgctcccctccttgtgtccatgtattcttattgttcaactcccacttatgagtgagaacatgtggtggttggttttctgatcttgagatagtttgctgagaatgattgtttccagcttcatccatgtccctgcaaaggacatgaactcatccttttttatggctgcatagtattccatggtgtatatgtgccacattttcttaatccagtccatctttgatggacatttgggttggttccaagtctttgctattgtgaatagtgctgtaataaaaatacgtgtgcatttgtctttgtagtagaatgatttataatcctttgggtatatgcccagtaatgggattgctgggtcaaatggtatttctagttctagatccttgaggaatcgccacactgtcttccacaatggttgaactaatttatgctcccaacaacagtgtaaaagcgttcctatttttccacagcctctccagtatctgttgtttcctgactttttaatgttcgccattctaactggtgtgagatagtatctcattgtggttttgatttgcgtttctctaatgacctgtgatgatgagcattttttcatatgtccgttcgctgcataaatgtcttcttttgagaagtgtcttcttttgagacactttgcccattttttgatggggttttttgcttttttcttgtaaatttgtttaagttctttgtagattctggatattagccctttgtcagatggatagattgcaaaatttttttcccattctgtaggttgcctgttcactctgatgatagtttcttttgctgtgcagaagctctttagtttaattagatcccatttgtcaattttggcttttgttgccattgcttttgggttttagacatgaagtctttgcccatgcttctgtcctgaatggcattgcccaggttttcttctaggatttttatggtcctatgtcttacatttaagtctttgatccatcttgagttgatttttgtataagatgtgaggaaggggtccagtttcagttttctgcatatggctagccagttttcccaacaccatttattaaatagggaatcttttccccattacttgtgtgtgtcaggtttatcaaagatcagatggtggtagatgtgtggtgttatttctgagggccctgttctgttccattggtctatatatctgttttggtaccagtaccatgctgtttttgttactgtagccttgtagtaaagtttgaagtcaggtaatgtgatgcctccagctttgttcttcttgcacacaattgccttggctatgcgggctcttttttggttccatatgaagattaaagtagttgtttccaattctgtgaagaaagtcagtggtagcttgatggggatagctttgaatctataaattaccttgggcagtatggccattttcacaatattgattcttcctacccatgagcatggaatgttcctccatttgtttgtgtcctcttttatttcattgagcagtggtttgtagttccccttgaagaggtccttcacatcccttgtaagttgtattcttagtattttattctcttagtagcaattgtgaatgggagttcacccatgatttggctgtctgttattggtgtataggaatgcttgtgatttttgcacattgattttgtatcctgagactttgctgaagttgtttatcagcttaaggagattttgggctggtacaatggggttttctaaatatacaatcatgtcatctgcaaacagagacaatttggcttcctctcttcctatttgaataggctttattgctttctcttgcctgattgccctggccagaacttccaatactatgttgaataggagcggtgagagagggcatccttgtcttgtgccagttttcaaagggaatgcttccagtttttgcccattcagtatgatattggctgtggttttgtcataaatagctcttattatgtttagatacgttccattgatacctagttttttgagagtttttagcatgaaaggctgttgaattttgttgaaggactttgctgcatctattgagataatcatgtggtttttgtcattggttctgtttatgtgatggattacatttattgatttgtgtatgttgaaccagccttgcatcccagggatgaaaccaacttgatcgtggtggataagctttttgagtgctgctggattcggtttgccagtattttattgaggattttcacatcgatgttcatcagggatattggcctaaaattctcttttttttgttgtaagagtcatttcttattaggtaaattcaaaaaataatttcccatatcagtgtatatgtgtgttgtgagaagagtatatttttctatttttctatatttgtgtcaaaacacgatttactaagatttaggacattttgtatttcagcttaaaagagccttggaagaacttcaggaagcactagcagaaaaagaagagctgaggcaaagatgtgaagaattggatatgcaggtacgggaaaaaaccctgagctgagaaaaacttcctctttaagtttacagaagatttttattgtaattaattagttagcactatgttttgtagattaggtttgacttcatggaggtaacattaaaaggatttcttataggcttgaatattcaagtattaatttcataaatatttttctctgatagttgaaatttgctggcttaactttctttgagaaaatcactctactaattttaaaatttcaattatttagataagaactcagttttcatttttgtaaaatgggaaagttaaagtttctacttcatattgtgtatgtgaatattaagtagaggtaatttatggaagtattaagtggtacctgacacttcccccccagtaaattcaagtacatgttcatatttatgtatgtagtctcttatggcaaatttttgctaacatgtatgtatatataaacgtgtgtatataatcttgtattcatatgcacatgtatgttaaaatgaacttggcatgagcaacaatagttaatggttaagaggttagattgtcaaaccaggctacctacattcagaacctggcatattactagctggttatatgctccaggcacattacttaattatcctgtacttcagttttctcttttgagaaatggagtgatgatagcatatatctcccagagtggtcgtgagggttaaatgagttcatatatatagcacttagagcctggcacagaagtgctgtgtttattgtttgcatatgatgttactgttacattaaaatacaaatgtgcatattatgcaattagtctagaaaaaggtgtacagaaggttaagtgtaccttcataatatgctgtatgtaaatggcatttttttgtttgaataatgagctaaatttgtagttgattctctgaaaagtgtaagggcaaggagcaaaggtgtggtagcattatccttgctagaggaagtaaatatctaaaatgacagggctagataatgcttctaacccttaagcatttggaaataaagaaaaggaaaagacttggttagggtgactagtcacttagggcagtgggagcactagaattcaggtcttctaacttcatctgtaaaaaccagtcctctgtatttgaatgaagtaagtgtctcaagtaagggaaatttaatctgttctccttcgcacctttcctaactacatattgtaacatataccttcagacacatgcaaagtacctgaaatgtgttcattttaaatgggatcatattcaccctgtaaaataccttgtaggaaaaacagaagattgagccattcaggtattaccattctcttgtaggatctaggtacagtcttctgagaaattcttattcaataaagaacacaaaattctgcatttaaagatttatgtgtttgtaacaaataataaaggatatatgatctggttttaggtgaaaagtgcagaaatcccaaacagagggagacagagacaggtgcagattgaacttatcaccatgagagcttgttgaaggagatgcctggaaccaccacccagtgttccaagtcacggttctggggtgggaacaaggaatgtgcctgtctcgcacccttcttactcatgtctgtgccagagatggctctggagccacattgaagcatatggataggagcaagattggttattcaccaggtgttcaaaactaaaatttgcccttggtcctattcgtttttagaggagtcctacccagttttgatgcctgagggtgttgtttttcctctgtcagtcattttttgacagcccctacactcaagctagaatgagatattcttttctttgtgccctacccttaccctatagtgtacttctatcaaagcaccttcaacatcttttacataattgtttacatttctactgtaagggtcttgggggcagaaactctttattcttttttgtatctgaatcacttagaattattatgcatgacaggtaatagtagtcactaaacagcttacataataggcatggatgcatgcattgaatttgggaatagaaagttatttcattatattgtctgcccagggacagtttcccagactttgtagttctcatttagaagacagtaacttgcctatatactgtgttcagggcaatcacttgatgttaatttcctattagttctttgtgtcaatgtgtagtcatatttacataactggattgaattacatgttttgaagatatggatagcaaacttattcagtaatacactggaaatcagaataggttaatcaatggtttttcaaactaattcttaatcatatgtaaaagttctggccttatcaaaagacacagccttagctatacatttttaaagatgtttttaaatggaaaagaagtagaaccaggagagaaaatcatgcatgttttaaaaatatgaataaaaaaaattgctccaggtactgataatgatgtggttctacactaacatgtttttattcgttttaaatcataagcaaatagtttaaatgtacaaatggaaacagcttagctttttgttattgaatcattaaccaaatgtgcttatttcttgaatatgtgatatgtgactgataattttatactctcaacctatcatgataactttgaacatatgtgtgtatattttggcttagcaggtgacatcattctaaaaattagtttatacctaaaagaggagacaaattaattttttgaagtttcatttgtgcatcaaattttagagacttgaaaacattttcttccccaaacaaaggcaggcatagcattttaaagatatagttactctattttctccatatgtgtattgatttgatttcttttctttgacttacatctcctagactctgaattctgcattcagaaggatccttagaactcatctagtatgacagaccaagctatttaatggcttagtcagatctagaatccagaactctagactctaataagaatttttatttttttgttttttttctactggtgcttatgtatgtgtatttgtttcttaggtgactacacttcaagatgaaaagaattcactggtttctgaaaatgagatgatgaatgaaaaacttgaccagttggatggctcttttgatgatccaaacacagtggttgcaaaaaagtattttcatgcacaattacaactagaacaattacaggaagaaaacttcaggtagcatttttaatggaaatcattttatggagttctgtctattataccagtagcaaaaagtcacagtattaacagctaattactaagcattgttaagcatctttaggatactgattaagctcctgaaaataccagatggtataagtggttcctgttatcacagggctaacatccagttaggaagtgggagatacacataaaaacaaaaccatttaaatatgtgttaaggaccaaatcaaggccataggacagccaataggagttcaaggcagtgattgctgaaacctggggagaacaaggagtttctcaaataagataggtaaccctgtaataaatggaaaaaaatgtaaatcgtaagccaagtaggtgcttttcattttaacttgtatatttctttaacaaagtcatgtatccttacctttaataaacattgattatcttttgtgtgcataccactcagccatgaactataagaccttgaggacaggcactctaattgtactatacatatttttttgttacttaattttgatataacttcaaactccctaaaaaagttgcaagaatactacaaggaacttctttacaccttttactcagattcaacaattattttacagttttctccatttgctttagcaatctctgtatatagtcatataattttcatatttttatctgaaccatttgagagaaagttggacacatgtctctttacccctgtatatttcagtgcatatttcctaagaatgaggacattctcttataagccacgttattttcacattattgtgaaaaatgatataaccattaaaattgggatctttttctggactctcatttcatttctgttagtaaatttgtgcctgtatgacactatattaattactatggttttagagtatgactcttgagatctggtagtgtaagtattccaattttgttctttctttttcaaaatttgttttggctattctaagtctttagcattttcccataaaattgagaatcagctgatcagtttctactaaaaaccttttcaggattatgatttggattgtataattgatatcttaactatatagagaattcctatctatgaatgtagtctcatttatttaaatatttaatttcactcggcagtgctgtattgtttctagcatagaagtcttgtatgtcttttgttaattttttacccaagtattttgtttttgatgctattgtaaatgcaaattcagaattattgtgaaaatttgctgctaatctgtagatagatgtacaattatatattgaaactttgatcttacaccttgaaacttgtatcttaaatatattgaaacttttatatcttgcaaagtttctaaattcacttattgagctggtagtttgtttagatttaaaaaagaaatccttagtccattcctgctgctttaacaaaataccttagacagggtaatttatgaacaaatctaccactcacaattctgaagactgggaactccaaaatcaaggtaccagcagattcagtgtctgtttgagggatagctctctgcctccaagatggcttcctcttgctgaatccttaggtccctttaacctctttcataagagcactaatcccattcaaggggacagagccctcataacttaatcacttcccaaacggccccacctcttaataccaccacaatggggattaggtttcaacatgaattttagaggaacacagactatggaatctacagtcatttcatctattaatagaactttacatcttcctttcattatttctgtcttgtatttattttccttgccttgttgcaagagcagctgtcattgcttttttcctggtcttagagggatcatgtgcaattaggatccgtcaagtatgatgctagctgtagagttgttcgatgtgctttctgtcagattgaggaaattccccttgtttccaccctgctaaaagttttttgtttttgttttttttttcaatcatgattagctgttgatttttgtcagatgatttttctgcatcttgaaaagatggtgtagcttttctttttcattcttgtaatatattgattgatttttgaatgttaaaaacctacattctggagataaaccactttgttcatactttattatcctgtatatgtgactagattcagttaataatttgaaagaatttttataactgtctttataatagatattggtctaaattttgtctcttgtaatgtcttgttcaggatttatcagagttctactagtctcatagaataactgaggcatattctctgttcttctgttttctgaaagagtttatgtaaaaatgttatttctttcttaaattttgatacagtttatcagtaacacaatttggacctatggttttctttgtgagtgtgtttttcctgacaaatttaatttctttaatggtcatagggcttttcagatttcctatttcatcttgtgttcagtttggtaagttgtatttttcagtgtatatgtttatttaagttgttgaacttattgacatgaagttcttcataatattctcttcttatccttaaaactcagtgtctatggttatttaagttgtttaatttatcgacatgaagttgttcataatattctttttttatcgttataatgattctggcagatgtgatgatatacccttttacattcctgatattgcttgggttttctttcatttttcttgatcactcttgctagaggttcatcagttttcttaatcttttcaaacatcctttattggccttctatattattagttttagatttctttctttatacttaactttggatttaaatttctctcctttttctagcctcttaaagttgaaacttagatcattgattttaatccttccttcccctccctccctttcttccttccttccttttccttccttccttccttccttccttccttccttccttccttccttccttccttccttcctccctcctccctccctccctccctctctctctctcattctttctttctttctaacatagacctttaaaactgagaggcactggtttactgttgtcccccaaatttgattgcttgtctttttgttattgtttagtttgaaactttttctaaattctgttgtgattttttttcttgacttgtgggttatttaggaatgtgttgtttaatttacaaagatttaaagcttttctagacttcttattgcgactgatttctaatttaattaacctttattattagagaacatggtccatgatatttcagtcttttggcatttattgatacatattttattcatcatatattttattgtgttgagtgttatatatgcatttgcatatatagtcatgcaagttacaattatataattataacaaatcatggaagttataaatacttacttttttatttgttcaaggcttgaagctgcaaaagatgattaccgtgttcactgtgaagaacttgaaaagcagctaatcgaattccagcataggaatgatgaattgactagtcttgcagaagaaacaagagccctgaaagatgaaatagatgttcttaggtatggcatgtcttaaaaaatataattatgccatttctgagctatttagtcaatttgagtatttcatattttaatcagggattcataggattattcctgtatatcaagtattgatcagtttttaatccaggctgatagttttaacttcttttatgtttgttgtttgggcttgcagttcatggataatactcaatttttattaggacattttcacattagaacccataaacccaaaatgagacctttaattaaaattttataaatggagtacttatagatacatttaacttgacctccctgtacctgtcatattttgtgaaatttttgtgtaaggaaatttttgtgtaaggaaatgtcaatccatattttgacatttgataaactatagatcaaatataggcaagaatcctaacttttttt

SEQ ID NO: 15 - DNA, 32744 bp, Homo sapiens
  source 1..32744: mol_type = other DNA
gtgtgcgcgagcaaaggagcgagcggggagttctaggcccaggacagcacctatttcctgctggtgtaacagagcaccttctctcactactctggccataccacccccgcgatagaggagcaacacagctgtctctgtgcgctccggatcagcgcttcctagatttctagccggatcgtttggagaagggctctgcatcttatttccggtggcggtgaggtgcagttgccatggtgattagagaaaggccgagatctgtccagctgcggtgagaggaacgctgaatcgccgaagagaattggctgcgcttccttgtttgtgagctagaattaggtagcaaacagctcgctgtctctgtctcttcgctccctctgtccctctctgtgcagctgcttctccttcctctgctttgtctacttctctgtcataaacatttggtccatgtatgtacctaaaatgtacatgtaaatgcggttttatttccagaggaatacaaaaatagagagatggtgcccgagattacctgtgacggtatttcactgtgtagggacggtgactggacggctttctgttttcacttggccctgtagaagccttaggcgcttgttaacagtttatttttcttgctattgtgtggctggttatttatggagccgtttgctgcaatgtactctctaggcccctgtctcagtctcgggccggagttttaagtaagggaggtttccaagcctgcggggggtgcaattatatgtttatttaagctttagtttggtttctcgtcacagaaaggaaaagaataaaattctggcacatttctgccttgggatttccatgtgagggagttgccttgtttggaaagaatatttgaggacgatcctaaaatatacttatattttaaaattgcttattgcaaagtgaaattcattctcccttacttcttgaaacagttttctttcacatttgtgaggagatgcatgcacacatatgtgtttagaactctgatgcttaattatagtattaccaatttgcagtaaccagactgtgacaccacatccctgtggggtccttctaaatctggtgtaatatgaaagtgtcaggcaggcggcctgcgtattataaatagggtacttcatccatgataagcaattattatctttctttcccaagtgtaaatgatctatataattcgaaaaggtgcaagtgatttaggcctcctgagtaggaatgcaatgagtcctgaaggggaccctacctgtgttatcttattattgaacttgaaatattcaatttattaggttggagatctatttttagaagtcaaagctgggtagagtaatattggaagctgttagaccaccagtagaatctaataccccatagtaaccattgttcagtactatatccacattaacaaagaagaaactgttcgtgaaatttacggctttttgccacttactgctagctgggtgacattgctacccctcaatttcctcatctgtaaaacggacaaaaaaatacctgaccgctgtaatagggataagacaagatgtatgacagttctttaagctcttatgtacagaggtgctatacaaaccccaaatattgttattaataaaggaacacagtaaaactatgataatgctataaataagacttttaaaatatagctatttgaaatgtggggctgcattattgagatgttaatgaaatgatcttgttgatcctgctgtggaagatgggtgtcaactaccactcatatcccgattctcattattctggagtttctcattatctgcagtttatttagcacttactacgtgtcaagcaatattgtatatgcttcacatgtattaactgatttgctcctcttaaaaacctgatgaagactgtcatctgactttcgtattttgagagaatagatgtgtgctcttcctttgttcagtgattcttctcttgtgtatatctttgttcttttggctattatcacatatttgaacaattatatatatacatatgtatatatctaaaattagaaattaactgccaaaggcttattcttgtttaatatataatacgtccatatacaactatagtattcgtcttttacttccacatataaaacttttaatatcttgatcttttcatatatgttataaattttcttctatgtataaaatcttgattctcctccctgtatttgaaagacatggtgacatttgtgttttagtgactcacattgacaaacacatttttaaattattttccaatagaatggcgatcagtccacgaagcgatgcaactttctccagtcagaaatcaacaccttcagagagtcctcgaacaaagaaatttccactaactgaagaggaaatattttatatgaattgtagagctgcctacttaactgtcttcaaaagcagcttggaaaacattatttctaaagatcaactttacttaggtaaatttttaaaatttttaaatctttcacctttttgttgaaagttaataaataggtccgaaagactgaaattagaattaccttgttgaatcatcccagtttcttagtgaagcttgagcaatggaactacagtaagctattatgtcatatcatatagttacatattctaggaactacaaaataaaactttcaatgtttatacaaactagatgggtaattgaaagcttctatcaattactacttgcttaagatacttttaattctcattttggtgctttaagatttatcataataaaattaaaacgcttttggcctcttaagtcactagcctgaatttgacccatactgaggaaagtgtaaaggatgtgtaaaaatgggtggaatgtctgaaaaagtgaagtactgagagataagtgaacttttaaaagagaattgagttggggtttttttatttcttatttttattttttgttttgtcttttattgcttctgtcctttatcacatttaaaaattcctctcattacaaaggtccccaaaaccaccaaatttggttctttccaggagtatcaaatgatttggacatctttagtcatgagagagtagtaaacaacagtactagataacactgactactcatgtcagtttcatcaaggctaataactttatgggtagagaaactgagttattttgccaattttataatgaattttcttaaaccaaaaccctgacatatttgtgcagcagtgtcttgagtttgtatccaataagatctatttgaggaaatgtattttgaggaatacaagaattgacaagattaaaatttatttgatgtctaaataaaatacattatttgtaaagtagtttaaatgcaaatgcacatgactgacttttaaagtcatgtttaattttgatttacataattttaaaattactaaaatgctctattttgaattttaagtatttgtgtttaattcatatacattaaatgtttaggcagacatccaataaatttttttttttttgagacggagtcttgctctgtcttccaggctggagtgcagtggcgcgatcttgattcactgcagcctctgcctcctgggttccagcgattctcctgcctcagcctcctgggtagctgagattacagttgcacgccaccatgcctggctaatttttgtatttttagtagagacggggttttgccatgttggccaggctggtctcgagctcctgacctcaggtgatctgcctgcctcggcctcccaaagtgctggcattataggcgtgagccaccacgcctggccaataaattaaaattacttctaatttgccattatttctaaaataatccgagtttttttttgttactgttttgaaaatatactaagagaaggaatctgctaagtttaaaagtttaacatgccttccactactatggcatttagtttgtgaatcaatgtgtatgtattactaaggtgctatcaatcttatgaaattatctgggaggataactatacagtgtttgtctcttcagtgttatatacacttttggttttagggtggaatactctcttaacgttgtaataattgattttagataaactattttttaaaaaggagtaacatgaactagagctgctgcttcttgctacacctttcatctatatccttctgccacttatgtgcatttccattttaaggtcagagacagcggtagcattactatagctttaagttccttttttgtcaatttataaataatacaggattatagatgcatgtcagaactttaaagtaaaccctggcaaaagatccatatcatggtgtcaaaatttaaatatctacagctacgtgatatttttactatcatcaaacttaatcattagatccagctaattctaaacctagagattaaagttagtaggaaatagattgtatcaatttcttagctatggggacatctgcttactgagtacatgttttggcataattaattttattctgagaaagttgttcttgtctaattaccagtacattttttaaaacaatattttctttgttactaaagatagcagcaagcatatgctaagctaccacttgtgagaaaaagttacataccttttttctcaaaactgaacagaagatataattttctttcatgtggacttcaaatgctggcaaggatgtggagaaaagggaaccctcttacactgttggtaggaatgtatattagtacaaccactgtggagaacagtttggaggcttctcaaaaaactaaaaatacagctaccataggatctagcatcctactgcttggtatatatccaaaaggaaatcagcatattgaagagatatctgcactcccatgtttactgcagcactattcacaatagcccaaatttggaagcaacgtaagagttcatcaatagatgaatggataaaaataaaaaaagtggtacatatacacagtggagtaccattcagctatcataaaaaagaatgagatcctgtcatttgcaataacatggatagaactggaggtcatcatgttaagtgaaataagcctggcacagaaaggcaaacatcacacattctttcttatctgtgggagctaaaaattaaaacaattgaactcatggagatagagagtaaaatgatggttaccagaggctgagaaaggtagtgggggtagggggagaaaatagaaaatagaaaaatagaaagaataagacctagtatttagctagcacaacagggtgacactagtaaaaaaaatcatttaagtgtacattttaaaataattagagtataattggattgtttgaaacaaaggataaatgcttgaggcaacagataccctatttaccctgatgtaattattgcatacctgtatcaaaaaatctcatattatacacctactatgtatctccaaaaattaaagatttaaaaaaaagaaccttagaaaaaaggcactttaggcttaacaataaggaagaaattttgcaggaaattttatataatattcattgtcataaaaataatttagtagttgtgtaaatgtgttctgtatatgtaccatgattcagttaaccactccttgattctttgaacattgtttcctttattattagtagcagtagtgtagcaatatgataaacatctttgcacactaagcctttttaaaataaaaatattttagaggcaaaaaaaaaattacaacttcatttacatctacttgtattcccagcttttaaagggtaggagctggctggggttggaatcctaaaacacatattgccatttctttgattctgtaaacagctgaattaaggaatagttcatttacacactaggcaaaatacttacttacctgttgttgctagggcagcatggtaatcagggcttttgtcgacatccaaaataaaactgtgggaataaaaacatttatattatctccaatgcaatgaatttccacaaagcctttataggtatatggaagatggcggttaccacaactacaacttctgttagctctgaaagtcactggcataatctagaggagaagagaattttatttatggatttttaatatgttataacccatgagttatggccatagatagcaattttacagtcagatgtagacttcctatttagattataaaatttcttgccaggcgcggtggctcatgcctataatcccagcactttgggaggccgagacgtgcggatcacctgaggtcaggagtttgagaccagcctgaccaacgtggagaaaccacgtctctactaaaaatacaaaattagctgggggtggtggtgcatgcctgtaatcccagttactcgggaggctgaggcaggagaatcacttgaacccgggaggcagaggttgcagtgagccgagattacaccattgcactccagcctgggcaacaagagccaaactccatctcaaaaaataataataataataaaataaaatttctttttttgagatgcagtcttcctctgtcacccaggctggagcacagtggctcaatctcggcttactgcagtctccgcctcccaggttcaagcgattctcctgcctcagcctcccaagtagctgggattacaggcgcaggccaccaggcccggctaatttttgtatttttagtagagacagggtttcaccatgttggccaggctggtcttgaactcctgacctcaggtgacctgcccacctcggccacccaaagtataattgtaaacccaaattacaggtgtgagccaccacgccagtctagaatataaaatttctttggaactaaaaagtttgtattgatgaacaaaaatcaccctatactatacttgtgcacaataatgttcaatataactgactcacttatatctgtatttattaccctgatctggtttctatttccatgaggatatttctttagtgaaattgttttatacttactggtccttattacattaaattgtacaatatccagattatcattttttgatgctgattggtgatgcgcagatcttgtgaatttctataaagatagttggaactatccaatataagattttgtaatagaatttggcagtacaattcaggacaattgtatcttttaaaattatgttaattccttctgtggtgcttaggaaatttatcattggttcattttagaaaatgttatatttcagtatgcagagatttatttgcaaattaccaagttacttctattcaactgttcaaaatatctgcagttgctttaaccattttattttagagtgatatgacatacataaatatacaaagcttttctcacatgtacttctttgctcttcatagatagaaggatatggttaaaaatgaagagtagtttgaccatagcatctctataataatcttctctcacagtatattgacattcttgatttttagcaggaccatgcctgcaaagggatactttatgtgcatatatttgacatttggaacatgattaatgtttttgaaagcttagtacctagcaaagatgaacattttagatatcgtgccttattgacattggtattcttaaatgaatgattttctcatttcattaagatatttgttttttaaattcacacattgtatgtatttatggggtacaatttgacatttcaatacatttatatgttgtataatgatcaaatcaaggtagttagtatatccgtcgctgcatgcatttatcttttctttgtggtgagaccattcaaaagcctctcttctagctgttttgtaatatacagtaccttaatgctaactatagtcaccatactgtgcaatagaatagcagaacctatttcccactatctgattgtaactttgtacccattgaccaacctctccccatcctcccctacccccagagtacttagatagtacttaagttccccttcccagtctctggtaaccactgatctattctctacttctaggatattaactttttttttaagattccacacaagtgagatacgctgtatttgtcttcagcgtctagcttatttcacttaacatgttgtcctccaggttcatccatgttgttgcagatgacaggatttcctccttctttatggctgaatagtcattaaggtatttatttagccagaaaaagtactaatttatactttttgtgttatccttttgtcccccaaacaattaagtggatggttgtttttaatcttgtatttcctttagaagcttttagaagctcttaagtaatcagatattgttagttatttaaaccatgtaggttgagaaccaaactgtcagaataaggaaaatctatttaattctggtattaataattaaagaatgtttaggtggtggcataaatatttttgtttttcaaagtcaggcctatcttggtatcactagataagtcaacaccaaagtaatgtactggtatatgtatagtgttttgtaaatatcataatacataatgatttgaagaaaaaaatgcgcttaagtacaaattccaggtgttacaatcacaaataatacttgtcttgttgggcagctcttcagcatgcaggaagaaatccatcccaaaagaccattaataagtattggactcctcaaactgccaaactgaattttgatgatttttgtataattttaaggaaggaaaaacctacttcaaaagcagaactactaaaatcatttaagcaattagatgtaaatgatgatggctgtattttacacactgacctttataaatttctaacaaaggtaagatctgtaaaactgttttgtaatgtgcatattttctaaaacagcttggaatctagctttgactaccaaagtccacattaaaaataagtatttcattgagaggttaaatgaattacttacatgttatttataacgtacttaggaatccttctggatgaaatgttctttgtaaataaaagataaagtataaaatcgagcttatgttaccatccccttgttctcctatttaattggttcctgttcagaactctttgaaaatcagtgatagttccatatgtgataagtaaaaggaaaaccaaatataaatgggattaggaatccattctgttttttgatacaatgttagaaaatatcattcccctaaactcaatagcagttataactgactctatactattcaattgttagttactatttagtaaactgaaattcagcacactttcacaaaatttaataaaattgtgaaatttatatagccgcctcattctttctttatatataatactcatgatttataatgaagcaatacattcagacttacttgtggaaaagattaaaatgtgcttccactgtccccatgaataacaaaggagtaatcatgttgctttaaaataaatcttgtttttttttttcagagaggtgagaagatgactcgagaagaagtaaatgccataataaatttggctgatgtaaatgctgatggcaaatttgactacatcaaggtacataagctcacattgatgtaaatttacatactgtgttggaaaagtgtttttatttttccccagctttattaaggtataattgacattacagtgtacatgcaatgttttgatatatgtatacattgtgaaacaattaaatcagttaacatgtcaactaattaacatgtcagcaaattatttttaaagggatgcatctttttaatattggcaatgacatccttaaatattgtgcatgaaatttaatttttccagtcccataattgcaatctgatgactacattaaaataatataaccaagttaaaaaacatgtgtgctcacacacacggacagatacacacataaacatagagactctactcagaaatgtactttttctggggtggaagaatcataaaaattattttgaacaaatgcaagcctacacatcttgtaaaaaaataataataaatcacctctccttgtgtaacattttattttcacacagagtatgaactcctcattgaatcacggctacatttcactaggtcacttgaggctggtcaatctgattcaaaaaaataaaatgcgtaaccatcaataggaaatatattccatctatcagtctgttccttgcctactaatgtgcatttgctttctcctcttccccagtgtatgattgaatgttttacccactggactttttttttcctgtagttttgtaaattatatatgacaaccaacgagcaatgtctcaagactacactagaaaaactagaggttgacagtaaattgatgcgtcaccagtttggaaaccacatcgaagggtcccctgaaagggacccatcaccagtaccaaaaccatcacctaaaatcacaagaaaaactgatccagaaacattcttaaataaaggtatttacttttaacactaagaatttcttgatcagaaatgaagagtcatattcagataaatttttccttccatttcagcttatcagtgataaaacaaatgagaatctaacttttgttagctactatttctagactctttcagctgtaaaaatctattgaagtaaaattttattatggaacttgacttagctatgctcattatattttattaaaactaaaatttcagactgaaaggtgacatattgaaataagaattcttattagaagcccataaattagggatcattaaagcctgataaatataaaacttctgactttatttcaatagggagaacaaagagaatcaaagtaatacagtagatcttttatactgcactgtgtttggaaaaaactcctattgacaacttttcataatgtcagaccaaataatcattacttgttgcaggtgacaccaggagttctttactgtcagcaaccaggaagttcaaaacatctgtttccttcacagttaccatgggggctaatggtaaccgaaactcaaagttaatggagccaaatttaataaaggtatagtattttaagttaacagatgactttttctgaaaaaaatttgacattaagtttattaataactgtgcagtgtctacagggaaccagtaaagtttatgaagtaatttgaggtttttctgtgtaatttctacctgtaagctagtgtaatacttttaaattaaaaatgatgaatattattataaggtcttcagtttgaaaatggtaacactcaagttttataacctgatgagtagattatcaagttatatactttgggaagcaaattttttgttttgtttaacaaatattcaccataggtgtttcatataaataaatcattcattcaatttcaattcctgtgagagaatgacaacaaagtcactttgctaagtcaatatttgtagagtgttaatattgatcttctttctttgttttccctttctagactcaacctttactagttttctttcaacagaaaataatagttacagaaatataaaacattaactggaaactgctaggatacattaaaaatgtgcacctagagacctctgtaaaaggggaaaaaatggttatgaccacatactataactgctgttagaaaactgaactgattgctctcaagagccacatttttgtttcaaataacaactctgtatttgttattgaactctgaagtcccttatatctttaaattgctagagagtgacatttgttctatattaaaattttaaaacattatctccaaggaattttgttcagactgtttaggaatctatacaccctaagcaatttggtgtgcatgtccaacatgttcatacacaatatttagtgttccaacaatattactttccaccaatggaacctttttgtattttgcaactaaattaattattaataaaattaacttagttaaataattatggtttacctgattcaaaagcacaaataaatgtaattttagccactgtaaagagagatataaataaatattaatgtggattatgttaagttatagtaagactttgtctctgtgtcattagttgggctcataccaatataatttttaaaatttagttcaattcaacaaatattcactaagcatgtaatgtgtgccagttattttgcttagtgtaaaatatgagcttgaatttaaaaatataaattttcatttgactattaacagtataccaaggactaccttggtatatgctacactatagcatagtatttattcattcatttattcaacaaatatttattgaatgactactgtgtgccagtgttctagatgttgattagattagtgatctagagttttgggtagagatctacctgggcttgaatcttagctttatcacttaataactgtgtgatcttgggtgaatttgtcagcagcccttcagagtttcagttttcttacctataaatagggagtaattatatttagtgtgctttggaaagatttaaatcgtatgtaaacatatgtaaagcatttagcacaatgccaaggacattaataaagaatagtgttaataatgttaatactatttattatatacaaaggacattaataaatactagtattaatattattatagaacgaagaaataactggatgcttgtatgggaacgacatgatgaaagtatagtttaagaaaagttaatctactgttgtgttatatatagagacctcagagacaccatctaagaggccgatagagttttccaaatataaagtgatgataacttggcctaggatagtacttaatgtaatacgataggggcaggtgtaatagaaaaatgccaaaattagtctgtaagtcataacgattatttaacaaagagactaaagttttgtatgtaagtcaagagcagggaatggtgtggatgataattgggaattaggtaaaaggtactaagataatttaatgattaaaagaaaagggcatactgtcaactttttaatactgtgagtttcatataaaatgtaatgtcttttggaaataattgatagctctgtatatcttaccttttaatatcctgtttcggatcttgatattgcccactgttgcttgctatctatttcttagatgagctgaaattattatttttttaagtaagtgactcttttgttattcagcagcattcagttctttgtttacatttttcttttctttatttatttatgcattttttttaagacaagagtttcactctgtcacccaggctggaatgcaggtgggatcttggctcagtgcaacctccaccttccaggttcaagtgattctcctccctcagctacccaagtagctggcattacaggagcatgccaccatgcctggataatttttgtgtttttagtggagacgaggtttcaccatgttggccaggctggtctcgagctcctgacctcaagtgatccgtctgccttggccccccaaagtgctgggattacagatgtgagccaccacgcctggccacatttttctttaagtcttgtttcttcctgggtggttttctggaaaaacagagaacctgctagacaaattctaaaagaactgtaatacttgaagttttctttttttatttcataaatttcatatattcctgaggttttataaccattctgaaaagtacttggttgtgaatgtacagaataaattactgaaaggattgttaaattaattttccagatactttaaatttattttaaacaagtttgggtatctcaacttcatgtggaacagaaaagtatggaattgggacagagaaggagggacttttcagaaattagaaaattgttgtgatagataagggtaagccatgttttaaaccacaaaaccacacaattggtaaaggacttgaattacaaaaggaaaataagatccttacaggtactatacgcatattactttccattggccatacttagttactgcattattattctttttaaaatcccgaattctatccatttacttaggttctgtgatggtcaaggaatgtcaggaattttcctttcagagaggaatagcttcaccttccttgctaagaccagtcatgtctagaattagagtaagccccaaactatcagttgtaaactccagagatgcaatacttcctatattcagattcttagagtatgcctacatttatgttttattcatatatagtacaacatatgcacacacatcacacacatgttgtacaacctatatattataaatgtcaaaacatatatagcatctacattgtataccatttatatgttatgtgtatgtctatatatggcaatacaaataaaaacatttgaaattccaaatggttcattatctgttttttgtgaaagctccagataataattttcttataagtttctcacattttcaaaatgttgatcagttcaacctgtcaattagatttcaggccacatcaattttaccctccataaattatctatttaaccttttattttttaagtatgtatagtttacaattctttaataacaaaaagtgcaacaactggttacctacctgtcttatcataccccaaagcaaatagcttcctaataagtatgtgacataggaaatctttataaaaagcagtagtgatgataatgatagtgatgagttcctcctctgactaaatctatggcagatctactgcttaataattctttctcactgaaaattttaataatacagaatttgtatgttaaaacaaatcattttcattcactacagtgttccaagaaaaatgggactatactgatgtatttgttttgataacaagaattttttgctttagtatttggttttgtacttttcagcatttcgttatatattatgaatgaaaataagtaaaatttgtatatgacaaataaaggaaataacagttcagtttgcacttatatgaatttacctgaattggtagaatacagcaccacctcatgccctatataagaattacaagctattattttatttctgctttataatgtcaaaaaattatatcatacatggaatttcttactcttattctaaaattattttcaaaactcaaccttctttcatttttctcttaatactcaaactgtcagcttaatctataatcctttcaaactgatttatttgaatgagccagccaatttgtcagtaattttttcttttagttcataacattttagtctaggtcctagagaaaaagctttgtatgattgaaagtctatttgtttgaaagggtatttttttttctttttcttttttttttgagatggagtctcactctattgcccaggctggagtgcagtggcaccatcttggctcactgcaacctccgcctcccgagttcgagtgattctcctgcctcagcctcctgagtagctggggctacaggtgtgcaccaccacgctggctaatttttgtagttttagtagagacagggtttcaccacattggccaggtggtcttgaactcctgacctcgtgatctgcccacctcagcctcccaaagtgctggggattacaggcgtgagccaccgcacccagccttgaaaagaaattttaagttgagtaagcattgtatgtttaataactctggcagatcttaagttgaatgtttccttttgaacagtaggagctataagttctcctagtgaagttatttagaattcaaattgatctgtatattacactgaagtttggttgatataaataatgtggtatttgtcttactttaataactgttgttctaccattttccagctatattaatccatatttaatgttatagtatgtagtttggctgtctttccaaagaaactcacaaattctcttctattatagcattattttctagacatggtacttaggaaagacttataataaaaatgtttaacttgttccccagttaaattttataaagctatgtcctgttaatctgtggcactgccccagaggtagcatcagcacattgaaaaattcttccgaaatctttgagtttcctaaatggcacaaattatgtttactaccagtgtaccaggcaaagtacattatcttttaaagcttaatttaaccatttttttaaagctgggggtagggctgctgtgctgatgattacagtacaaatttaagaaattttgcagctactaaattctacatttttaaagtaagaaaaccaaataattaagtttatcttaacccttaaaagtatggaatcccgattgataatgccttaccatactttattgtaatatattcataaagtttattttaaaaactggcttaaaaaatcactgcagatatttaaatgtgaaatagaacagaacttagaatataacttacacactggagagaaagtaaggagacctagcttttggttctagttctgcagtcaattgagaactatagctgttcacatatatcactttatttttcagacttttttgtcaatcaaaagagaagtctggactagactgctttttagatttcttctacttttataagtctgtaattctaaagtattatcctttaccattccaaataggtaaatataaaaaatataaaatatattggatgaaattccatctgatgctataatcaaaactgattgaaagcatttaaatgttttccatttaatgtcagaatcataattcaaactgtctcaaagtgtaacttgtctaaatgctgtataacatttctttcatttctattctttagcagtcatcaccatccaaggtcatgttgattatgttaagggcaattgggtctgaggtaatgccagcatctgttgttagtccatatatatgcccatccaagagatttacagggaagctaaatgaaagtctgtgtatcattactcatcattaatagttgaacttgggccaggcgcagtggctcacgcctgtaatcccagcactttgggaggccgaggtgggcggatcacttgaggtcaggagtttgagaccagcctggccaacatagtgaaaccccatctctactaaaaatacaaaaaattagctgggtgtggtggcaggcccctgtaatcccagctactcgggaggctgaggcaggagaattgcttaaacctgggaggtggaggtggcagtgggccgagatggcgccactgcactccagcctgggtgacagagtgagactccatctcaaaaaaaaaaaaaaaaaaaaaaagttgaacttcaacttctgccacaagcccaactttgaacctcattgtatcacagataataaaaaatttgaattcgtaccctgagtacattttcttttagaaacttggtctaaatgtagaggccaaatgtcttggactctagacctaatattgctacaaactccttataaaactctgaacccatataatctctggctacctcaatttttctgtttattaaaatgacttaattcatatctaccccatactgcctcatagtgatgttgttgaaatattatatataatgacttctttctgtcatgggcaatatacttaacaagataaatttcagtaagttaaggtcacatcttaatttcttagaattaaaaatacacatatcttgtataccccaaaggtgtgacagtgcaggtgattaatgactgactgaaagcttgagtatagttcagtttataatgataaaatcttaaaatgcagtttaagaagaaatttccaaagaaaagataaagataaaaatagaaaacttgtataaattgagaaataaccaaaatgaaaataaaaggaaatagagaaaatacattcattaacactcacagagtggttaatatctaaaatagtcaaaagaatttattaaaatatgtaagaaaaatgctaagtctgcaacagagttatgagaataggagaatgggtaatttatacaaaataaataataaacacatgagggaaatgttcagccttggtattaataatcagagaaattcaaattaatgcaaaagttactacaataccatttttactatcaaatacttgaggcatatacaaatatatggaataccataatgaatgctttatgtacccacaccttgcttatgaaatcatcccacatcacccaatttttttataaaacaatactaaccaaataatggtaaaattattacattatataccattggtggtattgtaaaattggcagtactgttttataaagcactatgggaacacatgtcaatagctttaaaaatatacatacatttttgcctagaagttctcaaggaaattattcatcagaagaaaagcatttagacaaaacagtattctattaatattgtgataagaaattagaaatgacctaaatgtctaacattttagaaatagttaactaaataatggtataccaactcaatgtttttgttttttttttgaaacggagttttgccgtgttacccaggctggagtacagtggcacgatctcagctcactgcaacctccgcctcccggtttcaaggaattctcctacctcagcctcctgaggctgggattacaggtgcccaccacaacacccggctaatttttgtatttttagtagagatggggtttcaccatgttggccaggctggtcttgaactcttgacctcaggtgatgcacccaccttggcctcccaaagtgctgggattccaggagtgagccaccatgcccagccccaacacaatttttaatcatagaaccatttaaattgaaattttgaatattgcatagcaaaatggtttttcctgtggtaaaatatacaaaacataaaatgtaccattttactcatttttaggtatacagttctgtatcactaagtacattcacactgttgtacaaccatcaataccaccaccatacatctccaggactttttcatctggaactctattcattaaacaatgactccccatttccccctccccacagcccctggcaaccaccattctactttctgtctctctgaatttgaagtggtcaaattcacttaaacctcatataagtggaatcatacaatatttgtccttttgtgtctggctgatttcacttagcataatgtcttcaagactcattcatgtatagcatgtgccagaattttactcctttttaagactgaataatattcccttgtatgtatttaccatgttttgtttatctatttttctgtcaattgacattagggttgtttctaccttttggctattgtgagcagtaatgctatgaacattggcatacatacctgtttgagtctctgcttttaattcttctggttctatacctagaagctggaattgctaggtcatatagaattctagatttgcttttttgagaaattaccatactattattcacaatgcttcaccattttatgcattttatgttcctatcaacaatgcacaagggttccaatttctccacataccaatacttgtcgttttctgtttttttgataataggtatcctaatgggtgtaaggtggtatctcattgaggttatgatttgtctttccttaatgattagtgatgttgagcatctcttcatttgcttattggccttctatatatcttctttagagaggtgatcatttgatgattcctttgcccatttaaaaaatctggtggtttgttttgttgttgaattgtaggagttctttatatgctctatatattaatccctttttggatatgtgatttgcaaataatttctcccatttcatgaattgccttttcattctgttggtagtgtcctttgatgcacaaaagtttttaattttgatgaattccaatttatttgattgttgcttgtgcttttgttgtcatatctgagaaaccattgccagatccagcgtcagctttccccctatgttttcttcttagagttttataattttagcatatttaggtcttcaggttgagttaatttttatgtgttgcataagataagagcccaaatttattcttttgcagatggatattcagttttcccagcctcatttgttgaaaagactgtccttgccctcaatgaatgatcttggcaccctttttgaaaatcattagaccatataggcaaggatttatttatgggctatccattctgttctattgttctgtatgtctgttttcatgctagtaccacacccttttgattactgtatctttgtagtaagttttgaaatcagaaagtctgagtcctctagctttattcgttttcaacagcaaaatattttggatataaaattaatttttaaaagcagaacataaagcagtgtttattaaaatgtaaaaaataggtttctacataaggtcagtattagaaaggattacatgaaaatctaagtagggcattagaattatagagatttttaataaaatatgaaaataattgtgacataaaatagaaaaatgagatgtaagtatgttaggataatttagtcttctcttaaaaatgtgagcatgaaaccgatctcaatgtaaattatttttgcctttgcagtgatataataaatctttctataatgaattagaaaacatttatgatgttattattatacagctagcatacaccttttcagtagttatcaatattattaaagccttgaacttattatttaaatatgcttacttacatttcaggtaggcaagcctactaataaagtgaaaagcatttttgcacatagctatggtaatgacacaattttctcataacttcaataaagaatcttctactttgtgtccaagatgccattttcaagttttattcttttcttttctttttttcttttttcttttttttttttttttgagacagaggctcactctgtctcccaggctggagtgtagtggcatgatcatggctcactgcaacctccatctcccaggttcaagcgattctcctgcctcagccttcggagtagctgggattacaggtgtgcgccaccacgcccaactatttttgtatttttagtagagatggtgttttgccaatgttggccagtctggtcttgaaattctgacctccagtgatccacccgccttggcctcccaaagtgttggggttacaggtgtgagccactgtggctggccaagttttactcatttctagttatgagatcccatatatgaattcagacaagaagggatttggctagaccaagaaatggtaaagccaatatagaaaagtctttctcaaaagtgatattttatattcatcggcattgttctgtagctgtgaaacttctttttttgagacagagtctcactctgtcacccaggctggagtgcagtggcatgatcttggctcactgcaacctctgcctcccggattcaagcaattctcctgcctcagcctcctgactagctgggactacaggcgcacgccaccgtgcccggctaatttttgtattattagtaaagacggggtttcaccatgttggccaggctggtcttgaactcctgaccttgtgatccacacgccttggcctcccaaagggctgggattacaggcgtgagccaccgctcccggccagctgtgaaacttttattcagcatgcttctagttatctacacttgaagcaattattttgctcttacatttaaagtcattttttctttcaatatatttcttttagcaatccttaattcttccttcttactgtgctcctagcactaatctcattctattacagcaacatatttatttattacttttttcaatacttcatttttcttttctttctttttttttttttttgagacggtgtcttgccctgttgcccaggctagagtgcaatggtgtgatctcggctcactgcaacctctgcctccctggttcaagtgattctcctgcctcagcctcccgagtagctggaattacatgcactcatcatcatgcccagctaaattttgtatttttagtagagacagggtttcaccatgttggccagcctggtcttgaactcctgatctcatgatccacccacctcagcctcccaaagtgctgggattacagatgtgagccaccgtgcccagccaactttatttttcttacttcttctttaccttatatcttttcctaacttttcattattgaaatgctatctattcttcatgatataattcatcagttgcacactcagtttacatcagtcccccaaccccaatcaattagacagtaaatatttgttgagccaatgtgttaggcactattttaggaacttagattatagtaaattattttccatgtataattatctttttgtgttaaccatatattactgccaattataattggatttttttgagacggagtttccctcttgttgccaagctggagtacaatggcgcgatctcggctcactgcatcctctgcctcccaggttcacgcaattctcctgcctcagtctcctgagtagctgggattacaggcatgtgccaccacgcccggctaattttgtatttttagtagagacagggtttctccatgttggtcagatgatccgcccacgttggcctcccaaagtgctgggattacaggcgtgagccaccatgccctgtgtataataggattttgttatgtctgttttctacctcctaactatgttgcacattcctggagagcaatgattatatttgacatttcttttatatccccctgtgttttctcctcattactatgcatactggaaacatttaataaatattgtttgaaataattttttccttcatttcaggactggcaacacatgcaatcaaaaggttgcttcttcttagaagaagatggtgaaatcattagtcatcagtacaggatgcaaatagctcagaggtccatggtttatctaacaattaagccattaaacctgagtcaagttgaaggcaagtttaagttttttgtatatttttaaaatgtcaatttgtaccctccttgaaagtacttatgtaagtattccatagtcctagttagggaagaaaataatctgcctaagtaagaatttatggttacatttcaagaaagtgttggcttatacatgaactgtgttaatcatatgaaaagcaagtagattgctttatatgtttaaagcatgttttattaaaaataagaactttttccaaacttttctacagctaagatagaagaaaataaaagaaaaaaaatgttaactggtttcctcatgatatagaactaactttttttttttttgagacggagtctccctctgttgcccaggctggagtgcagtggctcgatcttggctcactgcaacctccgcctcctggattcaagtgattctcctgcctcagcctccccgagtagctgggactacaggtgcacaccacctcgcccgcctaatctttttgtatttttagtagagacagggtttcaccatgttggccaatctggtctcaaactcctgacctcaggtgatccacccgcttcggcctctcaaagggctgggattataggtgtgagccaccatgcccagccagaactaagtttttatttgctaattaatcttagctttttccatttgtcaatttttaaaattaatatgtcaaagagaagtactgcaaggggataatttggaacaatatgaagctgaaagtatttttaaataccttcaaaaccctttgtctgtgacttagacaatatttattaataatctttgtattcatggtaatattctagataaaaatacttttctagtgtctaaaatggttatgtaatttttaagcaatgaaagatatctatctataagggtgatttccctagataaccttttttaatgttggctgttctaaatcaatatttatttttcttttataatgtttacatacaagcattttcttactaaaggattcccacctccccattctttttccctcctaaagtagagattttgaaagttttcactgcatctcttgtgggatacgtataatgtttggcagatgatacttttaaatgacaataacaatagttatttttcagagagaggaatcaagatagccctgcaaattcagtgtagttgttaattctctgtattcttattaacaagattcctttattcatttatttatcaaatagttatcgagggccttatataccagacatcagtttaggtgtttaggatacattagagttaaaaaaagacaaaaatccctgccctcgtcaacttaaattttagtgagggaaacaatacataataaacataataaatagtaaatgacatggtatgtaggaaagtgataagtgttatgggaaaatcagagggaaagggggttagtgagtgctgagggaatgtgggttgccattgaaatggagtggttagtatatgcttcattaagaaggtgtcatatgaataaagactttgaaagagatgtatgagttaccaactgctacataaaaaactaccccaaaactcagtggcttaaaacaattaaacatttgttcactcatgaatcagtagatctgttagttcttagtctgagccaggcttgttttttctctatagggcttgctcacacagttatggttagctacaggttagctggtggctggctttgctaatcttggctgggttctttcttacgtatgaagtcccatctgggacaacttgactcagcctcatatgatctttaataatccttcagtaaactagcctggacctgttctcttggcacaataggatctcctgaggtttgggctcagaaccagcacaatgttacttcgttatattctgttgctcacagaaagtcacaaggcaagtccagattcataggctggggaaatagacttgatctcttgatggaaaagctgcaaagtcacattgcaaaaggctgtagatactgagggggacagccatttttgctgtcttccacagaaggcaagggagtaagccttgtgggtgtatggtgctggaagggatgggtgaagagtggaggaggtggcagagtattccaggtagacagaatactctgtgcagaggctctgtgagagtgtactggtgttaaaagaacagaggctagagtgtctcaaatggagtaagtgaggagagagttgtaggagatgaaaccagggagaaacaaggacaaaatcaggaagaggtttctttttgccataattaggacttgggcttttgatcagagaaatgaggtttccccctcgttttttgtgagttttattctccatatataaggtcaagattttatcttaatctttcattttcagcagtttgactgtgtgtctaggtagtttttgtttttgttgttgatgctgttgcctgggtttttttgttttttggtattaatcctgcttggggttctctgagcttcttggatatgtggcttgttgcctttcattatttttagaaaatcctctgccttatttcttcaaatatttcttctgccctctttcttcttcttccacttgtatggtacctgacatctcttcctgttctgctccaccacaggtaagccagtgcttgcatctcgtctctcctgggaaagatctgtctttccttggattttaagcttatagttgtcctgtaaccccagctctgatgggatcaagaaaagttatgattttgtagttcattaactttttcttattgttaggaaaggagcaatattctcccaactctgctccattagagggttttgagtagaaggcaggacataatctgatttatattttaacaagagcagttaggttactgtattgaaagtaggtagaaggcagggttggctctaacgaatttgaatgaggagcctcagcacttttcggcgccattttcgagtgatacctgatctcatcaatctagcggaagagacaggataacctatccaagagtatagcgccactatgactccgccggaaaaattactttaaaaatcgccaaaaattacttggagcaaagggcagtaggcggagcttcgccaaggctggcgcagtcggttttgacctgtagcagagaaccaattctggagaacagcctcacttctttgattgaatactcacataatgctttggaacaggacatgagattaaggtttaataatgatagaatgaagaccataataaaagagacctctacttacctcagcaattcttacctttcttacctatttgatgaagatgtcttttgaaaggtgtactgcaaggaacaaaatgtttgtaaattctgcttttaccaaggtttcttttttagttgatgccaaagagttccaatattgaacatcttaagtctgttacttggagtatggattgagtttggagcttactcagaggactacaggagagtatccaggaggtggataattactgtaccttcctcatggaaaaagttttatttaaagtgttatttctcgttgaatactatcaaaaaggaaaaaaaaatgacctaaacttttgagacagatttggctctagtaagtatttagatatatcgcttgcatatctgggagaagaaataagagactatcatcaatacattcccatctactaaaaaattttattttacacatgtcaagggattacttataacttccattgtcttttttttaagcctatatgcaatgaaaaatatattggcaaaataaatatttaaaccttttatgttaaaattactgtgaaagatgacaagttagctgctgtttttgtctacattatactgaaattaaatgtttataatttatattttgggtttatttatttataaatcatggaatttatgcaaaaaacatgagtagtacagattctcctctaattctgtaggactttgaataatgtgatatttttcttatagttggacccttgtgttttgaagaaatgccaactgcttgaagaatttccttgttatttgtattatttgctatagggttagatgttgagaaattcttctgacaaaaaattttaagccagttttacactaaatattccttagtctgattaatttgttattggatgtattctgtatctttcttttgtaatttgtaacttttatccacttagcacgaatgattctattgaagaaaatctttaggaagtggtagaaactttaaatcgccccatagtttgcctgtttccacattttattatcttataatctttgggagtgcttacacttatggagctaacattttcagagatacaggttctcatagtactactaaaacttttttcctctttggactgaatacctatgattataactatacagtagtttaagtttccttgtgattagtcaaaaataccattttagtatgaagcaatgaagtctattatttgttgtcccataattgagaaacttagatacaccttttattaagagtttgtaaattctagcttagtctacacagatttttatatcaatttgtttatatttttattaatgtcatttctggaattgtgaaaatgttaatgttcgacaagcaacattaaaaatagatttgaaacattaaaaaaaaaaaaagaaagtagatggaaggatacgcaggagaaagcaaggaatccagctgggacattattgtagaattctagaagaggactggcaatgctttgaaccaggatgttggtgggagatggggtagtagagattctgggtatattttgaaggcagaaccataggatttcctaaggattggtcttggtatgtgagaaaagaaaagagttaaagaagattccaagatttttgacctgagcaactggaaagactgagttaccattaactgagatgggcagcgttttaaaaaaagactagggaagtccagttttggaaatagaaatctaggtagaaatgttaaatacacagttatatgggtctaacattcagaggaaagatcctaaagatataaattttggggttgtcagcacatagatgtctggcatctcttcctcgtgtgctccaccacaggtaagccagtacttaaatcctcttttttttctgaaaatctctgtttttccttggatttcaggctaattggttgccctgcaacctcagcttttgatgagttcaagaaaagttatgatttttagaaagtgagtatatagaaaatgtttctcacaaggttgctgtatttaggtttgtgccttattgcaaatgctatcatgtttacacataaaaatggaatatgggccgggtgtggtggctcacgcctgtaatcccaacactttgggaggcccaggcaggtggatcatgaggtcaggagatcgagaccatcctggccaatgtggtgaaaccccgtctctactaaaaatacaaaaattagctgggtgtggtggcacatgcctgtagtctcagctactcaggaggctgaagcaggagaatcgcttgaacccgggaggtggaggttgcagtgaaccaagatcgcaccactgcattccaggctgggtgaccaagtgagactccgtcttgaaaaaaaaaaacatggaatatgtatttctaaagaaaatatccaagaagaaactagtaacttattttttatataggaaagaatagatagtgattgcttattttaaggtgtttgggcttttttttttgtttgtaggaaaaccatccccttggttatccgttgatactgccttgtatattctcaaggaaaatgagagtcaagcaaatctacagcttgtgtgttttaccgaactacgaaatagagaagtatacatatttattttctaatgtttaatttttaaatatagtatgaactgcagtttggggaaagtatgtttctgtattttattttttaagctttcatataccttccaattaaggtataaacagcacttaaacactatagatattatatgtttttaatttaatcatattaaattaaattaaataattataaggattttttcttgtttgctgcgatttcttaagaattaaggatgggaggagctgggcatggtggcatgcacctgaagtccctgctacttgggaaactgaagcaggaggattacttgagcccaggagttcaaagccatattattctatgatcttacctgtgaatagccactgtacttcagcctgggcaacataaccagaccctgtctctaaaaaaaaatttaaataaagaattgaggattggttggcagtcttgagtcttggcttataccttttaagttgtataatattgtaccttactttcatcttttctaaatgccctgatgcctcatgtgtgaacatttgatatactcaataaaaaaggttgatgccagtacattttttttccctaaatgcaagcaattcaagactttggaaaagctgctgtagacgtttgtcttacttatactactactgcaaaacagaaaaacttaagattactatcctcaggcttgacttattttatagggttcaaaaatagattgatatgaaaaaatgcttttaaatgtttttatatgttgcccatggggttgttctgatcttttctaatagtatatttactcagaggccaaatatgtgaagccaatacataaatgtggctatttattttatgaggactacaaaatacatctgctacacaaaacagaaataatgctatttaagggcttactacagtatcatatttaatctttatataggctcaatgacacacaaacatttccctgatagaatgttatataaaagtcttttttgtaggcttccttacagacaagaataggcaagaaacaaataaaattggctgaagttaatgttttgactaaactcttcttcagaactgactacaaagttaagttcaagataaagcattgtctaaaacagtagctgtttccactttgttttgggtaaaattactctcttatgagattgcatgtgtaaaaaaattagtatatagcaaaattataatagagtttgcatgagtttctatttacctctttataggcttctgtttatctgtaatatgttgtatttacaaaggattttttatttgtatttatactttcacaattattttcttatagatgagttttgtgcccatgaaaaaactttccatttgtcatccacagtggcagtgcaaggttatgtgtggagataaggaaggatcatgggataatatatattaggaagcagcaagatctggtttttcactcctgagtctacatctagccaatttcaaaggttatgcttttcaaaggatggatttggtaaacatttcatttttgtttgtttgtttgtttgttttgagacggagtcttgctctgtcgccaggctggagtgcagtggtgcgatcttgctcactgcaacctccgcctcccgggttcaagtgattctcctgcctcagcctctcaagtagctgggactacaggcgtgtgccaccatgcccagctaatttttgtatttttcgtaaagacagggtttcatcatgttggccaggatggtctcgatctcttgacctcatgatccgcctgccttggcctcccaaagtgctgggattacaggcttgagccaccagcctggccaacatttagtcttaaaaatgactttcggttatattggatttcttcttgtatcaaaataggacctggtgaccttaagaagattatgatttctctgagttgccagggcagaaatggaactaaacccagaacttagatgagcaacattatttcatatatgagtctccagaatgacctaaaatatacctaagttggtttttgtttgtctgtttgtttatttatttagagatagggtctcactctgctgcccaggctggagtgcagtgatgcaattccctgtaaccttgaactcctgggtgaaaatgatcttcctgccttagcatctcaagtagctgggactatagatgcattattattattgttgttatttttagagataggatctcgctatgttgtccaggctggtctccaattcctagcttcaagcaatctttccaccttggcttcccaaagtgctgggatgataggtatgagccaccgtgtctggccttatacctgggttttaaaaggaatttttggacataatacgtgaaaggattctcttgggttagtctgtgctgaagggcacttagctattacacacaactaagaattgtttagatttaatatatttaacagagacagctgctagcttttataggaaacctttgggctccaaaaagctcttaggaggtacatagagagataccatttgctttctttctttcttttgtttttttgtttttgagacagagtctcgttctatcactcaggctagagtacaatggcacgatctcagctccctgcaacctccacctccgggttcaagtgattctcctgcctcagcctcccaagtagctgggattataggcgcccgccaccatgcccagctaatttttgtatttttagtagaggtggggtttcaccaagtttaccaggctgttctcaaactcctgacatcaaatgatccacccaccttggcctcccaaagtgctgggattacaggcgtgaaccgccatgcccagcctgctttctttatagaactggagaataaaatgttttcctgtacaaatgttctggtacccatgataaatatccaacatttgataggaaacagaatttcatataaagctggtttatttgggattctgtgtcttattttatagtccatattacattaaaaaaagtgaagttccagtgctttcatccacataattgagctcttacaaatgtgattaatttatacaaatagtaaaccatttcaaaatatatttaatttttattttatgtcattgaaatctgatttagatatcatatatttgaatcaaattaggaaaccataatctagaatattattactttttttcaaaggagctcagtatttgcattaaaaaattaccctacgatttatctttgcttcctgttgaaggtatttgcatcacagatatttttgaagattgttggggaagatttagaagatatataacttacctattacagttttaggcatttgtttcaaaaatatataaagaactgctgtatctaatgatctcataatgggattaccattaacaaaaagaatttgaaacctgtaaaaagactgataggactataatagaatttgtaaatattgatttaaaaatcatttctaatgtgtccctttcagaagaaatattaaaagctttaaattaaaagatgaaaagattaagactgatgattgttttatttcattgttttgagaaaaggtgtttggatggactggtgaactaggacctggaatttactggttaattccttccacaactggctgtaggctgaggaaaaaaataaaaccagtaacagatgaagcccaacttgtatatagagatgaaacaggggaattattccttacaaaggaatttaagtaagttttgtttattaatgttagaattataacatctagactggatagatattaatagcctgtgttactccctttggccagctcccacccccatcctcagattctaattcaccaattcaactcttgtgaacaacctgtatgaacttggaggatgttctgctaagttaaataagccaggcacagaaagataaatactgcatgatctcacttatatgtgggaactttttttttttttaaatagagacagagttttgctctgttacccaggctggagtacactgtcacaatcattgctcactgaagcctcagaatcctgggctcaggtgatcctcccagctcagcctcttgagtagcagtagctgggattacaggggcttgccagcatgcctggctaatttttttaaagagatgggagtctcgctatgttgcccagggtggtctcaaactcctggcctcaagcgagcatcctgcctcaacctttcaaagtgctgggattataggtgtgagccaccacatccagccttatatgt

SEQ ID NO: 16 - DNA, 23069 bp, Homo sapiens
  source 1..23069: mol_type = other DNA
agctactggagccccaggacgcagccgagcggccctcgccgactccttcccgagcctggctgtggcgtcacgtgacccgcggcgcggccaatccgcgcagccctctatgctattcaaatcggcggcggggccaacggttgtgccgagactcgccactgccgcggccgctgggcctgagtgtcgccttcgccgccatggacgccaccgggcgctgacagacctatggagagtcagggtgtgcctcccgggccttatcgggccaccaagctggtaagacagctcggatagacgggaccggtcagcgggctgacggcagtcaccactgttcgcagttttacctcgaccgttcgcagttttacctcggtcggagggatgagtcccaggatccctaggttcagtgaaaaggctggcgaggagaagtagcgggtatgcaacccttgccagactcaccgctccctctattttgagggtctgggcctcaggtccgaaaggaagcgccgcgcgtaggccgcaccagactcgctatgaggagcgactcctgtgcctggtgtggccggcgtcccgtgggggcgtcttagaatattccgatttggccgctcacctcgcctgattttctacccgcctcagaattagggaacaattgggaatgaggtccaaagctttgtagggttaggtggggggcaagcccgaatgtggcaattttgtttattgaacccatagaatttaacgcaggatgtatcggccgaatagcactaggataacagctgcctgtttcaaaacggtatttctgagtacccatcagtaaccactgctggtggtccctgaattgcacgtacagcactcctaacgcgttttgtgcagttgggtcttcggttctataggatactgtggtgctggttatgtgacgttaggtgagtcccctaccttctgtgagcctgtttccacattggtaaaggttactaatacatgcttgccttaaggggtttcccaggaggatgctgttttttaaagtgtgttgtgatctgcagaataacaagcattttcctcttaggaatgcccttcagacgagcatgtattattagccctactttatcaggtgcacactgaggctcacagacgttaaatgccctctagagtcacatcaacagcaagtggcagagctagaattcagatcttcctggtatggcgatcttacatggattctgctacttagtaagttattggctatatttaccaatatgaaggatagaatttaggacaggaaggaacctcaatcagtagtcctgccacattatttaaaacccattagatgaaagtagtataagcacgctgaaaaagaaaacatgcactgaatgcttactagtacttcacatatattacatcattttatcattccaataagcccattcgttaggtccttttgtccctgttttgtggttaaggagattgaggcatagagattgaagataggcccaaaaagtcataaacaatagtggcagagctagagctgggaaaccagccctactagtctaactccagagcctgttcttaaagccactaccctgtactgcatctcaggaaagccgttctgtaatctcccttagtacagagtccctttctgtcatttttattactgtgtcctcaggccagtacagagtgagcagctcaatatcagtttctagagtcaatcacacctgggtttgaatgcctaggttcatcacttagctgtgtgaccttggtcattttattaatctctctgctttattttccttatgtgaaaaatgagaaattaatagtacctattcatagaattggggtaattaaagtgaaataatgaatgtgaagcacagtgctaccaacattaatattaattgaggtaaaaaacagggatgaatgttttctctattgattgtagttcttccttatttccagatttcttaaataagctcaggatcttaaataaggatcttagatcagccaatgaagttcttctaataaaaaagctattacataaaaatattactacagcactagaattaataaaaagaaagcagtgtaagatataatttttttttttttgagactgagttttgctcttgttgccaaggctagagtgcaatggtgcaatctcagctcaccgcaacctccgcctcccaggttcaagtgattctcctgactcagcctcctgagtagctgggattataggcatgcaccactatgcccagctaattttgtatttttagtagagacggagtttctccatattggtcaggctggtctcgaactcccgacctccggtgatccacccgcatcggcctcccaaagtgctgggattacaggcatgagccaccgtgcccggccagatataaaattttatatggcacaaataagatgaatgattcttcaagaatttttatgatataatcagatgtgaattaaagaattttctttacctaatgtacttcaaatcaatatgagatttaatttttcttcaattttttaaaaatattttccttctttttacagtggaatgaagttaccacatcttttcgagcaggaatgcctctaagaaaacacagacaacactttaaaaaatatggcaattgtttcacagcaggagaagcagtggattggctttatgacctattaagaaataatagcaattttggtcctgaagttacaaggcaacagactatccaactgttgaggaaatttcttaagaatcatgtaattgaagatatcaaagggaggtggggatcagaaaatgttgatgataacaaccagctcttcaggtaatgaacagatatgtaactgtaaaactgaattactgtaaagttttatctctacttatattatacttttactataacagcagcttcttcaaagaagttttatttctttggaaaactattaatgctgttagttcaactaaaatcatttagaaaaattgtaatgtgaaagttaattgctacaaaatttaaagtttttaagtgttagcatatataataaagtagggaattggaagggaaatactgatgtattatcacttccgcatattctgaacactttataacattttaaggacatattactgacctttagttgcatagtttctagattataagttcacagatccttcccttcaaacatataatttaatttaagaatacatgtaataggataatagcaaatcttacataataaataacagacaaataacaggaccaggtaaagtggctcatgcctgtaatcccagcactttgggaggctgaggtgggcggatcaacttgaagctaggagtttgagaccagcctggctaacatggtgaaaccccgtctctactaaaaatacaaaaaatgagttgggtgtagtagcacacacctgagactgaggcacgagaactgcttgagcctgggaggtggaggttgcagtgagctgagattgcaccactgcactccagcttgggcgacagagcaagactatctcaaaaaataacaatgataacagaagaaatataccacaggttaaagagaatatttattaagcagttaagatataacagaaactctgtttgatgatttacatatgtgttcttacttaattgctatagtagccaagcagggtaggtattaaccccttttaacagatggggaaactgagaccatgcttcaacaaatcttgttctgtctgcctgaaatgtttttccaccgtgagacactgtacacatttgtcaggctagtaaacttatacatttcttttaatctcagctcctttatagcctcttctgtggagcttttctgattcccacaggtcagcataattgctttttctcttatgacctacggttctttgttatgtatccattaaactaggcctgtggaatctaatgcccatgctttttttttcctacaacattaggtacttttcaaatgaaatgtctaagaatttattgtttcctatgtaccaaaaatgatttatgtcatacaagtaaactacaataacaatcatatgaataatccattttgtatagcactctacaaatcttccctctcttaactactccccagttatctttgtgggctcctttactgctgctcatcctttaactctcccatcttcaagttcctgcccttgtccttacttcaccttctccctaggcaatctcatgccatgtcttcgcctacttttcttaagactttcaggcctctcctgaaatatctttcctgagctttcggcccatgttttttcatctgcctcctggaaaggcacttcaaataaaccatatagaaaaatgactatcaccctctaacctaagttttgtcttcttaggtttcctatctgaataaattgcattgccttccctatagttgccttgattctttccctttcttgtcctttaaatatgatttagtctattgtgctccctaagtagttctctgatctgtacacatctctctccaagatgaatcttctttttgttaggctataattcttacctggatttctctttatttgttttgcttttgttttacctggatttctgcataaatcctcaactagtctctctgcccctagtcttttctgcctcctgggttcaagctatcctcccacctcagcctccaaagtagtggggactacaggcacacaccaccacgcccagctaatttttgaattttttgtggacacggggtttcactatgttgcccaggctggtctcaaactcctgagctcaagggatccacccaccttgaccttccaaagtgctgggattacaggcatgagccaccacgcccggcctctcctagtcttttacgatcgtaacaaaactataaagtacataaaaataaagtttaccaaaaatgtgtaagaccttattggagaaaagtattaaattgtattaaatagaataaatggagaaagataccctgttcatgaatgaaaatacttagtacatgtatatacaagtcaattcctcccaaattgaaatagaaattcagtgcattttcattcaaaacttcaatatagtttctttgtggaacttgataagcagattctaaaattcatttggtaaaagtctaagagaattttgaagaccaaggtcaaacttctgaggtgttcaaacttttgaggtcactacaaactttttgaataaatttgatgtatggggccaggcagagtggctcacacctgtaatcccagcacttttggaggccaagacaggaggatcacttgaacccaggagttcgagaccagtctggataacatagggagaccctgtctctacaaaaaaaaaaaaaaaaattaattagccaggcatggtggcatatgcctgtggtctcatctacttgggaggccgagcccgggaggttgagactgtagtcagccgtgatcacactactgcactccatcctgggtgacagagtaaaacttggagaagaaaaaaaaattgatatatggtaaaagatatgataaagtgaaaaaacaccaaaccacatattgtttatatacatttattaaaagtataaaagcatggaaaagaaatacaactataggtttattttatgaaactgtaagtttatattttactctcccttagagggagatatgaatgagcaaagaatttcattttttttaaaaaaggagttatttacactcccaccaacagtgtataaacattccattttctccgcaaccttgccagcacctgttatttttttgttttttaatagtgtccattctgactggtgtgagatggtatctcattatagttttgatttacatttctccaatcagtaatattgaacttttttcatatgcttgttggctgcatatatgtcttcttttgaaaagtgtcagttcatgtcctttgccccctttttaatggagttgcttttaaatttaagttccttgtaaatgctggatactagacctttgtcagattcatagtttgcaaaaattttctcccattcgataggttgtctgttgactccattgatagttttcttttgctgtgtagctccttcatgtaactacagtccatttgtcaatttttgcttttgttgcaactgcttttagcatcttcatcatgaaatctttgcccattctaatgtccagaatgatattgcctaggttttcttccaggttttttatagttttgggttttacacttaactctttaatccatgttgagttaatttttgtatatggtgtaagaaggtgtcccatttcaatcttcggcatgtaacttaccagttatcccagcactatttgttaaataggaaatcatttcccccattgcttgtttttgtcagctttgctgaagatcagttggttgtaggtgcatggccttatttctgggctctgtattctgtttcattagtctatgtgttggtttttataccagtaccattttgttttggttactacaggcctgtagtatagtttgaattctggtagcatgatgcctccagctttgttcttttttcttaggatagccttggctatttgggctctttttggttccatatgagttgtggacaacagtataatgattcattaaaatcctaaaaccaaaactaccatttaacctaacaatccctttactaggtatataccctaaggaatataaatcattctgtcatgaagacacatgtacacgtatgttcattgcagcagtattcacaatagcaaagacaatgagtcaacctgaatgtccctcagtggtatactggatgaagaaaatgtgtacatatacaccatggaatagtatgcagccataaaaaagaatgagttcatgtactttgcaggaacatagatggaggtggaggcaaactaaggaacagaaaactgaatatcacatgctctcacttacaagtgggagctaactgatgagaacacatggacacatagaggggaacaatagacactggggcctattggacaatggaaggtgtgaggagggagaggttcaggaaaaatgactaatgggtactaaatacttgggtgatgaaataatccgtacaacaaacctccacaacacaagtttacttatgtaagaaacctgcacatgcacccctgaacttaaaataaaagtttaaaaaaattaaaggagaagtctggcaaaatgtcaacaattacattggttgccagttacatacatgggtattgttttattatatctttgaagtattttatattaaaataaaaggaggccaaaacattacaatcaaaagaagcaatagaaactaagttccagaaatgaggacaaacacaaacaaaagagggaatatacaaactagataactcatcaaagaaatttagaaaatgtagcattctagagccattttgtgtgtaagcaatacccctctaccagaattgaccctaataataaccctgaattatccagaaataaagttaaaatatacacaatatactaaagaaaaaaggaacctattttttttaaaggtttaatgggaaaatttatttgtctagaatctttattacttggtagtattaataagtcaggctctttatgtgaattttaaaaaaaaaataggctctaaaagtttgtttctaatctcacattatttaattgcttattgtttttaaaccagatttcctgcaacttcgccacttaaaactctaccacgaaggtatccagaattgagaaaaaacaacatagagaacttttccaaagataaagatagcatttttaaattacgaaacttatctcgtagaactcctaaaaggcatggattacatttatctcaggtaacacatccttttactaattactagtttaaatataattatgatgtactcaatgatagaatcattaaaagtaaattattctttaatatttaaagccagaactgaaacctcctaacctacattacattctaaatatgtatatataaaattgtttgtaacccatagaaagaataataaaaatgatagtgagacataattgaaaacaacagttatataatttaagtgtgttttggtttaaattgatttgagggtggtagggacaactgcaaaattaaaaactccattaccatattacattatttctttgggagatactttatagctccacaatggactgatagtaatagaattattgttgctttcaatatttaaaaaatttgagcataacagattaaaccaaaataatccttttttcaggaaaatggcgagaaaataaagcatgaaataatcaatgaagatcaagaaaatgcaattgataatagagaactaagccaggaagatgttgaagaagtttggagatatgttattctgatctagtaagataaaattaagctttaatgaagttcctgatgtgttctgattattaatttgacattttcatcaaaatatgcaaatgaatcagaacagattaattctgaaagcttagaatgcaacctgtatatgtgtttttaaataaatactcttgttatagctctagtagagtagaaattgaatgtttcggtatgattcaccttttctttgaatcaacattatggccatagtttgggatatatattggaatccttttaagattattgagataaatgtatttgaaaggggatactaaatataagtcttagaaatttggttaaaaaaataaaatattctgatggctttgtttactagtcatattcatatgtataatctatttatgaagaaaaaaagttaatattctttcttctatttagcctgcaaaccattttaggtgtgccatccctagaagaagtcataaatccaaaacaagtaattccccaatatataatgtacaacatggccaatacaagtaaacgtggagtagttatactacaaaacaaatcaggttggtattaataaaataattggacttttaaaaacttgccaacaaggttgcagctatagtagtgtaaagagagacccaaatattgaaagtagaatactttcatggagcatcagaggggctatcataagttctttagtaataacagtggaataatttttaagtgagtattattcgtgctagtataagaaatattttgtctgctaagataaattcatgcatggtatttaaaaaaatgacaaagttaagcatccaaaaggtatacaaatataagaaaagttttgattaagcacatttttgttgagggcctccaacacgtcagagattgtgctaaagattaatgataagtaagatagaaatggtccatactctcatgaggcttacatgagtagttatgtacaaattaacaggagtcaaacatatatacaaaactgtaataacacaacaaaataagctcagactttcaagatgaggattctaaagggactggcttttttgttttatatatttatatagttgattgatttcagatttagatacaaaaatcagggaaataattcaagctagatagatgtattagaaaacttagattatgagaaaggtatccataaatctctcaaaatcgtagctgatgtttttatgataagtttctgtctgtggaattaactgacatatgctactttggttttctttttatgggcaagaactttgagtttttaattgtaggagcaaaaggtaaatgttaaaactgatgagtttgctatgtggcatatgtatgtggctgtagaccagtcccttcttccattacctaaaataatatggttaacagtatattccctcatttaagatttctattctttgtaaccctgtgtaaaaaaaatgctagatttctatggaacatattttatttagtggcactcgaaagattttaagcaaacttcactataaaagcagcataatagtgagatacagttcatttcaatcttaggtctcacccaaatcagtaatattcaaatagcatagcaataggcagaatagaaacaaggatgaagaaaagatagtggtagtagataaaaatgaacgtggagtttatatctaaacactccctcaaaataatcctcaatttggcagtatttaattgttatgtgtaatatgaatcaaactcagaatccataattttttcagactttttctattttaaaatattgacttgatcctgtgtcttattaaacatataatactttttaatcctggtaatacacacatatacaaatgtaacatgtatgtgtatgtgtatatacatatatataattgcacgtaagtgtgatattttaaaatatactatcataaaaaatgtatggtttacttagtaatatttttctttttgtgtagatgacctccctcactgggtattatctgccatgaagtgcctagcaaattgtaagttaaatatatgtgtgtgtgtgtgtgtgtgtgtgtgtgtgtgtgtgtgtgttatattgatagtatttaacaagaaccaaggaaatttaataaagtcctgataaaattaaagtatatcatttctctttatttataaatgaaagtctagtggaatttattacattatggagcccttaattttttctgtttagaaaggtggcgattttttaattcaagcatattatttatggtttagttcacatatattataaagtcatagcctagaggatctcaaaggattttttaagtgaaatccacactaattgcctcagtgaggctcagagttcaaatggcttgaactccttggtatttctatagtgtagaagcatagaatactagatatattaatgtgactttatgttatgaaaaaaaaagattatctgtcattgtattagtttgttctcgtgctgctgtaaagaaatacttgagactgggtaatttataaagcaaagaggtttaattggctcatggttccacaggttgtataggaaacatggctgaggaggcctcaggaaacttacaacttacagtcatggcagaaggtggaggggaagcaggcatgtcttacatggctggagcaggaggaaggttgtgtgcagaggtggtacgcacttttaaacaaccagatcttgtgataactcactcagtatcacaagaacagcaccaaaggggaaatacacccccatgattcaatcacctcccaccaggccccacctccaacaccggggattaccaatttggcatgagatttgggtgaggacagatccaaaccttatcagtcactaatccagaaatttttttagcatttaattgatcaagcttttcgtagtgatcagtgataattgatttttgtaacataaaaccctagtatgagtacaaaatcctaattgctttcaaagttaattttttaaatgtacaaagatataagctaaatcatcaaaagctaaattatgttttaatagttacaagtataattttctagttcatacaaaattagcattttctaaatgctaatagggttttattaatgttcagggtaactttatattcctttgttgtccactgggtgtcaatatgataaaatgacattgaataaatagcaataaattaaatatatttacagaaacattttatcaaattaagattaaaatctttattatgaacttaagacttgaatttgtctttctactttccaggtatagttagctattcctctctttcattcctttgctcatggttaggaattcagataggcatactgacagggatttctctgacatctggtcttcagggattctgtcttccttctcgtttcagtctatgtaatacctaaacgataccaattatataacttactggattccaaattagcaacaatgtatttagccagaggcagtgttaagacttactttacttgttattcgatcccccagagtaattctgtgagatgtaggaattagtaatcagtataccatcccaatttttccaacagagaaagccaaagcttagagtatcttcttttagtgcaaatgagctagagctcaaacctagattctctataaattctatatttttaatatttttaattcctgtaaacatgtattttctgtcttagagaactttctaatgattatcaaatcttttattccacatactatttcttatgtccttagaaaaatatctattttgctctgttgttaagagtgtgtgtgtgtgtgtgtgtgtgtgtgaattgttttctttaattctttttcagtgtgtgctcacatttgtgtgtccatacaaaagtttggaaacagagaagtaagaaatattatttggacttgggaagagaaacattttaacttgaaagatagtataatggctctaaaacctagatgcataccacagtcactaaagagactctccagagattctgtaggtcaggaatctttaaaaaatatatatatatatatatgcctccagaagattactatagtgaagattctcaggttagtgtttggaaaacactcagtgaaccagaagcaaacatttctaggtcagtaaatttctggccccgccttcatggattatggtctccatagaggactttgtatttttaataggcacattggatgattctgtgatataatctatgaaccacactttaaatgttgttgtagctttaaaagtcctgggccttgtgcttattttacactgctctaacttctaattcaaactttgctaccagagtctttttcatcttgggcaaggtactctcagcctcagttttcttatctataaaatgagatcagatcttatttttgaggaaaacacaaatgagtaggtatgattatttcaatagttgtgtcaagcttaagaaacaacaatgtaaagatattatttaaattcattaaggctatgcttcatgtcagacaaaatatattcatgaacatgtaaatttacaaaaagacaatttgaaggaattatttgtgttgtccaaatattctttcctttacaaaatgaattacaataaaatcttattaaactaagcttccctaatgcttttaaaatgatattaaaattttgctttatgtatgatttttcaggtatacaaatgttaaacaaaatactagcaattgactgcttccagtggaaagataatgaggaagaatgaaatacaccctttaaatttttgaactgtggcagaatttgttgttaaacctagctccttcatgaaatacagattttatactttttatgtttaaaaattgtatttaaattaaaatatactttacctttttctcttgccttctacttcttagggccaagaagcaatgatatgaataatccaacttatgttggatttgaacgagatgtattcagaacaatcgcagattattttctagatctccctgaacctctacttacttttgaatattacgaattatttgtaaacattttgggtatgtatagattttactgattttagttcattttgttaaagttttcaactttcttataatttagaagatctaaaaccataggtaaatataaaggtggcagcctacaaattattttaaaattcagtgaaataaggttccgaggttactcatacttccgcccagccaactaccaattcgggacttccctcaaccccctaccagactcaataattcactacaatgattcacagaactcagaaaagcactttaactatgactattagtttattataaaagctagacctcaagaatagccaaatggaagagttacacagagcacggtatgagggtgggggtggcacagagtttctctaccctttctggtcatgccgtgatcccagcacatccatgtgttcactaacctagaaaactccctcagcctgcatgttttagagttttaattgaagtttaattaccaaggcatgactgaccaaatcattggtcactgttgtcaattgaactcaatctctagcccctttctcctcccacaaggttgtagttggtgatgaaaattcaaaccatggccggccctcagttaccttagcatgaactcagatacgctgaaataggcttgttatgagtaactaaagacttctatcattcaggaaatttcaaggattttaggagctccataccaggtaccaaggacaaagatcaaatatatgtattttattataccacaattatcttatatttatgaggtttctagtacttgcagactgagaacagattttttaaatgtattctggctcaatccatttaattaggctgttgaaataattttttaaagttatattacaaatgggaaaaccactcatctgtcttgcacgtttgtaaccgaatgttgcatgtgtcctatttaagtggcttctgaattaagcaactactgtgtatactatactaacaatatatactatagtaatgctttattttttaactttactattgtttttgttttatttttgtccactgtcatacagttgcatcttaatttttgtttcatttcctggtagttgtttgtggctacatcacagtttcagatagatccagtgggatacataaaattcaagatgatccacagtcttcaaaattccttcacttaaacaatttgaattccttcaaatcaactgagtgccttcttctcagtctgcttcatagagaaaaaaacaaagaagaatcagattctactgagagactacagataagcaatccaggatttcaagaaagatgtgctaagaaaatgcagctagttaatttaagaaacagaagagtgagtgctaatgacataatgggaggaagttgtcataatttaatagggttaagtaatatgcatgatctatcctctaacagcaaaccaaggtgctgttctttggaaggaattgtagatgtgccagggaattcaagtaaagaggcatccagtgtctttcatcaatcttttccgaacatagaaggacaaaataataaactgtttttagagtctaagcccaaacaggaattcctgttgaatcttcattcagaggaaaatattcaaaagccattcagtgctggttttaagagaacctctactttgactgttcaagaccaagaggagttgtgtaatgggaaatgcaagtcaaaacagctttgtaggtctcagagtttgcttttaagaagtagtacaagaaggaatagttatatcaatacaccagtggctgaaattatcatgaaaccaaatgttggacaaggcagcacaagtgtgcaaacagctatggaaagtgaactcggagagtctagtgccacaatcaataaaagactctgcaaaagtacaatagaactttcagaaaattctttacttccagcttcttctatgttgactggcacacaaagtaaggctgttgctttcaatgcatgcaatattaactttgagtgtttactaactctgtgttttgcttacctggcttttcttccttgaagttgcttaattttttttcctccaagaggaattatttaaaaagacttttgtctgtgacataaccaagatttattctgtttacctaaggaacttattttcttttttgcaatttcatttattctgagtcactttatttgtaataagtgaagaattttaatacttagaaataagttgtaaagaaaataatgagaatcttaccatgctttagaggaacgtaatttctagaaatagttaaaagatgaaatactaagatattattttaccttctttatatagctgtatatactggtagtatgaaagcaactagtgtcattgatgatttttgggggggtatttttgtattctaggcttgctgcaacctcatttagagagggttgccatcgatgctctacagttatgttgtttgttacttcccccaccaaatcgtagaaagcttcaacttttaatgcgtatgatttcccgaatgagtcaaaatgttgatatgcccaaacttcatgatgcaatgggtacgaggtcactggtaagttgatttcttatagaaagaataagtctgattcataaaccaaaataacaaaaccaaactacgtaaaagtactactcaagtgatgtcttagtcttaaagtgctagattcttaggttggaaaggctctttaacctttcctagcagcagaattttggtgtattaatcttttgtgcacactctgttatactttcacatgctgatgttaatcctggctaaggactttgcctgctcattcatcctgaatcacttcatagtgattgaccagtcagaccacgttatgttgccttgtgccaattctgtttggtggataaggaagaagaaatgtaggtactgttgaaagcctaaggagactataactgtggacgcagagaactaatggaacttaatacagtaagtcagtgtttcagagaatatagtaatggaaaagtaggtcatcgtggacaagaagttgggaagcactattgccaaacagccttaggctccttgtgaaaatgaggataagggcatttatatgcagacaattgattggaaatgaactcttgaaatagtatctttaatctctttctttttttttaagtcaccacttcctcaaaatgcaacttcaatttacaagaggttcttatagcaaggaatccggagttatgctttcttccacgcgttattaaagatagttctttaacaatgacagacctaatataaagaagaagaattattcttgagtaattatagcactattaaaaagctaggaagtttatagaggaagatgttttcagagacatgactgggaaggtgataattttggttttgcacttttaagatttgaagtcataggacctccaagagaaattgaaatttgtccaacagaatgttggaaatatgagccaggtgaagaaagatcaggggagaatgcaaattgatttggtcatttacatagggatagtacttgaagctatgagagtagatgagctctacaaggctaagagtgtgaagaaagagcaaaaggctgaggtctgagccatggaaggagacaggaaaccccgagtgatgtgtaggaataaaactaaaaatgtatcaattctataaatattctgatcatctactatgtgtgaaatatttaaaacaattctgatttctaagtattttagaatgaggggtgtgtgtgtgtgtgtgtgtgtgtgtgtgtggtacagttagagggttgcatagatataagtgaaagtaacgagagtaataagtgagagtaatcaattttatcccaggatttgaagatcccataagatggaattgaaaaatgtgtgttttaaattgctgtctaaagactgacagaataaacatttttaaaaactattttccagcatttcaaaagctaaatggcatcagctttgcaaccacttatgaatagaagtgttctatatgttacacattctcctggtttgtgtttttctgtgggattcatttaatgtaattagttattgttctctgacaatctttaagcttaagcaacatatatatgtggtattaatagaacctatggtgtttactgataaaattgtgacaaaattgtagaaaaaccaaagccttttataattcttgggaattacattaaggatatactttttttttttttttctggttacacaggatcacgctctgtttcccaggctagagtacagtggtgtgatcatagctcactgcaccctggaattcctgggctcaaaaaatccttctgcctcactctcccaagtagctggaaccacagtcatgcaccatcatgcctggctagttttttatttcttcataggtatagggtttcactatgttgcctaggctggcttcgaactccttgcctcaagtgagcctctcacctcagcctcccaaagtgcttagattacaggcatgaaccaccatgctcagccatggaaaaactttaaaaaggatttatgtataatcaaattcttacatttctaactgtataaatcgttgtcctcatttttaaactgagggctgcttaccactttttcccaatacttcacataatgctacctggaaattaccgatattctagtttgtatgcaaccttagctttttaaattcacatcttttaatatttttctagatgatacataccttttctcgatgtgtgttatgctgtgctgaagaagtggatcttgatgagcttcttgctggaagattagtttctttcttaatggatcatcatcaggaaattcttcaagtaccctcttacttacagactgcagtggaaaaacatcttgactacttaaaaaagggacatgtaagtattgtgagtcttaaaattctctgcaatagtcagttgcaagtggcaaactcatctcaaaatagcttaatcaaaaagggagactttatcagctcccataaacaacctctaaaagtcaggaatgtagacagaatctgggactcaaatagctatatgactctttccatccctccatctcttatttctgtgttgatcctgtgtttgacaatggctccttcacatgatgaggaatgtggctagttgaagttcatgagttagagccttacatttgcaattcaaaggaaaaagagccattcctccgtctccaatttaaaagctctggatgtagactcttagcatagttgaggttaaatatgcatcgtttaggttgttaagagtgagtaggatggagatagggccttactctgattggttctacacaaaggagaatttattcttcacaaaaggtgaaggtagaggggtaaaatgggaaggaactattaaaagaaggagagaaggaatactgagcagccaaaataacagacatctactgtattctgtctttggctgcccaacacatgtttatgtttttcccatacataccattctaatattgccctggcttataattataactatctcctagaatttctttctcttatcagaagatgttagaagctctgcctatgtccctaggcctcaaaaaaaaaaaaaatacatgaaaactaaaaatatttcatttcagtaaatatgctgatcatctactacctgcactgtcagaacattaaagtcttaagatgaattagaataacacttagattgttattttatagttaaaagaataaaatccatagttaatggtaataattataatacctgtctttatttaatgcttattgtgggctgagccctttctatacattttcttatgtaatttccattttaatgatgaagaaacagaccaagaaaagttaaatacattgttgaatgctacaaaccaagtagattatggagctggggtttagaacctactgacttacatacctctactgcataatacatagtttttttaatggctgaatgtttgattggtggtaaattaataggtgctagatcccatcaaaagaatactttatcatataagaacatgaccagaattaacagagttatatcattttgatcactacagattgaaaatcctggagatggactatttgctcctttgccaacttactcatactgtaagcagattagtgctcaggagtttgatgagcaaaaagtttctacctctcaagctgcaattgcagaacttttagaaaatattattaaaaacaggagtttacctctaaaggagaaaagaaaaaaactaaaacaggtaagagaatgagcaagttctcaatcatgtaaacattttctaatgtgctgttcctggttgttaataacatttagaatctactttcttattttaatattttagattttaagtttgagttatatagactatatattatgatgtcttgtatatgtgcgttaacctaaaacatgtgagtacctacctgattttgctctttatcctgaattttaaaataataccaacagtaataatatatactctcctttttcactggtattttgtataattatagcttggattagcctgggaaagcaatttataaggtatggatatgtatctttgagtgacttatcactgttttagaatttttagctctgaaagcccagtagccacatgattttggcatgtctaattctaagtctgagacactgaaagaaatatgaatactagatgcctatgcccttcataggttttatcagtgggaaagaagatctggaatttagggggagaattaacatcggaagagaaagaatcctaaaatgttaatgttaatgagatctaagagatcttatagtattcacatgagaagagagagggaaaggcaaggataaaatgaaaggatactaatctctatactacgtctttgagaaaaacactgaattcttataaaatgttgagcactgcttcagcttgggaaataatgttaaataccttctaatttctcacctcatttttaagtttcagaaggaatatcctttgatatatcagaaaagatttccaaccacggagagtgaagcagcactttttggtgacaaacctacaatcaagcaaccaatgctgattttaagaaaaccaaagttccgtagtctaagataactaactgaattaaaaattatgtaatacttgtggaactttgataaatgaagccatatctgagaatgtagctactcaaaaggaagtctgtcattaataaggtatttctaaataaacacattatgtaaggaagtgccaaaatagttatcaatgtgagactcttaggaaactaactagatctcaattgagagcacataacaatagatgataccaaatactttttgtttttaacacagctatccagtaaggctatcatgatgtgtgctaaaattttatttacttgaattttgaaaactgagctgtgttagggattaaactataattctgttcttaaaagaaaatttatctgcaaatgtgcaagttctgagatattagctaatgaattagttgtttggggttacttctttgtttctaagtataagaatgtgaagaatatttgaaaactcaatgaaataattctcagctgccaaatgttgcactcttttatatattctttttccacttttgatctatttatatatatgtatgtgtttttaaaatatgtgtatattttatcagatttggttttgccttaaatattatccccaattgcttcagtcattcatttgttcagtatatatattttgaattctagttttcataatctattagaagatggggatataaaagaagtataaggcaatcatatattcattcaaaagatatttatttagcaactgctatgtgcctttcgttgttccagatatgcagagacaatgataaataaaacatataatctcttccataaggtatttattttttaatcaagggagatacacctatcagatgtttaaaataacaacactacccactgaaatcagggcatatagaatcattcagctaaagagtgacttctatgatgatggaacaggtctctaagctagtggttttcaaactggtacacattagactcacccgaggaattttaaaacagcctatatgcccagggcctaacttacactaattaaatctgaattttggggatgttgtatagggattagtattttttttaatctaggtgattccaatattcagccaactgtgagaatcaatggcctaaatgctttttataaacatttttataagtgtcaagataatggcacattgactttattttttcattggaagaaaatgcctgccaagtataaatgactctcatcttaaaacaaggttcttcaggtttctgcttgattgacttggtacaaacttgaagcaagttgccttctaatttttactccaagattgtttcatatctattccttaagtgtaaagaaatatataatgcatggtttgtaataaaatcttaatgtttaatgactgttctcatttctcaatgtaatttcatactgtttctctataaaatgatagtattccatttaacattactgatttttattaaaaacctggacagaaaattataaattataaatatgactttatcctggctataaaattattgaaccaaaatgaattctttctaaggcatttgaatactaaaacgtttattgtttatagatatgtaaaatgtggattatgttgcaaattgagattaaaattatttggggttttgtaacaatataattttgcttttgtattatagacaaatatataaataataaaggcaggcaactttcatttgcactaatgtacatgcaattgagattacaaaatacatggtacaatgctttaataacaaactctgccagtcaggtttgaatcctactgtgctattaactagctagtaaactcagacaagttacttaacttctctaagccccagttttgttatctataaaatgaatattataatagtacctctttttaggattgcgaggattaagcaggataatgcatgtaaagtgttagcacagtgtctcacatagaataagcactctataaatattttactagaatcacctaggattatagcactagaagagatcttagcaaaaatgtggtcctttctgttgctttggacagacatgaaccaaaacaaaattacggacaattgatgagccttattaactatcttttcattatgagacaaaggttctgattatgcctactggttgaaattttttaatctagtcaagaaggaaaatttgatgaggaaggaaggaatggatatcttcagaagggcttcgcctaagctggaacatggatagattccattctaacataaagatctttaagttcaaatatagatgagttgactggtagatttggtggtagttgctttctcgggatataagaagcaaaatcaactgctacaagtaaagaggggatggggaaggtgttgcacatttaaagagagaaagtgtgaaaaagcctaattgtgggaatgcacaggtttcaccagatcagatgatgtctggttattctgtaaattatagttcttatcccagaaattactgcctccaccatccctaatatcttctaattggtatcatataatgacccactcttcttatgttatccaaacagttatgtggcatttagtaatggaatgtacatggaatttcccactgacttacctttctgtccttgggaagcttaaactctgaatcttctcatctgtaaaatgtgaattaaagtatctacctaactgagttgtgattgtagtgaaagaaaggcaatatatttaaatcttgaatttagcaagcccacgcttgatttttatgtcctttcctcttgccttgtattgagtttaagatctctactgattaaaactcttttgctatca

SEQ ID NO: 17 - DNA, 27920 bp, Homo sapiens
  source 1..27920: mol_type = other DNA
agtaggatgcggccagcgcaggagctggtggtgaaaaactgatctcgcatgttcagaaactgcacaagctctaccacatcctcgtcaacactgcccttccggctgaggtccgctttgctcaaacattgcgccttccatttcctgaactccgcgctgcgatccatgggtgacggactcagggtctgcgctcggctccttcatggtagcctcgtctctccctgggggcagccatattgaagcgagcggtggccgaaaaggtccaaacttcctcttcgttcttaatttgggaaattctagtgccttcgcctaggggtggagagaggcgcacatcctgggtggagcgaggcgcacatcctgggtggagcctgcaaaagttggagaaggtgtggcagtcctcatttctgtggaatctgaagaagcccacgcagattttaattcccactctagattctggtaagtggttttaaaaactctccttagttgtttagacagcgaatctccccactgctcgtccaagtggaaccgagtttgattttggctgcacccctttcctgccctctgtcctcccagagaactagtgcgtagagctccagaccgaagccattcccctccaggggctgcaagttcccatccataaatcaggtaggaagttttgccttctggtcctgggctcctagccctggtcctgcgtttaggctctgagtttaggctaccacaccatgaggtgtccgttggcactacccctgcccagcctccgccccccgcactccctgtcccccagccccacgctgcaccccccccccccccccccgccagtcacccgcttgatttttccctgcagccagtgcctgggtttggggattcctgcagcagcgcccagcggtctgtccagggccccttcccacagcccagctctcagctgtagaggatttgtcctaggtagggccccttcccacagcccagctgtaggggatttcttctcctaggtagggccccttcgcacagcccagctgtagggatttgatttcttctcctaggtagggccccttcccacagcccacctgtcagctgtaggggatttctcctaggtagggctccttcccacagcccagctgtgggggatttcttctcctaggtagtgccccttcgcacagcccagctgtaggggatttgatttcttctcctaggtagggccccttcccacagcccacctgtcagctgtaggggatttctcctaggtagggctccttcccacagcccagctgtaggggatttcttctcctaggtagtgccccttcgcacagcccagctgtaggggatttgatttcttctcctaggtagggccccttcccacagcccagctgtgggggattttttgtcttggattcccacaattacaggtttcccggagcttcctccagctttgccatcaggattgcagtctttgagagaaatgtatagttttattgaccctgtgacgcccaccacctagaataatcttcaaaagaaaattacaaaacaccctgttaacacatcgttggatgtttatactgagtttctagaggagactcagtgaccagggaaggtgtgtcaatgattaaacctaaaggctaaagtttggaatgcttgtccgtagctaatggaaattgttgtgcgagtccctctgaagccactgtgattacgtgtctggttagcgcagcgagttcagcagcaaatctctccaagctctactcctccagcattagggaacagactgccctgttccatacgatcatggaacctggaggagtccgaaattattaaactcctcccctcttcttaccccgtcctatctcaagtgaacagaagtgacctgataagatcacacagccaggaagagactttctctgaccacttgtaattcttgccttttttacatttctgggttaataataaaccatatgcttacatgagtcattgtgtattagcagcagaacaatttgtaatgattgattttttttctaagttttcagtttttaaaattcttgccagaattcttatttaattttacttttgctcttgtctcataatgttcctttgctctggctttgtgacttgatctgttcatcctatgttaaaatatactcctaacattttcccaattcctttaattttcgtttaaatcaaatggatacaagcatagccaggaaaaagatcactgttggaagagggattttagattttctatttcctagatttgtaaggcatattggcaacctttcagaggtaaaattaaaccaaaaattaaaccaagggactcttaatttttaaaagtttatatttgataaacaggaaggcctatttgaagtatagtttaattaaaaagcacaagcaatggaaaggcctgtcctgttcacaaggatccgatgctagggagtaatttttttttatacatttttaaaaatagaatcatgtcctttgtatttctgctgcattccctgacttagtgggcatttgagaaatttcaaactctaagcagatgccttagtcataaaatatgcgattctacctgcaggttagtttgatttcacattttctagctcaatctgtctcactatcactattgtaaagtttatttctacgaagtaaagggtcttatatgccagcatctcaaagggtgagatgaaaaggatggtaaagaaaaaaatcagctaacaccatttaattacaggacttgggttctagctttgcttctgtgtgaccctgaccaagtctcttaacctcttgtgatgttttctcatccataaaatggatggcgattttatttttacttctgcataaaataatagtttaaataacttctctacctgttctgaaaacagttaagtcaatggaggtggaagacttatgctttttagaagaaatccggtattacaggattttaagtattatcctatttgccatcagtatgccacgttattttattctttgtgtaatctcctttgacaggcttcatcgttatgaagcatatgatgatcccgtggataggtgagttcaaaggcaatgagtgcaggttggagcctgatgaatcagaatgctaaaggctcagtgggagataagatcaacagaagcaaagtaggagatagtgtggtcaggccatgccccatcactttcaagcctgataggataatgtagtcagatagtactgggcaaagcagatgagtcttccaaatccagtaggatgagtcatcttcctttattcctttctcccaacttagccaatgccaaaatgtggggggggaaagatacagatcctatttcagagtaattttacttttattattacaacagtttttttatggtaatcatgagatgtgagtgaaagaaatatgtaggaagtaggtagatatcgaaaatggaaaaagcaagcatctcataggctatgtgtgtaggtgtgagagagagagagagagcacccagcttacagaagctaggggcagggtggggcattttcttcttgctctttgtgttctctgagtttaacacaccacttcatgtacagttaaggttcagaaaaatacgcattgcataacaaccaatatttagtattaatgttttgtttaagtcatcttctagaccgaattctttgagaataagagcttgttttgataaccagagttctgtaaatatcgttatattaaagatgattatagaactatagagtatatttttttcataacattttaatgacttctctagtctgctgcttttttttttttttttgagacagggtctcactctgtcacccaggctggagtggtgcagtggcaggatcatggctcactgcatcctgatctcctgggctcaagcaatcctcccacctcagccttctgagtagctgggaccactggtgcttgccaccacacctagataatttttttttttttttttgtagagatggcatttcgccatgttgccaaggctggccttgatctcctaggctcaggcaatccttatgattcagaaattgaaaagaagaatagaggggaaaacaataatgatgtctactatatacaagatcatgtgtttgctaagttctgtgcttggtgcttgccacgtctctagcacgtaactctgagtgggatcccagatttcagatgaggaaacagcatcaagaggttgactgccttgcccaaggccatgtggctcccacatgatagagctgggactcacacctcgagctgcatattccaaaacctgctctttccgtaacgtcatgttgaaaaaaaaaaaaacaaaacaaaaacaacctctatgttcttatatccaccatggaaaattctcatctgggctacctttttcttttttattttcttgatactttcactttcttgtctaaggaattctgagctagagtgaagacctgaatggaagtagagtggtgagattgctgagtaggactggactgtttttttcccagccctgccctctgacagatcatctccccgtcagagactgccaagctgttctaaagtgcagtgtttatgccgtaggcctgcttctgcctctgtttttccccgaggaccacccttgaggatatgtcattgctaaacaacctttggaaatgtcactttctcctttgtgctagacattgttaaatccttttaagggttttaaaatggcacaaacttttgattaattatatcaagaacttcccatcaataacactaccaaaatacttatgattccaccccttgccccagctgctgtatgtggaaatgtggaatgacattttatagcctgtatgggctctgttctgagtagtcctgtgtggagttttgatacagtaaaagtctgaattctttcatatcaggtcctggtttctgcagctcttcttaatgtttaagcttcttgtggttgaggcagatgttttaggtgatggcagaatctaacactatttggttgatttcaagaaattataacccacagataaaattatggggatatagtcaaaacctttcattacatctttacaggtacaaaaatttttctaagattatataactttctgtacaaatgttctttgcttttttctaggttatttgaactctgagttttcatttcctttggtattaacagtgataggacagaaaggttagctgtgaccttgtaatttataaaagattgcatatggtgcactgtttttagttttttgatgtttttccccttttgttaaaatgaatgaactacataaagccaagtgttttgacattgataaatctcaaaaacttaatgctgaaaggaaatagcgaattgtagaattctttttcaaatcagaattttctttttcctttcagcactaagtttctgagatttttatattccctaaactgtgtaaataaagtttgaaaacatgcaaaacaataacacatattgtttaatattacatactcatgtagaagtggtattaaatgcttgagaatgatgagtactaaatttatggttatagtcacctcttgaaagggtgggacagaagcaggtttggcttcaattatatctataatggtttaggttttttaaatgttaagatttgttaaagctgggtaatatcatttggctctgtcgccacccaaatctcatcttcaattgtagctcccataattcccacgtgtcatgggagggacctgggggaggaattcaatcatgggtcaggtcttttgcatgctattcccatgatagtaagtctcatgagatctgttgggtttttttttttttttttttttttgagacagagtctcgctgtgttgcccaggctgcagtgcagtggctggagtgtagtggcatctctcagctcactggaagctccacctgccgggttgacgccattctcctgcctcagcctcctgagtagctgggactacaggcgcctgccaccatgcccggctaattttttttttttttttttttttttgtattttttagtagagatggggtttcactgttagccaggatggtctcggagatctgatggctttataaagtggagttcctctgcacatgctctcttgtctgccaccatgcaagttgtgcctttgttctcctttgccataattgtgaggtctccccagccacgtgaaactgtgatcccttaaacctctttcctttataaattgtacccagtctcaggtgtttcttcatagccatatgaaaatgaactaatacggtaaataggtaccattagagtggggtactgctgtaaagatacctgcaaatgtggaagcgactttgaaactgggtaacaattggaacagtttggagggctcagaagacaggaagatttgggaaagtttggaacttcctagagacttgttgaatggctttgaccaaaatgctgatagtgatatggacaataaagtccaggctgaggtggtctcagatggaaatgaggaacctgttgggaactgagcaaaggtgacttttgttgtgttttagcaaagagactggtggcattttgcccctgccctagacatctgtggagcattgaacctaagatgatttagggtatctggctgaagaaatttctaagcagtaaagcattcaagaggtgacttgcgcattattaaaatcatttagttttatgtattcacaaagatatggtttggaattggaacttatgtttaaaaggaaagcagagcataaaatttcagaaaatttgcagcctgaagatgcaatagaaaagaaaaacccattttctgaggagaaattcaagccagccgcagaaacttgcctaagtaaggaggagccaaatgttaatcatcaagataatggaatggggaaaatgtctccagggcatgtcagaggcctttgcggcagtcgctctcatcacaggccagaggcctaggagttaaaaaatggtttcctgggccgggcccagggcctccatgccgtgtgcagcctagggacttggtgctctgcatcccagccatagcttaaaggtgccaacatacagatcaggccatttcttcagaggtgcaagccccaagcctctgaggcattcatgttgtgttgggcctgccagtgcacaagagtcaagaattgaggtttgggaacttccacctagatttcagaggttgtgtggaaattcctgaatgtccaggcagaggtatgctgcagggatggagccctcatggagaacctacctctgctagggcagtgcagaagggaaatgtgggctgggagcccccacgcagagtccctactgggacactgcctggtggagctgtgagaagaaggccactgtcctccagaccccagaatggtagatccactgatagcttacactgtgtgcctggaaaggctgcagacactcaatgccagcccatgaaaacagccagcagggaggcttaccctgcaaagccacaggggcagagctgcccaaggccatgggaacccacctcttttatcaaagtgacctggatgtgagacatggagtcaaaagagttcattttggagctttaagatttgactgtctcgctggattttggacttgcatgggacctgtagcccctttgttttggccaatttctcccatttggaatggctgtatttacccatttcctgtaccttctttgtatctaggaagtaactaacttgcttttgattttacaggctgataggcagaagagagttgccttgtctccaattagactttggactgtgaacctttgagtttatgctgaaatgagttaagattttgggagactgttgggaaggcatgattggttttgaaatgtgaggacatgagatttgtgagggtcctggggtagaatgatatgatttggctatgtccccacccaaatctcatcttgaattgtagctcccataattcccatgtgtcatgggagggacctggtgggaggtaattgagtcatgggggaagggagttcccatgctgttctagtgacagtgaataagtctcacaatatctgatggttttataaaagggaattcccctgcacaagctctcttgtttgccaccatgtaagacatgccattgcttctcctttgccttccaccatgattgtgagacctccctagccatgtggaactgcaagtccattaaacctgtttcctttataaattatccagtcaccagtatttcttcatagcagtatgaaaatgaaccaatacactgggtgtcaggtaaatgtttggaatgtttcataatctaacaaaaggaggtcagtttacctaatgttaataaaactcaactcataaaatttctaaggtattgcaactcaagcaagaaaacctaaatatggtatcatgctatgtctatccagatgtttttgtttgcatgtttgattcctttgttgaaggcactgaatccctgcaggaagtagcatgaaggattctgctttatagctgagggatttgtaagatgaaaggtccttaaacatgaaatgagatcagtggtaagctcatgatttaaattgttatttgaaaaaattgtttgatctgctccctccaggggggaaaaacatggtgatatcctagatacaatgtgacaatacattaattttttttcttccttagtatctagatcaccatggcgactggacagaagttgatgagagctgttagagtttttgaatttggtgggccagaagtcctgaaattgcgatcagatattgcagtaccgattccaaaagaccatcaggtagaaataaaattactttattgaggctataattatactgagtgtgagtctcttgcacattgtattaaaaagaagcagactcacaattatttttaaaaacattgaattaggatgcagtttacactatgtatacatatggacattgataaagttaacataaacctgataattagtgaagtagatgtatgaaaaagaataacctctggttataagaaaatttttgatgtagggaatgatctatgtagtgcaataattggatttttctgaatggacacataaggagttttgaataagttattctattacaaacattcatgatttttattttttgcatgctgggaaaacaattttcttttgcattcatgctttttcatgtgtgattcatgagaatttaagtatatagtttaatcatctccagtgactttaacaatacacttttgattttaaattatgtatttttattactgcaccctccatggctcccaagtctaattttcttagcaagcctatgagagtctttacagtttggatataacctatctttacaaatttatttctcatcacttcctctccatgtagagatacagtgctgtaacaacatcagcttttgtccaatttccttaatacttcctttcatttctctgtctttgcacatgctatttttttttacccaacctatcctttctctcattcctaaagaatttctacttatcttttaaaccctaactaaataccacttcctttataaagccttcccttacttttataccagaggtaatcattctgtgttaattaaggtaaaattagctcccacaattgctgtaacctaaaaattgcaatagtccagccatggacaattatttcttatacactaaatttaaaagttctcaaatgtgggtgggtagctgttctccaacagtgacttagggactcagcttcttctttcatgtggctctgccacccaacccgtcttcagggtctccatggaagaagaaaagcacgatgtggcttggctgggaagttttaatgggtcaggtctgcaagtgtctactgtcacttttgctaacattccattggctagaactcagttacttggctactcataaccatgagggaggcgaagaagtaccactctttctgtgtacccaggaaaaggagaaaacgggtttgatgaacacgcagaggtctctgccacatatccccttagatatttctttcactattttccccaaaatgtttttaatgcagtacataagccattctgtcatacttatttatgttagcttgtaaaacttggaatgtgagcttgttgaaggcaagcacttatttgttttgcttttgtctcccattttgatagctcccataatcagcacagtcctagcataaagttaaatgaatgcctaaattctttctgtgaactaaaatacattgtcattgcaggttctaatcaaggtccatgcatgtggtgtcaaccccgtggagacatacattcgctctggtacttatagtagaaaaccactcttaccctatactcctggctcagatgtggctggggtgatagaagctgttggagataatgcatctgctttcaaggtattgcatttttaattatttctattttggctgaatttatttcataaaaatatttgaacatagctttcaactgcatcttatttaaggttttaaaaggccccattacacaatttctgccactcgggggactcctctagtcaaaaaaggaattaagaaattagattttatccagaggccttatttgtttactacattgtagtgaataggtgctgggtaatttctgtatcttcatgtccccacagaatgaactgtgattttttttatttaatagaaatatgtaaggaaagaaaacacacaaggaagttagactatttcctaactcttgatgatacataagctaacataatttttaatttctcttataaattttgcttcataatataaagagaaagttaattcttttgaaaaataagtaaaacatgaaaaaatgcaaggtcactatacagttttggagccctgactcagtgaaaatgttatgctcaggatatatatatatacacacacacacatatatatatatatatgcccaaagacatattcatagtaagctcatgtcctagcatctttcctcataattccttgacctgctcaactttggcagcaccttaccaaaattaggttgagacagagaagattactgtgcccctgtacaggaagactggcaaattcatacagctttccacccctcagcttgtggcaacctggcttctgcccccatcgctccactgaaaggattcttgctaatgtcactaatggcctctgtattgctgaagttaatgggcccttttatgtcattatctttcttgatttctctgtgacatttgacactcttagccacttaactttttctttaaactttttctgcagcttctgtgacatcattttcttctgttctcctctccccctcctttctgggcctccgttttcaggcctctctttttctctggatattccttaaatcttggtgttgtctggggctctcagtctctatttagacctctgctttctgtattctttacctttttcataatctcatacactctttttgttgccattatcacatgttacatctttagcatagaattttctgctaagctctggatctgtgctatccaaaacagtagccactagctacatgtggcaatttaaaattcaacttaaattcatattgaaaattcagttcctgagtcactctagcaacatttcaaatgcttaatagcctcccgtgtccagtggctatcctgctggacagtgcagatgtgaccatttccatcattacagagagttctgttggagacactagactcacatgatcaacctccagaaatctcttacaaaacatgtctaaaactagcttatcttttctcactgcagatagcgcctctcttgtgtgactgtcttggtgacttctgggatttgaggattactcctcgctttcccttactagaactgttttctctctcctttccatttccactgccagtagtttagttcaggctatcttacctacttaactatacccctgacctgaatttctataatagacactttctcttttccctggaattcatccttactctagaatgaatcactttatagaatttaattctgattgttttacacctctgttttcattcttgcatccatgtcttgtagacttcagggagactcttaaaattccttattgctatgaaataagactgtttcatgctctctcccatctgtctttccagtcttaactcccactcctcctcacagtgtagtttattcttcagtaatgaagtgtttgtccttccctgcacatcccatgctctctcatctctgtgtttttgttcatattggttcttctaattgacagaattaaattgaaacttacaaacatggattcaaaggattttacactttagcttcaatttcttttcattttatctcctgaaacagttacataccacacattagtctgcttactcattggtaataaatgctgctaatttcatggcatttattcctgtccctatcgtttggccaactttgtttccttcacccgtaatgactcttccccattctagttttcaaaatcttgtcctgttcttcaagatttacctcaattgttagcttctcgataaagctagtcctaatttcctctacttagaagtaatttctttctttttcttgtacctatcttcagtggctcatcatgtttgccttgctttttgtaattatttctatcctttgcttttctctcctccgagagtctaggatgcttgaggttagggacagtggtattgatgtgcctcacataacttgaaataatgctttctatgtagtatattcgcagtaaatgtttgaattatattgaaatcaattcaacatgttttttagctgttaaaactggattaatcttcatcatatttgacatttctgggcaaccatattaagcggtgatacttgtctttgactcttggatggcttttgaatcttttttgtctttatcctatcagataacatttctacattttcagatttcagttaaagtatactgagcaatcattaccttaataatttgcctattctaaggaatatctacttttttctaaaaaggaggagttaaggtaggtggttacggtgggcagtctaattttccctaatgtgcaaattacatactggcccaataatgcctggcctagggcattgtttcaccctgagtcctgcatctactttttaatagtgaggtccagcagacatttgttgaggctttactgtgtttctggtgccgtgacaagaagaaggctgtcctgggtcatcctgctgtcagggtcctagtatggttttctgcctttgggtgtttgcatgagaaataacggcaatgcaggggtgaggaaactcatggatgggatttagagtaggtgtttggtgtgcggaagaaacttcatatcttatttgtttcttctccctagcattttggacaaaaataacagtttatattgactgctatttactagctgcttgatctgaggaaattattgaacttctttgttcctcagtttactcatctgtgtagtggggattgctctaaagtagagataatacatgcccacctcactagctgttgtgaagatgaaattagataacactccagagacacttaatgcagtgcctggtatagcaagctcttcatggactgagccatcaacatcattatgatgccattcaaggaagtttatccttctttttcttatatgttttctgttttccttagattttcttcccattggttcccattaataaatatttttaaatgtgaagtattttaaaatgatttatggctgggcatggtggctcacacctgtaatcccagcactttgggaggccgaggtgggcacattatgaggtcaggagttcaagaccagcctgaccaacatggtgaaaccccgtctctactaaaaatacaaaaatcagccgggtgtggtggtgcgcgcctgtaatcctagctactcaggaggctgaggcaggagaattgcttgaacccaggaggcggaggttgcaatgagctgagatcatgccattgcactccagcctgggtgacagtgcaagactctgtctcaaaaaaaaaaaaattatttatatgagaccctatagaggacaatatatgagtactcacttatttcttgttataaaggattatacctattttgacataatatgtttagtcttcctgcatttattcatttatctcttcccctagaaaggtgacagagttttcactagcagcacgatctctgggggttatgcagagtatgctcttgcagcagaccacactgtttacaaactacctgaaaaactggactttaaacaaggagctgccatcggcattccatattttactgcttatcgagctctgatccacaggtaataacacattctgtcaattttatggccaatgccaaaagagggtagtgttaactgcctgccttctagctgtctgtccatccatctgttcatcatatttggttaccagttacttaccattaaacatttatataatggaaactgtgaatttggggaattgtgctaatcactagggatacaaagaagagcaaacactgtcttcaagatgctcacagtctagtaagggaaatgacataagagtgatcatatttatatataatgtggaaagtacagtggtagagatgtgcatagggatatatagactcagaaggcatgtgcctgtggtgatgaggtagggcttcctggcaaggtgtaagacttagattattttaaagccatggttcaaaaatcttgttatccattagaatcatctaggcagcaatttaatagtacactattgggccctaccccagaccctctggtcagtttccatagctggtgcctgagagtctatagtttaatcccatctactaagtatttgaaaagcatcagagggaattcacctcaggaagggtaactagaaggagagaggacattctggacaatgggaatagtatggggaaaaacagtatggtgtgtgggaacagctatagaaacttgattttgttagagaagagatttcaagagaaagagtagcgaagaataaagttggaacagagtaatctctcaataaatgttagctgtcatcaaatatatagaattcaggttgtaaaagacagattatagagcttatccattgctctgtaaaggactggaagtaatgaaatgctttattcaggagactgctattgtcatatttatgttttattgagatgacttatctgctgtgtgtaggatggatttgaggataggaatgaagagataagagcgtcttataggagtctccactagacaaaatccttatgggccagagcaagggttctggtagaagaagtaagtagagaggaaagaataactatttagtgggggtaaaatcaggggtatttggtgattattttcaggtagagaatgaggaagaacttaagagtagtccagctttctagcttgggtcatgtttaactgtgacaaagaaaagagggaaaaagtttcaaagggaagctgtattcagttttggatttgaagttgtgagagacacatcctaatggagaagttcagtagcctattggataaaaaagtgggaagcttgaagactggagatacaaatttggggatagcagcatgtaggtaagaattgacaaggtgaaaagtggttgaaattcctcagagagtgagaacactggagtgagaatagagcccttgtgaacatcaccatttaagaatgtagtcagagaaaaaggatagagttgtaagagaccgaaaggattccatgaccggcagaatctagaggtcatggtattccttaagcatccagtgaatgcatggactttgaagacagaacagcctgggtcaatgtcttcacatagtactagttgtgtgaccttggttaagttacttaaacatctcaagggcagtttactgatttgagaaacatagataatgacagcacctacctgctagggtgtggtaagaattacttggaggtaatgtgtataaagttcttagtacggggctggcacagggtaagtgcgcaatcactgctggcagccttaggagtggcaattgatattgatactaaggagggaggccagctgtcaaatgcaacagaggtctgttcagaaaaaaatgacagttgggcccagcaattaagaggtcattggtgacattagtcagttccttttcaatagaatggtgggaagagcttgactgagtggattgaggaaggaagaggaaatcaattccttgaatggaaactattcttttaaaaatgggggagacaaggaagagagagtagaaggttacttgaggagagtatgtggaaaaaagggatttttttttttaaggatagacaagacttgaacatatttacagatggaataagatctgcataaggcaagatggaaaggacttaggacataggtagagagattggcttccagtatggaaagcacagctcatctgtaaaacctagaaagggtaaagatgatataattatggaaacatttatggatagggagatggagtgttgaaggtacttgtgtgtgattgcgtcacttttcacaattaagtaggaggcaaaaagtgatattttaagaatcagagctgaagtggcaccaaaatgcatggtcatgtgatttttttctgtaatacttagccatttggatggagtatcaaggaagctagatttgaacattaatccagggctagaatgctggtggcaaaattgaatggtgcaaaagaaatgagagcacaggggctgcggggagaggaggctgggcaatctatggagtccaggctgagtagggacggaaggaaggcctggagcagcaagtgggcagaaatggagctattgagagtcagtaatctctgcatagttgaagaaagattttgagagaatatgggttttcagaattaggataaattactgtcataatattggttattggcatctgatatttctcagggagaatggttgctggtagttaagccctgggagagagtggctataagtggaggaaaattcaggaactgtgatgcttgattttctttctggggaatgcagtgtctccttgattggagctggatttggggtgggagagaaagcctatgtgccaggtcttagtcttcagtgactagaagatggtaaaggacagcagcatggaaggccaggctgagtgttatgagcaccagggaagatgactgtattagtcagggttctccagagaaacaaacaacgggatgtgtgtctgtctgtctatctatcagtcaatcatctatctatttgatcttctatttgatctgatctatcatttatctctatataaattccttaagaatcagtcactctgtacacatacacacacacacacacacacgcgcacacagattgattgattttaaagagttgacccatgaaattgtggaggactggtgagtctaaaatctgttgcggtgggccagcagatgggagacacaaggaagaggtgcagtttaagtccatagaaagtttgctggctgaatttactcttgctcatcggaggtcagtctttgaaaacaaaagccttcaactgattggatgaggcccacccacattctagagggtcatctgctttactcaaaatccagctattccattgttaatctcattcgaaaaaaaaaaaaaaacactgtttctgtaacagagtaatgttggaacaaatattgggttccttggcccagtcaagttgacacataaaattaactgtcacagcgactctgtgcaaggattcaggaggggatttgcctgctttttctcccctcaccccaggccccagggatttatgagaatgtgtctttagtgtttgaggggcatcttataagaatttttgaaaaatttctttgggaggtatttcatatcccatagtttaacactagtcatcctatccccttatgtttatgttttactttaacatattgtcctcagtcccttcagctctaagcaagagtgtgggagaaagcttcacttattgctcattgttgccacttctcagctgttggtgcatagctgggagcaggactctggttactgttctctttcccaggtggagcataatgttctataatgtctctgcagtgtggccaccccacattgtttgaggaagtaagagagccttcctgagagtcagatctggatctcacagcatctgctggcttttgacattggcaccgtccatctggaatagtgaggcatcccctcatgccttgctgcatgtcccttcttttcagtacatactagaaaagtagtcatgtgaactggaagtaaaaagaaaatgccatttcaccagagaatctggacatttcagggggatgacatgggaatctttgtgatagaatttattgcatttcctactctctgacctttgctaactcagcattcctccctgaaagagtacaaggctggtgcaacctgatgttcagagacatggagaagaaaaatttctttctttccttgggcaaaaaaaatagctactgtgtttacttggacattactctagaccacagaataaagactgagctatataataaacctgctttgaggccctttctgtgggggatatatgggaatgagagattccagatcctccaggctcagcaattttacttcacaacccacaaggactgtagccactcagaagtagcaccacatagtcatcccagtgtccagcagcatagtgcctggaacataaagactcccaataaatatttgttcaaggaataaatgaattgaaggctttgtttattctgtggagcttagggaatatttggggctgtatgtcaggttgcatttgctgtttgtgtaagtgttagccagactaggggtagaaattccttaagatgatgaaaacacccgagattaattagcttcaaaaaataaggtgatgtaacttatgctttcctttgcagtgcctgtgtgaaagctggagagagtgttctggttcatggggcaagtggaggagtaagtattttttttaatgtattttgaaacaagcttgggtttatgggtttcacattatagttcctttggtcatttttaaaagtcagatttataaatagagtcaaaggtgctttttttctttatgtagtaaaacttttgattttggtcttctgaaggtgatgttttgtcattagtttagcatttcttggttaataaactcaacagagcaccccttcaaaaatatgttagattttccacctgtattgggtgtagactaagataaactggccttgtttttgccttcaagtagcatatgttataaaaatatttatttagaattttaaacagttctttaaggttgatattaattccatattcccttagataaggaaactaaggctcattaaagcttacctatgttgccccagacagcacggtaaagccacactgtgaattcttagtccttctatctcccttctgctgcttgcctgctgcactttgatgacatccatggagtgcacgtatacagccctgtccttaacaccacaacccatggctgaaaatgctaatgtgggggaatgggggaggaggactcagaacttaaaataagcccttcaatgaaatcacccaatgcagggctgtcagaaacctcttcgagaaactagctgccaatctgcctctcaggagcttagagggaaaagttagagctctgcagttagaatttaacaagaaatccacatgaactctgtcactggatgctttggaaattttggagataagattttgcattttaaaaataaaaggcctggggctagatgcttactttgaggaggctgttaaccatttcagagcactgtgtattctggagagtggattgaaagaagtaacctattaaatggcacatagtcccctgaataatgagtggtatcctgaaaatgtgaatttacctttaaaagtgcccaggtaatttcagtcctttttgtctctctgtttctttaggtagatgaatcacgaggtttcacacctagcttcctacacttcaaatagatcaattctaaaggatttcacagatcaaacaatttatgaaaaaacactaggattgtctttatggggcttgagacaatatgacagatataccttgtccaaaactcccactgtttaacttcactgaagaggctatttttgggttaaattaaatttaaccctaagtaactaaagggtctgtcaaacacatacatttatttaaattaccctggctttcagagagctaacttagtgctctgtgcagaagggaaagatttcagtaggaaggggagagaagagtttaaagaaaatctctttatattccctttaccctcttgtaaaaagcccagttgcttcaccatgatttttttttaaggtaaaatccacactgttctctgagctggctgagtttgttaaatcctcagctggcagggataggctggtgacctggtgtgtgaagtgcttctgatcctccctgtcctatcagagggaaacagtactgggttttgccttgcttctgtttgtactttctgtcctcatttaattcgaattcctttgggattatgttgtgtgtttaaaatggtgtggaatttatgaacacagctattatccagatatgttggtgaggagtgccctattttagtgttagcaaaataagtagaagaaaaatagttgacacataatggtgcataatctgttgaaggatcattgctggtataattgttgacaagaatagaataaacagtgcctttttaaaagagctattgagtgcccttttaaagcagttagaacacaaggagatgtagttacgttagctttttaaagtgtggttttattagaggtcttttatttaaatttgaaaattaaaatagaaaattaattgtgcccaccccatagtgggttgtgttttatctaattggatgtctctctcctccatcagacagtgagtttcatgtatttgtttgtttcagttaaacaaattcctgccataacctggctgagtccagcctcgttattcccatgtgccatacaatctttaaggtccacttcaggcctggaagtctgttacagctttaatctgtttctatcattatttttcatcttaattcttttcttgccgaacccggtcctccctgtaaatcactggttatgagtagcgggtgattttgcatcatttctccttccgctctgggacatttggcaatgtctgaagacatatttggttgtcacaacttggggaaggggttctggcatctagagagtagatatccttcaatacatgggatagtctcccacagcaaataattatctggcccaaaatgttgatagtgccaagtttgggaaactctgctctaaatgtatgtgacacttatttgtaccatcatttgtcatctaatcagatatatttcctagtattgttatttaagtaattgctcttttgtctatattcttaaattactttgatttctcttttatactaagcacatttatctggtattctagtgatttcttacaatcccagcattttgggaggctgggattttgccaggttgcccaggctggtatcgaattcctgaccccaggtgatccactcacctcagcctcccaaagtgctgggattacaggcatgagccaccatgttccacctaatcctttggctttaaataccatccgtaagataatgaatctctaatatatatctccagttgaacccttttgagtccatactcatattcaactgattgctgaacatcttcgcccgtaagtagatgagcactgtgcagctcagcatgttacaagtgattcttttatttttattttttagagacagggtcttgctccgttgcccagactggagtgcagtggcatgatcactgcaatcccaaactcctcaaattcctgggcccaagcgatcctcctgcctcagcctcccacatagctgggattacaggcatgcgccaccacacttggcaaagtgaaatctggagattttcacaaacttagtgttctccagtcttctcactctacccagttaatctggccaaagacataggagacagcctgtatttttctcttttcctcatctcccgcattcaatctgtgaggaagtcccattagcttacctctaaactatatctgaatttgtttattttttccagtgccaccacctttgttcaagccagcttcatctcttatctagactgttctaacagctacaaactgatcttcctcctcccattttcctcaccgctttctttgtgcctcacatgtaattggagcaacctttttaaagcctgagtcaaccagatcatttcctggcttaagctctcccgtggttctgcacaggttttaatatactcggaagcctctaccctcacccctcagattctgtgtgacttggcctttctggcctcatcttcgaccctttcgtacacgcccctccctgagacacactgcccctctttctgttctttgaccccaactgcattcccacctcgccaggttagccatggccattcactatgcccacagcatcctccacgtggctgaccggatgttctcgtggcttgttcctcacttttttcaggtctcattttttcagagtggctcttcctgatgacctaaatagcccctattcctgtctctttaacccaacagccagtcttattttttcttagcacttttatttcctgaatttattttattcattcatatgactattatcttcctccacccttagaatataagtttatttcttacattaagtaccatgtctagcacatcgtaaacactctataaacattcaccatatggatgaattagttaatttgcccatatacctatctcttctacttaaatggtggaggccttacatttgttatttagaatttcatatgcacaaagaagtcagagagcatgttctgatcatctttaaaccctgcaaacatcttgatgcagtggttaaaaactcaagttctgcagtcagactggtctaactcctgtttccatctccgcatatgacttggccaaattacttataatttgaagcttcaactttcttatctgtacaatagggacaataatagtatctactttatagggtcattgtgaggatagaataaaacaatatgtagaaattatttagtatggttcctggaatattttaaatgctcaattaaagttagctgtttttcttatttcttcatttacactcttaagttccttaaagttagggtgggtcctataggaatcttaagttcattgtatgtatttaagtgtttacaggagtgtagagaatatataactcttgggttatatttgtttttcaggttggattagcagcatgccaaattgctagagcttatggcttaaagattttgggcactgctggtactgaggaaggacaaaagattgttttgcaaaatggagcccatgaagtgttcaatcacagagaagtgaattacattgataaaattaaggtaaaattttccactgttttacaaaagtcaaactttgttccttggagacttgcgtggttttttaatatgtttttaaccaactactcctttaaagctgtttgcttccttttttcagtgcgatgaatttttatgcgtgttttaaaactttatttaaaaaacagatgtctaagttttaaacttttactatcatttttgtattgtttatgtgtattaaatagaatatagcttctctagaatcttatagctataaaaattgattttttaatgcaaataacattctaagtaaagctgcagctttgtatttgcagctgtgaggtattcttaatataatttctactgatgtgaattctccatggaaggtgagatatctgtaaattacaaactggatctgtgtggcccagggaataaagttcatttgttagctggatgctttggaggaataatcactactgcatccaaaatggtgaggtggcatttatttagttgctgcatttaacagaattcaagcagattctgaagttcttcacttgtactatattagcaatttgctaaacacttattgctttgctaatcctcaaccacttcctcacgttagggagattagaatttcccaaatattgagtactgtgtaaattagatcattacaaatgaaggaaaaaataagagtgagagtttattaccttttttgcaatcatcttgccaaaaagccgaacaaaagcactcctttgttatacgtctggggaacctaagatctagcactgctgataccattatccaagaatattcacaaagatgaaaaatggcccgttattttaagagtatggtttttgttcagcaataatctaattttaagaccatgaggtcttgggagcttccactgactccttctgcttaagtctctcccattctcaaaaacattctcttaacctttatcttactcccctttctcttctcctctttcccacaaaacttcttgaaaaagtagtatttattgcttttacttccttaccttccaccacttctcactgcagttttgcttatagcccaagtatttatactgcttcccagaggtcactgagaagctcctaattaacagtctgctggtcttctttcagtcttcatcttgtttgatttttcaggagcatatgaccctgaccacatttctttgaaacaggttctcttcttactttcctgacttttcactttcaatctccgccctcttcatattatttaatattaatattccttaggttgtttttgcttggtctctcatcttccctggtgctagactttcatcctgatcagtctcatatactcttgtggctcccttactacccatatactgttgatttccaaaactgtctttggcctgagttcacttccttcatgccatcaacccgctagacattgctactcatctggtcgcccaagacagaaaccctcattttgtttgtttttcctgtcttttaattatcattctccctcccacccagcaagttggttacctcattttatcagtttcatctctgacatgcctttcaaatgtatttccttatctctattccactgaccaccataacttagtttaggcctcagtttctccagccttgactgttattcataactgagctaatacacccttttatctatgctgtcatctccctcttaaaaaagatctccagaaataaataaaatggaagctttatgaggagaggagttttgtctctctgttccctactgcacttgcacatgcagtaataaacccctgtaataaaaaaacaaaacaaaacaactacaaaaaaaaccccacacaatccaaatcctttaatatggcattcactgtgttttcactatctgtcccaacttacagtctcctctctcctacctcttcctctccttgccactcccccttacctgattatgtacttcagttcctcttgtatttcaatccttgtgttctcagtcccctccatctttgcttttctgtttctttggtccagactgactcagcctcaggtctagcttccccttactcattttcctttcttttggcttgggaaactcctattcatccctgagggcccagttcatcgtctctgtggaactttatctgaccatggcaggcaatcaaaccttaaccttttttctctgtattctatgatttatttctgctaatgtgttacttagcccattactttatagctatgactgtagtatttcccatctttctcactagttttgttttgagctccctatgtttgtatttgtattcctggtacctagtgcaatcccgggcacagggattcatttgtgtgtgtgtgttaaaataaaatgaatataatgtagatgtgtgtagctttttgtaagagccagcgtccaacatccaagagcccaaaagagttagtgcatcaaacagatgataaaccatttagaacaaaaccaaatgcactaaaacaacaaaaatcatgcaaaaccgaacagctaatgatatcttcttttgctttttgtttattaataaaaatgggagccccctgggggtttggggcttttgatttattgtttctttatgaaagtttattttacagatagaaaattttcagctaagtattttatactcaagttgagtctagcacctgaaaattccagacaaactttatttcactacagcaatgtatttagtacaaatttttatcagtttagatgttctggctggtaccttggaattacatcgtgattatataattagattatttaaaattttgcattattagtctcaaagatgtagcatttatatatcatttgaaacatatttctataatatcttgtacagatagtagctattttacagtttttcacttgctatcttactctacatttctcttttattatatagaagtatgttggtgagaaaggaattgatataattattgaaatgttagctaatgtaaatcttagtaaagacttgagtcttctgtcacatggaggacgagtgatagtaagtattccttttcttttttttttttttaccactttaatgttttaccacaatttaacactattttacagtaatctttaactgtagaattgctgtttttcatgttaggttgttggcagcagaggtactattgaaataaacccacgagacaccatggcaaaggagtcgagtataattggagttactctcttttcctcaaccaaggtaggaaaagaagtacttctgattttggtaacttaaacattggtacagtttgcctactcaggcaagctgaaagtttgaatagatgttaaacttagttatatgactagtgggagttggtaaggattagtcaccagaaggacaactagggtgacagtataatttatatccaggtaagcataccttttgagatagaaatgtgatactagtaataatttcaggacaacaggtattttgtacactaacactgtctcaggcagatgggatttatggttaccctgtagataactactttttctatagttctggacaagttgacaaaagtcacacatttgtaagagactcttcatggtataacacttagattctgaagtgtttttaatgcttctgaaaattaaatcatacggttcactacaaaaagaaatttgtttttccttttcttaggaggaatttcagcaatatgcagcagcccttcaagctggaatggaaattggctggttgaaacctgtgataggttctcaatatccattggagaaggtggccgaggctcatgaaaatatcattcatggtagtggggctactggaaaaatgattcttctcttatgatgattaattctttcatggatttcctatgtaattagaggtactgtctttcccccagttgtacttaccctatcttttctttaattaacattcgattccatgagcttcttatgtgaaaaaataagatttttctttagagagcagaagcagaagagtaaaatttattgtatagctagcaatatttttttatgccatctgtctcaaatcaaagagtcatcatagtaggaaataacatgttagttgtcatttggcatgagtgtgcattccagtaattcttaattgatatttgattaattccatacctttgattaaaacatgctagttcaaaataagactgctcagtttccaagggttttcaagcctacttacctttataaaggttctctagtctctgattagccatgactgtattggactttgaacattttctgaactaaaaacctctattctaaactaatctcatttggatgtgtaagtcttttgtaaaggcaagaataaataatatccaggacaatttattagttttctcagtattttcccaaatattagaatatttacttcattattggttggctgccaatgaccccatatgttctgtgagaatagtagctttatctttgatataatacatagtctccaaataggtaatacttcgcaattgattagattttcagagtagatttagagttatctgtttttctggtgagggtcaaatatttttgttaattaagctcacaaatttgataaattaagaattatctgcatttgtctcgtaacataataatgtgtaataaagtctatagaaaatta

SEQ ID NO: 18 - DNA, 32722 bp, Homo sapiens
  source 1..32722: mol_type = other DNA
gttctttctcagccctaacccacaccagcgcgttgcctcggaaacatcgcgagattttgttccttcagtctccgcccctttacggcacgatggtcgcgcaagaatgtaatagagcttcgacggccgccattttctttctttcttagctgttagctgagaggaagtctctgaacaggcggcagcggctcttatagtgcaaccatggcagactattcaacagtgcctcccccctcttctggctcagctggtggcggtggtggcggcggtggtggtggaggagttaacgacgctttcaaagatgcactgcagagagcccggcaggtaagtgtggaccgcgcggcggaatcccgaaagctcacggtaattggccgctgactgagtaggccgctacccttaagcgcatgaggaagaggaaagaggtgttcttccgggctgaaatgtgaagagacacgtttccccatgttggtaataacgattagagaccagaacccagttttgtgttcttggtgcctaatccacttagaaccccgacgcgtgctacgcaaagaaggcctgaagtctttctcccgcttctgcggcactcgcgtgtctccagtgagctagtttagataaagatcctcttccaggggataaagcgcagttagtttcacacaatttaatggaaggttctggtaatgagtttgggaaagaactagggtctgtcctggagccatagcaagggaagggatttatcattaaagtagcctttacagctcatttccgttctctctcgcaattaaaaccgctttcagtaccattcaccgtcacacctctacaaggaagggacttgaaagcagcctttttctgggcgggatttacgtgtcagtctgttccaccagtccgccccccttatttctcaaaatggcctcaggcccattataccagaggtttcaatttgaatctgcctctcagttcagagtcgtaaactgaccagacctctttgtattacgtagtgcgtgcatttgccctgaaggcaccactttcccagacgaaagctgttaaaatagtgcgtgtattccaggaaaataaaagataccttaatttgaactttacattcttagatagtcccctaatatatttaacatttcaaaatgtatggtgttggtatagatttgcatgtaagcaaaagaatcctattctctgtgacactatgcatattgtactaggtgctgggcattttttactagttttaagctaatgataattagaaaccagtgttgtgctgtgttttcgttgcattaggagttcacttagttaactttttaccgggacagttgaaggaacattgagtcaaaattagaattcataaaatccgttgtaacacatctaatgtgaacgcattataaacatgtacctgtacttttttataaccagaaatactaggagtagtcaacaaaaggtcatcattaatattagttctgcggttttttccacgtaatttaagaaattctgaacatgtttagcaacaagcatataactatgacaaacactcttagcgtgttttattagattgatttgtaaaacttaagggaactattttatttactggaaccaactattttattttaccagaaccagcacattggattaattggtatcgcacactgtaggtagatactggagttttgttttgttttgtttgagacggagtctccctctgtcgcccagactggagtgcagtggtgcgatctcgtcccactgcaacctctgcctcccggcttcaagcaattctcctgcctcagcctcccgagtagctgggattacaggcgcccgccaccatgcccggctaattttttgtgttttttttgtttgtttgtttgttttcagtagagacagggtttcaccatgctggccaggctggtctcgaactcctgacctcgtgatccgcccgtcttggcctcccaaagctgggattacaggcgtgagccgctgcgcccggccttgttttttttcgtttgtttgttttaatgcatgaattgtttcctactaagaagctatgatatagttccttgaccaaatgcagatgaacaggattatctgattaatactttaacgagagcagacaaaatatggatatttaattcatccacttgctttataagtgtttatagagtttgttaggaggggatgcccaatttcctaagtaaaggtgatatatgagcaagacattataaaatgaaagagagtttggccagtgaagaaaagaagcagcatgcgcagaggtgtggggacttgagggaatggcaaggacccagaagtgaagtcgctagaagatgggggtgggaggacgtgaaacgaggcaaggaaaggtacaagcggatccagatactggaagaccttgtgttgcaatgctttaattaaaaattggatttcaggccgggtacggtggctcacgcctgtagtcccagcactttgggaggctgaggcaggcagatcacttgaagtcggagtttaagaccagcctggccaacatggtgaaaccccatctttacaaaaaatacaaaaagtagccgggcttggtggcctgtgcctgtagtcctagctacttgggaggctgaggcacaagaaccgcttcaacctgggaagtggaggttgcagtgagtggagatcacgctgctgcactccagcctggtcatagagcgagaccctgtctcaaaaaaaaaaaaattggattttattattaggctaagccataatttctttatacttcttaaaatatagaaattgttggcaaattgtgaaatttattgttgtataatgctaatagatcagttgtcctgatgtctttgctgtaatgatttctttataaaaatgatcttaaatctgagctccctaactttagtttttgcctggaattacccattacatttgatgatatctctaaatgtcagttgtagctgttactctgatgatataagtggaatatacagaagcgtacttagacaaaagttaggttaatatctgaactacttcctccttgtgtatttaagagaatattgacttaagtttctagaatcctcaactaatcctaagtttattttctttgtctagaatactatgctgtttttgtttttggaaggaagagatataggcatagtttcctgctctcaaggagcttcaaaggctgtaccagtggggatgccattggtatttttagctggatagttgttattcagaaaagcaggacaagtaattatgattcctggtccgtacctggtaatgccagtaatgttaactctagctggttgttgacatctggtcatttagttgccaatcttctttttttttttctggcttttatgtgaaatttttagatttttataatatcctgagctaaattcaacacagggacaccagattgctgctttagttcagggtttccagcctgtgcacttaagaaatttatttttgtgtatatcaagctgtaactccagagattgggattgtttgattgggtctttagcagtggtactaatagcaacttctgtctctagaacattggaaaattaaaatgtgtttatctaccgtttttttcctcgaggttatatgaaggtagaaatgaatcagactagatgattagctaagcgagactattaaccctcatcccttcccctctagacaactatgaaattagtcattatgtattcgatccttcttgcagtctcttctctgacagttataaaagtgatttaggctgcataatgttgtttgaatgaaatgaaaatatagactagagctgtttttttttttatttccatcagtctcttcagtgaaaactaacatttgagcatgattctttttttaaatcattttgtgacagtttagcaaggcttgtgataagcaagttatggtatggtaatatttctagtgtccacgtttcttcacatgtctggtgtatgggaactactaactccatcaggaccttgcctatagtaggtactcaacatttactgaattaaatcaataaacatttttaatgaattacagtacaagtcagacctctgtatctgtgggctctgcatctgcaaattcagccaaccatggatcagaaatattagaaaaatggaagaacagtccagcaatacaagtaatatgaataaaaacaatacaacaactatgtacattgtatcaggtattataagtaatttagagatgctttaagtatactgaaggatttgcgtaggttatatgcagatactgtaccattttatataaggaacttgagcatctgtggattttggtatttgcatggttcctggaaccaatcccccagggatactgagggactatagttgatcataccacctgattttagagattttctgagtctcagaagttaattaagtaaactacaatagtctgttcttaacctcggaggatacattccaagaacctcagtgaatatctgaaaccacagatagtattgaatccaatatatacacggtaatattttttcctatacatatgtatctataaagtttaaattctaaatcagacacagtattaacgataataataaattagtgcaagactgggcatagtggttcacacctataatcttaacactttaactatgacgttgtctttgaaaagaaatcagctagccaaggtggctcatggctgtaatcctagtgttttgagaagctaagtcaggaagattgcttgagcccaggagtctgagaccaccctaggcaacatggtgaaaccctgtttctataaaaaataccaaaaaataggctgggcgcggtggctcacgcctgtaatctcagcactttgggaggctgaggcgggtggatcacgaggtcaggagattgagaccgtcctggctaacacggtgaaaccccgtctctactaaaaatacaaaaaattagccgggagtagtgggcgcctgtagtcccagctactcaggagactgaggcaggagaatggcgtgaacccgggaggtggagcttgcagtgaaccgagatcgcgccactgcatgccagcctgggcaacagagcgagactccatctcaaaaaaaaaaaaaaaaaaaccaaaaaattagccagacgtggtggtgcttgcctgtagtaccagctatccagaaggctgaggtgggaggattgcttgaacttgggaggtcaagtctagaatgttgacaatgttgggtcctttatgtagttgcataagtgagccatgatcgtgccactgcactacatccttgggcaacagcctgaccctgtctcaaaattttaatttaattaaaaaaataaaatagaacaattacaacaatacactgtattactggacaagaagggcaaatttaaaaaaaattaaaccaatatgctataataagttatatgaatgaggggaccctcccctaccccagaatatctgattgtactatatcataggtaactgaaaccgtgaagagcaaaaactgaagataaagagactactgtgtcttttaagtttcttttcaactcccaaattcttggatttctcacctcttggcttcctcaatagaggtgagaaatgttaaagtagtgaaaacaggaaaaataacttactcattcaagaagtagataatggtccagatggaaagcttgaattatttttgtaaaactaaaattaaataaagtagccaggcatggtggcttacgcctgtaatcccagcactttgggaggctgaggcgggtggatcacttgcggtcaggagttcaagaccagcctggccaacaaggtgaaaccctgtctatactaaaaatacaaaaattagctgagcatggtggcgggcgcctgtaatcccagctactcgagaggctgaggcaggagaatcgcttgaacttggggggcggacattgcagtgagcccagatcacgccactgcactctagtctgggtaacatcttgagactccatctcaaataataataataattaaataaagtaaaaagtttcccacacctcataaatgtctaataaaaattgaatatgttgagttcaagtactctgaaaaaggagttgaatatagttggaggttggtttttaggaattactatttttcttaaattaactatccttgtagtcacctaggaattgtgtattttctatagatcttagaaaattatcaaatctacagttcattttgttttttcagttttttttttttttttaagagatggagtcttgctgtattagcgttgaactcctggcctcagccagttctcccatctcagcttctgaagtagctggggctgcaggtgccactgagcctggcttctttattggtatttttattaaacacttttctctaatgtctttgtaacagttctcagtttttgaaatgctgttactgtttctttagtgtgaactgtcaactttcattttttcttttcttttcttttcttttctttttttcttttttgagacagagtctcgctctgtcacccagactggagtgcagtggtgcgatcttggctcactgcgacctctgcctcccgggttcaagtgattctcctgcctgagcctcccgagtagctggaattacaggtgcgcaccactgtgcctggctaattttttttttttttttttgtatttttagtagaggtggtgtttcaccatgtcagtcaggctggtcttgaactcctgaactcatgatcccccccgccctgcctcggcctcccaaagtgctgggattacaggcatgagccaccacgcctggcctcagctttcattttcatttggttagtttttgaactattcagtgggtaaagttgtataaataagtgtcttttctctgtatagaagtgtcttggagttcaaggagtgctgctttgcaaactcatagagtatttataaaagctaactgcagaaggtattcataggctaaaccgtttcctattcttggtagcaccattttctctggcctgaaatactttccttctactattagtgcctgtcgatacccagcagtgtatttactttcctgaggaacaattcaaatgctaagtgctttaagacctaagggtggaaaagcagtgttttcaggcattattaggaaaataagatttaaattagacacccagaaacaaaaacaggtttgtaattggtaaagtgaaagatggttaaagaaggttagattgaccaaagcgagaatttaccttttttttttttttttttttgagacagagtctcatgccgttgcccaggctggagtgcagtggcgtgatcttggctcaccgtaacctccacttcctgggttcaagcagttctcccacctgagcctcccgagtagctgggtgacatgcgccaccacgctcagctaatttctttgtatttttagtagagactgggtttctccatgttggtcaggctggtctcgaactcctgacctcagtgatctgcccgccttggcctcccaaaatgctgggattacaggcatgagccactgtgtccggctgagagtgtacctttttttttttttatcaagcaatctagtacttgatcctaataatctttgtggtaggtgtttgcatttttagatgaggaaaagggaaatctatgagtcctaggaaatacagttggtatatgggaactgatatgtaattagacttaagtgatccatgttgaatttatgacttaagcacttaactataatcttaacctctccagttgtctgatgaagttagtatatgggaactgatacatagacttaagtgatccatgttgaatttatgacttcagcacttaactataattttaccctctccagttgtctgatgataataaaaacttgaagcagttatccatatggggatctctttggggaatcccagtcaccaaaagttaggttttctttaatattttttcatggaagatttcaaatatactcaaaattgaaagaattatataataaattctcatgagcccatcacacatcaataatgaatgtacagcattgcagtgtggagcttggcctattgctgaccactcagcaatgtggcagaaccactccatgattccccatggaaatgggaactacttcggttgtccttttatagaaaaattcagtaagtatctgctgattgtgccctacttgtgacttgaagccaggtttttttttttgttttttattttttttgttttgttttgtttgtaacagtcttgctctgtcatccaagaggggcatgatattggtgcactgcaacctccacctcctgggttcaagtgattctcgtgcctcagcctcccgagtagctgggactatgggcgtgcaccaccacacctggctaatttttgtatttagtagagatggagtttcatcatgttgcccaggctgctctcgaactcctgagctcaagcaatctacccacctccacctcccaaagtgctaagattacaggcatgagccaccatgacagcaaagctgggtatttcttaaattggttcagtcaggtgcaataaattatttgccctactctaaaatttaaaaatcttctaagaattatggttttgcagctgaggtttttttaagactcgagctccctggactcctacatatatccttagaacaacattgtccaatagaagtacaatgtgagccacatgttttgtttaacccagcatatccaaaatattaccccctttgcatgtgcttaatataaaaatttaagatgatttatattccaggttttcaatattcagtgagtaattttacacttagagcaagtatcatttcagactagtcacattttgagtactcaataaccacatatggctagtggctaccttactagatagcatagcctttgagtcccacaaagtgttcacattctatgtgtttacacacatcttttgaagtgtcatgacagagccagataggatccagattttctttaaatctggtctctcttccggattcctagttgattacttctttgttgcttcttatagggatgtatcagaagtttaataatcttatgattattatgttaactgcctgaagtattaatggtagcaataaattgaactataattttaatttttcaagtaaattttcttatgtgatactaaatatttcacatatacatgtatcaggaagtaaatgggggtaatttagtaatgaatagtatataatagtttatgatggtatttttcttttttttttttagattgcagcaaaaattggaggtgatgcagggacatcactgaattcaaatgactatggttatgggggacaaaaaagacctttagaagatggaggtaagttatactctaagtattttaaattgtttttcagagtgtttagttgaagtgattctcggtatttttctgttattttattgagatattaacttttattataaggttgttaaaattgtaagctgtatattggcctaaaaggggggaaagaaaactagacaaggtaagtaaaatttgaaagaaattttttaaaaaattttttaaaaaaggaagttttgtcttaatagaaaacaatttattttccctcttttaggattgtgccagattgaaagtttgcacagacgtcttgttaataatattaaaaaacatataaattgcttagaagacacttcactggttttactcatacgtgaatggattttaatatgctgtattttcgtcatttttctatttccaattgcaccttaaaggttgaaattcctatagtttgctactctagtgtgttgcaggttataccattttttttttaatgttctttactttcagtacttttgtgtttcacgtttagctttaaacctgtggattaaaacagtggatttacagtgctatgtatttttaaaaatcgtaatcgttgaagcttctgaacttagaagtctgcatgtattttttgttttaggtttgatatatgagttttgatacattttctttttacccttttttttaaagggaggattctcactgaggctatagaatgtatttgtagcttttgaccaggagaacttggtttccttttatttaagtgtctttcatatttatagtgaggtttttaatgtagaaaaaaaatgagctaatgatgcttcagatgttgtatgtaatgtattctttttattttatgtgtagatggctcttggacaagtccgagcagtacaacacactgggagggaatgccctctccttttaaaggcaggaatttttatttattacctgtgttcagtatgtaaacgtgaaataaaccagtggattcttaaatggacacaaatatttcttggattatgtgtctgcgcatattttatttttgctgcacaacattctgatgtttaatcatttaagtttgaaggggggaggagaatgtagtactttgagctataggttgtctgttccaaggtatgcattgtattcatctgtgtaatggatttaggtgaaggtagtcatgtagttgctttgagattttatttttttgctaaagttttatgcagtgaaatgtttgtttataaataatagaacagtttaggttgagattgccttgtaatgttgtggggggtttttttgtttttttttttttgggcatagctttgtggtcactgtcagatacactttaatatgtcagatttttgtagtttgataggcttttctccccccagtcttcagttcctgaggtggaagcatcattagcctttagcatgtgatattttgctagtaatggacctaaagtacgttgtcttgtgtcattctaatgtgcttaacatacattaaggtcagtgatttcttaagaatcagataactattttaatgtctgtgcatcttttgaacgtgaagagaatgaagtatcgtttcttttttagattactgagttggggttgaattttggcagttttggttcaaatgataaaccataccttcagatatttcaataaatgtttatattgttatttattcttgtttgggaggggagaagctttgtacttaattggcaaaaaattaaaagacacttaattttgcagatcaaccagatgctaagaaagttgctcctcaaaatgactgtaagtattccttttaaactgggtcaaaagctaaagtaacaatttcaatgttaagattttgttcatattattgggtatctttgaagttagttggtttatgagtattttggatcagctagcctgaatttctttgtaaatatatacctttttctcctattttacaatctgtcccattaattgtggccgggtatatgtaaagattggttgctgaattattttacatatttaacaactccaattcttgatctatacttgtacaacttgaaaaaggaaattattttgttctgtgccattgctaatataatgtcttccctttcattggctctcttgcccctgtcaatgccaatataaatattgtgtaaaaaatttgactctcttcaaggtgttgtctgtgcattagggagagatttttgaatgtttgatgtgattgtgttgttaaatatataagtaaatttaaattttgaatttttgttttatttttatttaattttttgatagcttttggaacacagttaccaccgatgcatcagcagcaaaggtatagtcacaagattttcaaaaagtactctgcaagttttggttgagctgtatgtaaaaacacaaccacattggtgtatattgaatatgtgtctgtgtattttttggtgtacctagttcatatcactccccttgggaaggtaccataaagtgatgatttttcttttgagtgagaaaaatttgtgatttggagagataggtggaattaaccacattttagaagaacaggggtgaattagagtaactgttaagatgacattctctaaactccacttcaacttctttacagttaatgccttcagactgttccattcatcatcccttcttcacttgatgtgtcatcttaaatttcttaatttaactactcaagtaataagatcatattttttgacatgagtctgagcctagaaccttagtttaagccattgggagacattagacttccatttttattaatagattatcttttatttgtaaacaaagtatctttcattgaaggaaaatggtgctttctgttatttcttagcagatctgtaatgacagaagaatacaaagttccagatggaatggttggattcagtaagtaacttgatttttaaagttttgaaaacatgatcaaaacatactttagaatctttcaaccaaaaaaaaaatttttttttttctaactagtaattggcagaggaggtgaacagatctcacgcatacaacaggaatctggatgcaaaatacagatagctcctggtaatgttacattctcatggtattttcagtgtgactagaaaactagcttttttttttttttaagccttctagtaacaataatgctacttttaatcttttgacctgaagttatctgtttgttttaaattgtagacagtggtggccttccagaaaggtcctgtatgttaactggaacacctgaatctgtccagtaagtttgaaaaatcttaaaaatctacttaagtaacaacagcagaactctttgaattttgtctcttctctttgttactgctttattttacactgtggtttcgctgccaccttccctcaaagtcctccaactcctttgaagtttatgcctcatgcctttctcaggtggggttcatcatctgaatcattaaacacagaaaatggttaaaacaactccatatctactccagtctctacttgtaaagccacgtgtagcctggagaagaatgcacagtcaggtcgactggtgacacttaaaactcagacattaagctcaagtggactgttgtgttgcctgcatttccctagttccattcacttttccactcctctcccaggctctttaatactgtatttccccacctccaaatcttcagcatctaaccccacgctctcccacttaagcttatttactgagaaaatggaagcaaatgataagaagcttttctttttccctaccactaaacctaccagccttcatttttcctctgttcacatagtactcaggtaattgctttccttttgtgttcgagtgcctaaagccagccctttcttcctactgaaggttcagcttgcagttgtactttcttctgcattgttagttctccctcattactaggttttttcttttcttttttttgagacgaagtctcgctctgttgccaggctggagtgcaggggcacgatctcggctcactgcaacctccgcctcccgagtagctgggactaccggtgcatgccaccacacccagctaatttttgtatttttttagtagagacagggtttcaccatgttggccgggatggtctcaatctcttgacctcgtgatccacccacctcggcctcccaaagtcctgggattacaggcgtgagccacttcccccagcctgattttctttatggcactttccaaataatgtgttattcatttgacatgttatttttacttatttaatgaaatgaagccactctagcaggaaccctgtttctttgagtgctattaccccattacctagaatagcacctgcacatagttgatatttaaatatttgttgaatgaataattgtagcatatgagtaagcaaaatggtagtttaaaaatgtaaataaatcatttagttcttggaagaatcagtttaattctgagataactttagcattagagttctttcttggaaattttggactattcttaaaaataaaaattgtatatctagaaaatttttttgcataatctctcaatctttgacccttgatggcattttctttcagttaaaagtaaaagcattgttaaagttagcatcaaggcacctaatcctgaactgggataggaggagtacttggttatattgttttatatttctctatttgaataagcttgggtatgctacagcttactatttaaatattaatttgttaacaggtcagcaaaacggttactggaccagattgttgaaaaaggaagaccagctcctggcttccatcatggcgatggaccgggaaatgcagttcaagaaatcatgattccagctagcaaggcaggattagtcattggaaaagggggagaaactattaaacagcttcaggtattgttatttttgtgaaatggctacttttgatctgttttgatgcccatttttgtccacttcttttgttaatatatattatttctatgattgtaacaggaacgggctggagttaaaatggttatgattcaagacgggccgcagaacactggtgctgacaaacctcttaggattacaggagacccatataaagttcaagtaaacttaactttatactttataaagaaagagtgggttgaatggggttgggcaaaatatgcatgaataattaaaatgttttgagacatgctttctaaattagctaactttttctgctttagcaagccaaggaaatggtgttagagttaattcgtgatcaaggcggtttcagagaagttcggaatgagtatgggtcaagaataggaggaaatgaagggatagatgtaagtaaaaatacccattcagaaatggttgtatgctaattcataaatataatagtgttttctgttttgtgttaagtagctctaacattgttatccttttatttcacctttatactttagaatacagaattctatatatcttgttaccctatttactataaatatagaattatatgtacttttatgatttgaggcagattttcaggaaatggcgcttttttaaaatacttttttttactttaaaccctgagaagctagctttcttaatacttagtcttttttacataaggtccccattccaagatttgctgttggcattgtaataggaagaaatggagagatgatcaaaaaaatacaaaatgatgctggtgttcgcattcagtttaagccaggtgagtacatataataatcttgtaagtgttggcagcagtgagttttgacatacatttattgtttaattaattttgtttctttgttttgaagatgatgggacaacacccgaaaggatagcacaaataacaggacctccagaccgatgtcaacatgctgcagaaattattacagaccttcttcgaagtgttcaggtttgatagaaagttaacattttcattttttgtttttatggaaaagtattttccttcatgaaatctgaagttacctctatatcagagtctgcttgatgatgctttattaatggagaaagtttaaattgctttaaggtaaagatcttggagcaggaagaactactaccttaagtgctaccttatttactcttgtattttaaaaaatgttattacttattagggccagttcatctctacatttctgattcaggtatatgagagctgggaaaaataaacttaataattttatcatgaaacaaaagtatttctgtgctgactcttcgttcttgtctttccctctctataggctggtaatcctggtggacctggacctggtggtcgaggaagaggtagaggtcaaggcaactggaacatgggaccacctggtggactacaggaatttaattttattgtgccaactgggaaaactggattaataataggaaaaggcaatgtattttaaactcttaatgttttaacacattattcatttttctggacactttctgttgctgtcgtaaacaagtggcaatgctttttctctgaccgtattttagtagaaaagaattcttatgttaatatgtaacaagtaaaacataaatgagggatctcatgtatatttagagaaagagcaggattttaatcttactagcttctagagaaagcgaactaagagataattattagcataagaaatgtcttttgacccaaaaagtggtttgagtgtttttgtttgtgcattttggtttttcccgactcatattttaaaaatttgaatgtttataagtgtattagtttatatttacactgcttttaaaagcagttaattcaaatattttattataatcacattaagtttatgtttaaacatactaagtaaatgtaaatgtattttaagagaagcatgaaatgcttcctaaaatttgattttcagtgtagaatattaaatgaaaaatcttaatacaatattgtcaattaggatactgaccaaaccatatttttaatggcccatttaattgtgaccattttcttctaaatagctcctagtacacccttgaaacctttagagaaattactgtcttttgattttaggaggtgaaaccataaaaagcataagccagcagtctggtgcaagaatagaacttcagagaaatcctccaccaaatgcagatcctaatatgaagttatttacaattcgtggcactccacaacagatagactatgctcggcaactcatagaagaaaagattggtgtgagtatactttaaacttttaatttttagtgtagacccttagactgtagttaaattaagacgtttattcaaatacatcaaaggaaaatgtatcattactagtcagcatttatagatttcatgatatgtataatagatacaacgtgaagattttccagcaatgaaaataacctaattaaatgtgtagttacaggttttgagaacaaccttacatttgggtgtggctagataagaggagggtagtgttacctgtaggcatgatattagtgttggtgtaggattgtggaacatacttgaaggacatagttaacgggaattcattatttattaagattttactctactgaaccccagcgaggcaaacaagataaatcagatacatctgccactctacagtagaaattcataaatcctaggttttggactggctcacagatcatctgggggtattaaaatgtagactatttgggtgcttcccactcctacacataatatacagagacagacctgactcaaaatgtctgggatagggcccagcatctaattttacatagatgtttgggtgattctggtgcacagacaaatttggaaatttttcctccaggaaagttttctgttagaacaaaaaagtatgaaacgctttgactgcttttttgtaagtgaggcagacagtgtcttactggagtttttaacacaaagtgtgcagggggcatcttaaattattagaattgcctaggaaaaattatttttggtgtttgccatgctgtgaatggggtgcgtgcaaaacaaggttgacactgtttctgtcaacttgggaagacaaaaatagatgtacaaaagacgcttaaggaacgtcttacaaaatgtacacaaacattgtgagttctgttgtatggatagtttaatggttcaaaaaatgaagaggatgtttgtagagtaatgatagaggttgatgccatggcaaaaaaatgaatagcactcatcttggttttttattttacagtattagcctaacatgcatgcgtcaggatttctgttggattcatggaaaaacaagatagattgttttggagaagcaatttggtgtggtgattaagagcatggactctgtagtcgggttgcctcagttcagaattctgtgaatcatttactggttctgtgaccttggagaagttactcaggcttttctgtgccttggtttcctcctgtaaaatgaagataatggtatctacttcatagagttgtagggattaaatgaatgttcatgtgtgtgtcacttaaaagaatgcctgccacataaccctaaaaaatgttgctactttttcagtattatttttactacttggaaagaataggtcatggatagtaagtgagagatgacagcaattggagatttaaagagacaagttaataaaaagaactttaaaggtcatgaagtttagtttccctattttgcagtgagaaatttacaacaaaatgtagtgttagcattttgtccaacatgtcgcctggttgtgttaactactcagaaggagcattttaggacagttaagtgtaatgtctttgttggcttaaccaaacagaaatcagttaagcgttattaatgatgtggcatgcatgcatgataaggatataaaatatcctgatttattgaaggaattaaaaagggaatttttgtgctattaaacatcatgatacatgaaaggccaaaaaggatataaattattgatctgaatgggattttagtgacagaaataggttgtgaggtggattttagtttcatagtgaaacaactagctattaacgttatcagtgaaatgttcagaagacgatgatacaggacccaagcggtttgggaatatattgtcaagacggttgtctcatgttaggcaagtagatatagagagaagagctgaagataaggacctgatttctgtgagtaagatggaaaaagatagtaaaagtaagaatgataaaaggaaagggaactactgctgtccgcaaacaagctaaaggaaatttaattgctaatttaaatttaatttaatttaaattgcatttaattgctactgctattgattttagtgaattttacatgtctcattattatggcagatgaaatagtttttgcaaaatgaatgaggaaaggaaggaaaacctaaaatttgttatttgtgactataagagggtagaaatggatgattatttggccgtagagttgtttaaccattactgtgtttttctgatttttctatgtcatccttttttttgtagggcccagtaaatcctttagggccacctgtaccccatgggccccatggtgtcccaggcccccatggacctcctgggcctccagggcctggaactccaatgggaccatacaaccctgcaccttataatcctggaccaccaggcccggctcctcagtaagtattgggtttagttctgggctttccccaaagattctagttttgggactgttttttatgctgatttttcttttcagtggtcctccagccccatatgctccccagggatggggaaatgcatatccacactggcagcagcaggctcctcctgatccaggtagaagatgcttattatttgtgtgttatctgtattattttccactcctgttacattattaaattttctagtgttgattctacatttgtatgcatcaccttcactcactttactctttcaacagtgttaggcactgcctctaccccagtgtataggactgacatgaatatgagctctgcttttatggaatttctttctacttgcctttggcttatgagttgatacagtagaatgataaaagctaaaagctgcaggaaagagcacagtgtcataggttttggataccagtgctgtcaaatgtgtagtatgttcattgtgacattatctgtggaaaaatagtttttacttatttagaaaagtatgtgataggggctgggcactgaggctcacgtctgtaatcccacctattcagaagtctgaggctgaggcttgagaccagcctgggcaatatggcaagacccatctctaaaaaaatttgttttaaattagccgggcagggtggtatgtgcctgtacttgaggctgaggtgggaggattgcttgagcctagaagttctagattgtattgagctgtgggcacaccattgcactcccctgggcaacagaatgggatcccatctcttaaaaaattatgtatatatgtaacagtctatataaatatatatatataacagtccaacagagtgttaagtattggggcattaaacttccaaattgtcaaataagatatctgttctagtactcctcatatgacaacttcatgtgagtaaaaatcaggcctgtatttaataactgcatgctaaagcccaaatacgtttaattattttctatattcagatttatttttatcctattatattctggcatctttccataccctgtagtttgctttccatcttggtcaaagagtcattctttgaaaccaattaacatttatttatgatccttttttctcacctgctacctaccttttaggcctctttcactcgtgtagtttcaaggaaaatatactcaattatggaatactttctacacataatacatttatcccaaaaaaacttgaagtaatttatgtaaatgaaattgcttgattaacttcataggaagtgtgctgtttggaatatgatgacacagcatgacagttaccaagcatgacttgagttgtgctaggatataggtgtgcaaagttggggttgtgttctatagcaaaagaatgcactcccagcgtaagcaacactgatggaaggggctcacagggtacaggatataatactcttaacaactaatttttggagaatgaaagggcttttctttccctcttgttggctgattgggatggtataattaatgggattgaagagtttgagtaggttaaaaggcagattcatattgggtaacttggatctgccaggattgtatttttgagcactactgggtggttagcatgattgaggaaaaatgatgggaataagaagtggaagtggtctttgtatcacaagttgaatttctcacttggagtagtagtgaagtcactactgtaagagctggtcagtgaatgtggttgcagcatggcctttgggcaagaagtaacccatttaactaaaaccagctggttggccccactcagatttatcaaagggttactgggtccctgggggtggatattgcttatattagacttagaatagcatactgttttaatattatatgaactaaaatgtttctttaaaaaaagagtggtctgttaatggatttatgtagtggtcaagaatttagacttcagagtcaaataaacctatatcagtcctagtcctacagtttactaattgtgagatgtcaagcaagtttttgaactcctctaagcctctgttttcttatctataaattaataaatgaatgaatcgggttgagtgaatatttagtaaattcttagtacatactagttatttgtaactgtgagactggttttttggtatggttttcacatttgggagtagaaataccacttcctaaagtctgttttatctcaaattctctatccaggcatagtgtaaagtgaaatacctagatttcttgattaatatacagataatggccagacgccatggctaaaacctgtgacgctagcacttcggaaggctgaggcgggcggatcacttgaggtcaggagttggagaccagcctggcaaacatggcgaaaccctgtctctactaaaaatacaaaaattagctggatgtggtggcaggtgtctgtaatcccagctacttaggaggctgagacaggagaactccttgagaattgctccactgccctccagcctgggcaacagagtgagacacttcatctcaaaaaaaaaaaaaaaatacagataatgacactattgagatatgtaaacatccaacataaaaaagcagtacattgggcaattgagaaaagtttggcaggtgtcctaataacaccttacaattatattaccttgcaattttctttttctagaaattcttgctcatttttctcaaacttgactaacctttattaagcagctgagaattgctactgttcagaatgaaggtataatagaaaatttaaaagttttaattgtatggtattcctagtataaaagacaatcaagttttttctggtttctagaagattgaaaggtctcaaactgttcgcacttcagttgatgtgggagatgagtgagggtcagtcaagtgtagaggagacaacatagctaaaagccgagacacgggcatagtgatttctgaaaagtacaagcactgtgttgtggctggagcttgggtgttgaagagatacaaccaaagggagagatgaggctgaaatggaaaggataagccaggggcttcaggctgttaaagatgttgaatgataggctgtacttaagctttgaacatcctgaagattgcagagaatgaagaatttcaagtaggatgacatcaagtttataacattcaatgtgaaataggatgaaatgtggctaatcttttttaagatttttatattttctcttcattgaaaataaggacaaagttcattgttctaaaataattttctttcttatacaggttagtccctagaaatgtttttctttagtcatcttctagatagagctgtttgtgcttgaggcgaaaccaatttagaaaaaaacaagggcacaggatggtttgagacagagcattggatttggagccaaaagacctttattcatatcccagttatgccactcagtagtttttaacctaggaaagtcacttagtctctgagacttggttttctttaataaaagctgatggtgacaacaaaaataatagaaaatttaagttttcatatactttttttaatgttctagttaattttgggggctgtatatttgccagagagctgggcgggggggtggtgtgtgtgtgtgtgagagagaattacagacttcacatgcaaaccttgaactttcatttattttagctaaggcaggaacggatccaaattcagcagcttgggctgcttattacgctcactattatcaacagcaagcacagccaccaccagcagcccctgcaggtgcaccaactacaactcaaactaatggacaaggtaactacagaacttattgtatgtgaaagccaaaagttgtgcttggaattatatatgaagtacatcactgtataatacctaaaatttctgacattatttaattataatttaagcagacttttccttttttaaattgttactttgaaatagtttcaaactttcataaaagttgtaagaagaatacccggagcacccagatagcccagctgttaatgttttattcccttgtttactctgttaccatctatatcatacatgtgtatctgtatttattttaaatatccattataattagttctgaaggaagctaattatatccagcataattagttctgaaagaaatcactgaagactaaactgtagacatgatgtcctgttgggtacttcttcaaaaatacataaccatcatacagccctccaaatcagtaagtcaacattgatatattaagttctttatatcattatggatttctgatttttgcagtaggttatatttttaaagtatttttataattttgataatcagattatcctggatttggccagtcagggagtatattcagggtggtgcctatatccttttgaaatacctgtcattcttttaagcacttccatactgtctggcacagtaagattgttattttgtgctttctgggctccagccctcgagtcagctatttcttcaaggagctcttattccttttagtagagtatggtagttagaaacgagacttgagtatgcttgttgctactgaggtgtaattgcttctagcttctttcaacaggcagaactaggaaatatatttacatacatgcatacctacatacacacaccaaaaaacacataaacatcgatatatgtatatatttttaaaaactatgttcatatcaccacatccgtttcagcattttggggttttcaagccttttccttttttgtacttgtttacaaacgtgagaaacctggtgtcctcagtgtatttccttatttgacatgcatttacttatatgttcaacataaccagtcttcaaacaggttggttttcttttctgtccaccacctctgtacccccagtaccttctatctttggcactgttagggatgccaccaccacatagtacttccctcctaccctcactgtcacattgcaggcccctgccagctcctgcacccaaggaaacggccaaaattgccttttaaaaactttaattctgttttttgttttgttttgcttgaacaaggagatcagcagaatccagccccagctggacaggttgattataccaaggcttgggaagagtactacaagaaaatgggtatgttttatacatttcttgaaaatacatacttaattaaattgaaacaaattattctcttcaggaagagaataattgaataaaatcactggacttgtaaacatatcaagacagttgtaaattatagtttttaaatttgtggttatatggcaaggaaatttttttttctaattgcatttgtcaaccagttattaattgaaactagaaatgtccttactggtacatacaatattaacattactatacttttgacaatgacagttatatatattatcagtctaaatgacataaggttaaattttaatgtgtcaggcgaaaattgtgtgtgataccattatttttgctgcaagataagcaggtaagaagtaatctgcagtgacggaaagtaaccaagtgatggaaccagaatctggcttccaagagggtctgagtcccaagcttgtctcccaaatttgtctctttaggaaccatttggaacctgatactatacttctggacaaatcactatatttcagctgcttttgctcttagtcatttaaaattattacataccacagctagatgtcacaaatgaaagctaaattggtaagcttggttatccttcactagcagaaaaagaacctataggtggtagagttttgtcataagagaacggtctacttgggattttcaatgttttctttgccaaagaatgtttctcattctccacagaaagaaaaatttccagaaaggtgatgattttaatcttctagatgtaaaattacatatacctgatgataaagttgttttgcacaactggtttctttttaaagaaaaattgtttttcctcttagaatggcttcctaggagagtcatgttccgtctctttctgaggctttaacagattatgtttttgtgacctagcttaggcagatctacagtagctacaattcggcaaaaagaaacttttaacttaaaaacagcatactctgattaaggttggttacataatttattttctgaactgggatcctttttagaatgaatagggatgctattaataatcatgccctgacagcattgtggtcaggacctgtaatcaacttaactttaattaaatagcatcaccattttaaaagacttgagcatgagccacgtgcggtggcacacacttgtagtcccagctgcttgggaggctaaggtggaaggattccttgaacacaggagattgaggccagccttggcatcatagtgagacctggtcacgtgtttgggttaaaaatcactaacttcaacttctattttctcaatgggtaatgtcccctagatagggtccctagttattattaagtaggtaaaaataaaggcttgttaatggatttaggtaattatggaggaatgagtttggcttctgtgctttattttaccatattgattatttgtaatatggccattaatacatttactgtttagtcttttttgttttactttttatgttttactcaaaatgagtgggtgggtggaattctaatttttattgttaagggaagacattttaccttgtctttaattttttatttttttttaccatttccctgccagttagagatactatactatactgtcttgaatcctctgtaggaaaacatggcatagaaataattaaataataattagatgttaaataataatgctgtatgactaaagaacctccttaccccaccttttctgttgttgttctgtagtaccacaataatcacttgttaattttatttatttatttatttgagagggagtctcactctcgcccaggctggagtgcggtggcgcaatctcagctcactgcaacctccgcctcccaggttcaagcgattctccggcctcatactcccaagtagctgggattacaggcgcctgctaccacatccggctgattttttgtatatttagtagatacgggctttcatcatgttggccaagctggtctcaaactcctgacctcaggtgatccacctgcctcagccttccaaagtgttgggattatgggtgtgagccactgcacccagcctcacctgttaattttatgagcaaaacagattagttgggcaagtccttcacatgcatatctcgttgttgttgttttttttaagacggagtcttggtcttactccccaagcaatggtgcgatttcgtctcagtgcaacctctgcttcctgggttcaagctattctcctgcctcaacttcccaagtagctgggattacaggcgcccaaccacacccagctaatttttgtatttttagtagagacagagtttcaccatgttggccaggctggtctcgaactcctgacctcaggtgatccacccgcctcagcctcgcaaagtgttgggattacaggtgtgagccactgcgcctggccacatgtgtatatcttaaaggaaataatgctaggtaatttagtcaggtgcttgatgagcatttgtcatcatcatacggagtcaatttgtctttttctataaaagttctttttgtaaatgattagttgcttaactgctttaatttcttctaggtaccttacctgtcatcaggatctttttaccacaaataagaaaccttaaagcataaaacttggttcagtcttcacatttcttaaatggaaggagaaagggaataatagggagatatctttatctcaaagccaactgttgttgacttttccagtggcaggggtatgatgctaggacttcagatttcctgattccccatcctagtgccccttttgccaaactaggcaggctttcacagcttttggagcctaatttaagtttttcttgttaagaacagaaaactccattcatagattttaatttgtcattatttgcttatttactgaaaaaaaaaaaaaactattgaaaacaggtgtgggttaagtttcccaaaattaggtttatatttcaaaacaattctaagttcccaaggataacaccaaactaagaggataaatttttattttatttttttttattttatttttttgagatggagcctttccctgtcgcccaggctgaagtgcagtggcatgatctcggctcacttgcagcatccacctcccaggttgaagcaattcttctgcctcagcctcccaagtagagaaaatcttgataagatttcagaggcttataaggaacagcagtaaagatgggtgtttttaaagctagaatacagggatttttttaagacccttaagagaacaaacagggtttcaaaatagaaaggagtaattcttgtttggagaagtgaagacatttgggaaaagtttgacttgaggaaggccattatgataaggactgatgtggtagactctgaaccctgaagaatctggtaccttaagcctaaaggagggtagagtgaggacttgtgggaaaggtacagttatatgggaagacaactgagtgtgaaaatctattcatgcaaggctggctcttaggctctaatagaatcttgcaagctaactctagagcaagtcttttatctttgggatgaaagaaatttaaggctaaactttatacattataattataaaactataataaatattagataatgttctactgaagtataaactcaactatctggcatcaaacagtaactaagccatgatcacaccactgccactgtgttctggcctaggtgacagagcaagaccctgtctcaaaacaaaatccagtaactaaagagaggaataaggggagcgcaaggtaaggcagtacatgtctgaaggggcagggaaagagttctttctctacttccaactgggcaaaataaatcacatttgccctttagattggaagagtgaaataagcttttcttgaacatcttttaagattggagtgtcaaatattaccaacttatttaccaagaatttggtttttcttaaagtctaaagtgtttactattagctttccacagggatataggagtttgcagaggttgtagttttttaagggaacatcaatgaattttcttgatgcatatgcctgtttctaccattttacattgttaatttgcctctaaaatgagtaactcttacaatggggtttaaaacctgaagactattgattgctaccttgatcaggtttggtttcaagtgtgcaccctgtaagagacaatgtgtggttttattgctattgtcacaccagttttttagatattgaaacctgtttcagatttgcttgaattgtgtcttgtaagaggaaaatgttaaacttacttcctctttgagaacagttatttatagaagacaggaaaatatgagaatttttaatagtatatgagagttctctgttacccaagaaaagagggtttttttcaggcatttttaaagaatcataaatcttaaattctttcactcagttgctttgagtctgtgacctgttttacaatggtgatagactgctttctgaaactatgaaattggtcttgttggcagcatcctacaaacataaaaagagcttcctgtgtgtccatgctccagtatttttgtctatggtagttatttcacaaagccaagcgagttacaaacgaaataaaatagtgcttaagtaaagaaactgaataggagaacatatactctctcttctcaattttttatttagaaaattatataccttcagaaattggggaaataaggcatcagacactcagcttcatcattttttaaaagtttgctgtatgcgctttatatgtatgttttttgtgtatgaaccatttcaaagtaagttgcagacaagacagtttgctctaaataaactcaatgtctgggcacagtggttgacgcctgtaatcccaggactttgggaggccaaggcaggtggatcacttgagtccaggagttcaggaccagcctggacaacatggcaaaaccccatctctacaaaaaaagagaaaaatgtcagctaggcatggtgggcctgtagtcccagctactctagaggctgaggtgggaggatcacctgagccctgggaggttgaggctgcagtgagccatgattgcaccgctgcactccagcctgggtggcagagtgagaccctgtctgaaaataaataccctcaatattatcacaaacatacagactatatttaaatttccatagttgtcaggaatatgtcttttgtcgtctgtgtgttttgtttaattcagagtacattcaagattcatgcgttgcatttcattgctatatttctttaatctcttaattcagcaaagtcaccttatttggaaaaagacctgattgtgaaagctgagttttatgtgttttcattgatcttgttctttattccttgtcaggttacttttaataacattgtgttgtaattggaataaattattaatacttttaacatcttattatgtgtgtgtgtacatacactttataggttactaatcaggaaaaagtcttggctaggtcttaatacagtctttaaatcattgcctttaagtgggcttaaagtttttcaaaaatgttctttttgtaattctggaatcgaattaagattatgcctaaatctttaccttccttagctaaagcagtgtggatttggggttgattctgtttttttactaataatgacgctctagaactaaaagttaacgattaattataaggcaaaaagaaaagagcgttctttttttttttctaattgcagagtagtttcctgacactactaaatgaatattttaaataaaacaggagtaattctgaccctctgtgcttttgtcttataacctgtacttacagtggatgtaattttatattaaagtttaggggtttttttttttggtcaacaagggcaaacacaagattattcaaaggcttgggagaaatattacaagaagcaaggtattgtttttattagaaatgagatgttgggcttataattgtggttacagcaacaaagttcttttttttcaaaggtcaggcagttcctgctccgactggggctcctccaggtggtcagccagattatagtgcagcctgggctgagtattatagacaacaagcagcctattatgcccagacaagtccccagggaatgccacagcatcctccagcacctcaggtataatgtaattgctaatttgttgatttctactccagtctgttttctgcatgtttactgtttgtctgtttgggagtgtttgccttttaaatttttatctggcaaagtataataactatttaaatgaagtactacggtgtattgtttgggtttttttgttttttataatgctttccagcatctgagtggtgaatatttctgcaatgcctttgattttaaaaataaattttcttcccccagggatttgcaaatcatgcaagaagccaccaccatttatattaaccactttttctttcttaaaggattcactcctgaattagctccatttcaaggattttctttaactttttgtgtatttcttatgtatctcttctgcacagggccaataataagaagtggacaatacagtatttgcttcattgtgtgggggaaaaaaacctttgttaaatatatggatgcagacgacttgatgaagatcttaattttgtttttggtttaaaatagtgtttccttttttttttttttttttgaaaatgtacaaaatatctatcactactgataggaggttaatatttctgtgtagaaatgaaaattggtttgtttttagtatttagtgtagatgtacacattccagcaaatgtatttgcaattatgtggttgatgctttgtgatataaatgtactttttcaatgtatactttcacttttaaaatgcctgttttgtgctttacaataaatgatatgaaacctcctgtgtcggtaagttggatatgtgggtatttaaaggattcataatttcttagcaatgataaattaagatacatatacacaaatatataagctttccccatgaaatattgagtttttaaacactggcatgtttttccccccttgcagtatagtggtagattggaggatcttttccatttattgtattggctctttcagcacaagtaatcctgatatcttcattttttttccttctgtttgattaaaaactgcatgtgtgtacaatgatcttttggcatacttccattgcattaacagtgaaatttccttttatacatgaccactgtttcagacctgtactgctgctataacagttaacctttctgttcttaatttgataatacttgatttccaagactgtttcggcataactaattttaaacagttttcagatagtgaatatgagtagtctaataagaacagtttttttccatgtgaagcaactctttcaatgtatataatgttagtgtgtttctttctaaatttaggatagaaaagtgaatagtgtgcaaaaagtatagctacattgcatctgccattgaaacataaatggggtatggaaacgttcaagctttttttttttctttatgcagtatagataagctttgttttgtaaatgcacaagtccaatcattgaatcaacttaatttttttatgtacttgaagtcattttattactctttaacactcatgctgaagttctgatattttgttgaaatccattgttttactctttgcatatttgttggctctttgcatattaatatattagactacatgcaaatacagtctgtcttgccattgtctgttgaagtgcaggtttgatccagccagtatagaactagctctgtaggggtgaggaggactgtgctgtgtatcatccttgattgtgttccttcaaggagcattgcactgtaagtacatcagaatgacaaattgatgaactgcaacagtatctttttgtcaatgttccacataatgcaaatgccatacgttgtgtgaatattatgttggaatacagtgctgatatcttggaaaaccataactgcctcttaatttaacatagaataatacatagttctgtattttttttaaagtgagcttaatgggtaagtattttttatatgctttagctatagctaaagaaaactgatacttaacaaagttgaatagtattattcactggtgctcctaaaatattgtttttcagtgtaaaatatgcatatcttctatatttaatatgaaagtcttgaaatgtatcagacagaaggggatttcagtttgcaaataatgagcaatgtagcaattttaacacatttcataaatatatattttgtcattggtggagagcaccatttgttgttttgaatatactttaaaggaagaggtacaaggacataaatgttgagattacctacaggatggaaatagcagtacagttcattgtagatattttgaaatgtttttgattgttttatataacctagagtgacttcccttacccttatttagatctgcatatatagttctagtatgaagtttaatagttaaggagttagctatttgttatctttaagagtagggtattgacgtgaacaattgcagtattttgcatgatactgttttatagatgaccttttaggaaagtggtgcatttattaattgaactgaagaagtagttcagttgaattcagtatcataattcacaaattggaggctgttgattttgattcatttaaggtttaaaatctttattaattgcaaacagtgcaattatttatacttcacagtgccttcccagaccttccaccttaggttctgctgcaaaaagcaccaggtaagcacaacctaaggacatatataaataaatatttcaatacatta

SEQ ID NO: 19 - DNA, 32744 bp, Homo sapiens
  source 1..32744: mol_type = other DNA
gcttgggcagcgacagctgttccaggcactccgcgtcgagcaccggagtcccgagccgtggctgccacgggcggtgggcgggcggaggagagcaccggaccaccagtgcaggctgccgagtcggggcggccgcccacggggaagctgcgaggcgcgggagcacctgggggaccgcttgcagcggggacgcgaggacccgggctgggctttcctcacccgggtgagtacctgctgccgccatcctcccccgacccccttccatgtccccacgtccccaaaggctccgccctggccctctttccgggcccccatccccggactgtcactgctctggggacaccgtccccgctgggagccgcggaacggggagctgctgcgttcgtgcaaatgattcagcaccattcgtgccctgagaggtttgggcagaatgggggagggagagggcggaggggacggggtcagttgctgtgatctcagctcagtttttaggctccagatgggagactcgggcgggcggggtcgggttgggtgaacgaggaggctccctgctggtttattctgtaattccgtcgttttcccacatcgtggtataagcctccgcgagtatgcggggcattcttgaaagggtatcaaaatgcccttttcgcacatgcgagtgaagtctagggcccttgtaggtacctctcactttctccacatcttgctctgttggatgcctgactcatgccatcatccacttatatcacatcgcagcgttccctcgactgatgtaaaagataccctatgaaagttgccttgtattctgggtgggtttgattgatcctggcatagaaagaaaagatttaggagaggtaggaaataataccttcatagcctaggcacttacttttatatatcgtattttattaaatcatcataatccagaaccaaatgtggaaactgaggagcagggaagttaaattacattctcaaggtcacagaacaggaattcgaatataggttttcctgactctatagtccatggattttccactgtattaatggagtgtgtccaagtgtacatatatatgctctattagatattaaacatagaattaattaattgaggagtaatctcaaacaacagcaacaacaacctgtaaactttctgcataaggaattattgctccttcaatatgaaagaaagatgctttgaatcatgtgaaaaataatctattttcttagaaagcttatggcaaaaaatatgtgaacaacactacataggagagtgaggtcataacaggagatgttcagcacatttttggcagtgatatttggtggatgctcaagtgttggagaagtcgattaaaaacgtaagaagaactctggaaatctttttctgtcttaaatgttagggagacatttacagtaataatagttacttagttcatgaggtgtgcgactgaactgcaccccacaatagggtgacaggtgaacccatactaagataatgttacttgattcattacaactctgtgatattgcataacaggtgataactccattttacagactaaggaacaaaattcagagaaggttcaagaccactcagtaagccatggaatttggacaagccttgactcttagtcagtttagaaatatgagtgttgtagtaaaatgtagttcttatatagtgggaaactgaattagtttgttgttaccctgccgttaagagtcaacaattatattgaccttctatgctccttctgtaaaaataatggatgctaggtctttcttcgcccgttgatgggtcctttgacttgctttcattagcgacttacagattttttcttaagaaatgcatctcttgtttatgtctcaagaggcaggttgctatagtacagatgctcattatctctaaatactcacatagtattgatggtaggcaggaacagagtcatcttagtatgtcatttctaaagtattgaaccatttgcattggagaattctttttcaagttaacgggggtattgataaagtccactgcctaaataaggacataaaatggaggcacaaatttatatttgttgttcaaacaagagtatgagaagtggggtcttgtgaagagtcttgagtttgattcctaaaagtcatttcattttgttctttacatggctataacctatatcctgaaccttggcaaggcatcttgtaatccaatctgtttaatcctaagggggacagcagaactggcatgaatgaataagcaaaaatacaataccactgctgttaaaaaaaaaaaaaggaaagtgcatgtcctggtgatggatggtcagcagcaacattttaaaacagagacagcacattttacttagatgacatcactgagagtatgaatataataccaacttggctttagaactgctctctctcctctgtccaatgactacagtctgcaaaccatctaaattccccacttcaaggaacttaaagtctagcaggggaaattttacttacacgtgagtaattaacaaataacttagaattggcttaataccagaaaagggtggtgcagacctactgctatagcggtaccttaagagaaaagagaaatagtagagccttggatgatcagaggatcaggaaagtcttcatgggttgaagtgaattaaatcagtctcagagactggaaggattctgataggcaaagagaaagccacataaaggttcagctaagaagtgctcatctactgtttggatacatggtgaaagatcatgaagaaacttgaatgtcagacagtgagatctgtttctgatctgttaatcatttctctttcttacattctccatatctgttgccccgagtccccttccaggaaatggtctgtttcctgggtactaaaaggattgtcaactaaactgagaaaaagttttctgtgcaagtacaatttttcctcttccaaaggaatttgccttttagctccggcccccattagataattatgaacaatttggaaagtttaagaatataaaaaggaaaaaaacaccctcataatttgaccaactaaagacaatcactattcatttttgacatgtttctttccacttttttcatgcgtagttttaattatggtatctatattacttttatattatttttaaatttaaaattctataactttagttttcatttaattacaactggcttaatactaggtttaaaatgcctaatagcaggcttaaaaatgactacataattttccatttggtagatgtattatcattgcctaattgttcctcattgtcactattgatgacatcataataaacaattattgatgataataatagcactgtgatgaacatctttgtgcgtatgcttttttttgtattttgaatattagttcctttgcatagagtctcagaaataaaatttctgggttaaagggtatgaggtcttgaagttgcactattttaagcaagttttgaaactactgagttcttatattaggccattcttgcattgctataaataaatacctgaaactaggtaatttataagaaaagaggtgtaattggctcacagttctgcaggctgtactggaagcatggcagcatctgcttctggggaggccttaggaagcgtccaatcatgttgaaggggaagggggagcaggcacgtcacatagcagaaagcaggagcaagagagagagtgagggggtggtgccacacactttaagtgaccagatcttgtgagaactcagagtgagcgctcacttaccgccaaagggatgcattaagccattcatgatggatatgtccccaggattcaaatatttcccacccccacctccaacactggggaataaaattcaacatgagatttggatagggacccatatccaaactgtatcaattcccagtgttcaatttggaatacttacatgttgattatagaatatttgcatattaataattcataacacccaatcttgtctgtggctcctcagattatagtctttcaagcaacttcttttgattagactaaagactgattaaatcatggagactgggagaaaggcaggcagttggtgttactgaggagagaagatactaagttggagaacaggcttggtgagagtgagtaagagttgatagtcagagaaggagaatatgtgatagactactttctggttccagtgttgtatttgtggacttcagctgtaaacctctgcattccctcacccacaacacacatatctatctccttcaaatttcagtttattctatcctcttatatcagattcccaggtctccagcttcagggtcctgatattgcaaggcacagctgtgagctcacttttgcactctaatttggggaattcacaaaggtgagagcaggaatttgggacctctgcttaggtctgagcagaagtcctgggcacaaggtataaggtgtaagggagggacagttgacagacattaaagacctctcctgcctcccctgtacatttgccagagatgacctttgagaacagtgattgtcagatgcataaagttcccaacatctcttctcagcattcagatgctccccctccccttgttcccagtatccttccaccagaggaaattcccctcatgcaggagagagactgtgcttcagtttcctctattcattgtagggatacttggcactaccttcttgcaatgagaagggcaggggcccagtgttggacgggtcctttgggctcctgacttgctcctccaggttctcacctgagcttcctcactgtcctacctccactctctttcaaggctgggaatccattgaggtaggcaggccattaagtgtctatgagagccagtggaagcagagccaaggcagatgaatgtgcctgagggcacaactagggagcagagaggcaggttcttatactatgccatcagtcttgagagacttgaaacaatgaaaacaaaagcatcacattataaaccaaaaagaggattcccaccccacttttcaggtcctgaaagaggatttctgatagaagctggacattaacataggcagagtattttaggcagaatttgtcctgtgcttagttgaaacctattattgaaaagtttgtaagctcttagaaggtggtaaatctatctccatttctctcaggcattatctgtcaaagttgaagtgagcttagcaaatatttttcctggagttaagttaaagtagaaaagttaaacttaaataagcttgagtattctccactaatctttatttctgttatttcctatttgacatttatctgttaacacacttctgtccatagtacacacagtagttgacagagccaagatattggaattgttttggctctgggatggtgagtgataagtaaattttccccctttttctttcaccttttatttgcaagcaactagttggcttatgtttcctttgaaggtgtagagttaagtactccagcattcactgggtcttctctgtggctgacccaaaggtctctgatcctttcttttgaaattggtgagattgttggtccactgggcatattgaaccatccacattgcttgctctttctaaattgtgctgtagcacctgagctttctaacttggtgttatttttgtctttctgcttagttatgtgtaatggaacagtatagttgacaaaggattatttagaaaattttcatctctcttaccccctattttgcagagtgtgagctggcgccatgtctaattcaacggtatggcagtagctgtttttataaacattttcctccctcttccattagtgtatatgtagtgaagttgactttttaaagtaaattgagcatttttagatttggaaggtggctcagcagtaatctaggcagcagcttcaagatcatttcaatgctatttgttggattggaattttcaggatgcttagatatatctctcatgtaaggtaggactatttttgttttgtaagtgaaatgactccacttaaactttattgtgtaaaatcttctttaattgatgtggtcttaacactatgtcataatgtaaagtgttggtagaaaaagttagcatctttgggtttaatttgaattattgcatttgatgggaaaattttcatgtgtattttgtcattactattattgaaaaatctattttttcaaagtacttaacaaataaaatctacgaccatgtgtgatattcataatgattgctgaaaatcaggacagtaattttagcacacatcttagtctatatttggaaccagtcagtctgcagttaactaacaaatacatgctagttgttttttggagagaaaagctagaaactaaacatttccaaaaaaaaaaaaaaaaaaaagaacttgaatactttctataaccagtttaatatttatgaaaccagatgggggcattttcatttatgtttaggtttgatcacatccaagatgacaattttttttagcatctcttaaatctagaattttaaagattagcagatattatttccaccatttttacaatgtgaaaaatggagctagagagaaaaagcaaggcagaattagcatgcagaagcataatgagatttgaaattggtctatagctgcctgttttagatactaattttgacagtagatgctagtatttgctgtcatatgtaaataagaggacaacctttattggtttattagtccttttgttttttttttctttagagtatttgaggaaaaagtatcttctcaagttaactgaattttttttaaactaatctgtgatgcctatttccagtttacatcagcttcccccttagttaatagatatacttttcaacccattatttttttggaaaatataaacaagttgtttctggaacttgccacaataatgatagggaaatagacaaatagtaaggaaaatttgaaagggagggatcagtgcttctcaaaattaagtgagctgtatatatatatgtgcaaaaagccttgtcaaaaatcagtgccaaatgagcatttttggcagaaagaaacatttactgctacatatgttatggggttgacatttcagaataagaggcattttcttttttaaacatttatcttgagtatataatatgcatcaagacctattttcatccttgacttaggattaaaagtgaatatggtttttcattctagtagggcatatacttccatattgtgcttaagagagtatctgtgaattttgtttttagaacctacaaggacttagaataatataaacataggatgtgtgaaggtcctcaagtgtagcttctactgggaataaaattaagcaaatacactcagcaatatctataaatagagtgatttagatctccaagtaaaattacctgataatatagttcaagagtgtgaacatcttagtatttatataattatttgggtgattgtaggcattccacaaaggcaaatttttcttccagtgaatattttgtagcattatttttaatatatatatattttcttttttgagacaaggtctccctctgtcacctaggctggagtgcagtggtgtgataatggttcactgcagccttaaattcctgggctcaagcgatcctcccacctcagccccctgagtagctgggactacaggtgtaccaccgtgcccaactaatttttatatttttcgtaaagacagggttttgccatattgcccaagctggtctcaaactcctgagctcaagtggtccaccagccttagcatcccaaaatgcagggattacaggtgtgaaccaccatgcctggctgtataattttttttactgtgataaaaacatcttaaacatttttaaatgtacagtgcagaggtatacagttcacattattgtgaaacgaccttcagaacattttcatctggtaaacctcaaactctatactcattaaacaactctgcttttcacccacctccccctagcttcaccctctgcccctggtaaccactattctactttatgtttctatgaatttgaccactttagatacctcatacaagcggaatcatacatacttgtcttttgtaactggcttatttcacttaatataatgtcctccaagttcatccatgttgtaggatatgtcagaatttccttagtttttaaagctgaatactattccgttataagtatgtaccacatttgtttatccattcatcatccatggacagttgtgttgcttccacctgttggctgttgtgaacactgcttctatgaacatgggcatgcaaatacctcttcaagactgtgctgttaatttttttcagattataccctgaagtgaaattgctggagtatatggtagttctatttttaatttttgaggaacctccatattgttttccataggagttgcaccattttactatcacaccaacagtgcacaggtgttacaatttctcctcaaccttgccacttattttgtgatattttgattgtagctgtcttaatgggtgcaatatgatatttgttacagatttgatttgtatttctcttatgattagtaacattggacatcttttcatttgcttattggtcatttgtatatcctctttctattcaaggcattagcccatttttaaatagggttattggaagtcctagccagagcaatcaggcaagagaaagaaataaaaggcatccaggccgggcgcggtggctcacgcctgtaatcccagcactttgggaggccgaggcgggtggatcatgaggtcaggagatcgagaccatcctggctaacaaggtgaaaccccatctctactaaaaatacaaaaaattagccgggcgcagtggcgggcgcctgtagtcccagctactcaggaggctgaggcaggagaatggcgtgaacccaggaagcggagcttgcagtgagccgagattgcgccactgcagtccgcagtccggcctgggcgacagagcgagactccgtctcaaaaaaaaaaaaaaaaaaaggcatccaaataagaagtcaaatcatctctccttattgatacgatccaatacctagaaaaccctaaagactctgccaaaaagcccctggaacttataaacagctgttatacagtttcaggataaaagaccaatgcacaaaaaccagtaacatttctatacaccaatagcattcaagctaagagccaaatcaagaatgcaatcccacttacagtagccacaaaaaaaaatccccaacatcaataataacaacaacaaccaaagcctaagaatacatctaatcaaggaggtgaaagatctctgcaaggacagctacaagacactgctgaaagaaatcagagagtacgaaaaaaacattccatgctcatggattggattaatcaatattgttaaaatggccatactgcccaaagcagtctacagattcagtgctatacttatcaagctaccaaagtcatttttcacagaactaaaaaaacaaaacaaaacaaaaactatttgaaaattcatagggaaccaaaaaagaccctgcatagctaaagcaatcctaagcaaaaagaacaaagctggaggcatcacaatacctgacttcaaactatatactgtaaggctgtagtaaacaaaatagccatagtactggtacaaaaacagacacatagaccagggaaatagaatagagaatccagaaataaagccacatggttaacaaagttgacaaaactaatatggaaaagacttcctgtttccctgttcaataaaagatactgggataactggctagccatatgcagaaaaatgaaactggacacctacccctcaccgtgtagaaaaactagctgttttaaagatttaaatataagtcctcaaactataaaaatcctataagaaaacctaggaaatacccttcccaacattgccttgatgaaggatttatggctaagtccccaaaagcaattgcagcaaaaaaatttataggtgggacctagccaaagtaaagagcttctgtacggcaaaataaactaacagcagagtagacagacaacctacagaatgggagaaaatgcctgcaaactatgtatgtgacaaaggtctaatatccagaatctaaagaacttaaacagttgaacaaacaaaaaacaacaccattaaaaggtgggcaaaaggccaggcgtggtggctcatgcctgtaatcccagcactttggagggccgaggagggcggatcacaaagtcaggagactgagaccatcctggccaacatggtgaaaccccgtctctactaaaaatacaaaaattagctgggcgtggtgggtgcacgcctctagttccagctacttgggaggctgaggcaggagaatagcttgaatccgggagacggagactgcagtgagctgagatcgtgccaccgcaccccagcttggagacagggcgagactccatcttaaaaaaaaaaaggtggccaaagacacgaacagacacttctcaaaagaagatggacaactggctaacaaatatgacaaagtgctcaacatcactaatcaccagagacatgcaaatcaaaaccacaatgagataccatctcgcatcagtcagaatggcaactaacgaaaagtcaaaaaccaacagatgccagcaaggctgcagagaaaagagaacgcttatacactactggtgagaatgtaaattagttcagtcactgtggaaagcagttcagagatttctcaaataacttaaaacagaactactattcgacccagcaatcccattactggatatatatccaaaagaaaataagttgttctaccaaaaagatacatgtacttgtataatatgttcattgcagcactattcacaatagcaaagacatgaaatcaaccgaggtgccatcagcggtggattggataaataaaatgtggtacatatacaccatagaatgctacgcagccataaaaagaatgagatatcttttgcagcaacatggatgcagctggaggccattatcttaagcaaattaacgcaggaacaggtaaccaaatactgcatgttctcacttataagtggcagctaaacattgggtactcatggacgtaaagatgacaacaatagactctggggattactatatggaggtaggagggtgaagaatgtgggctgaaaaactaccaattgggtactatgctcactacctgtgtgatggaatcaattataccccaaacctcagcatcatgcaatatactcaggtgacaaacctgtacatgtaccccctgaatctaaaataaaagttgaaattatagaataaataaacaaatagggttatttgattttttcttgttgagttgtagttctttatatattctaggtatcaactccttgtcagataatatgttttgcaaacattttctcattttgtacattgccttttcactctgttgattgtgtcccttggtgcacaaaaagtttaaagttgatttagacccatttgtttatttttgcttttgttgcttgtgtagcatttgttgttattagcagttttaaaaaaaatcgttagaattgtttcaaattgctgtttactaattcctttcctccttatttaaagtccacagtagtattcttgagactatgtaatgatgatacatgccataattattttacaaattgaaattaatttcaatggaatttgtctctgtggaagagccactttaaaaaaatctatctaatgtagaattttgttgttgtaacttaaccaaatgttaattgaaattgtgttaaacctatacgttgatttagggagaattgccatcatcactgcgttgcttctttcaatccatggacatggcatgtccccaggtgtttaagtcttcattgatttctttcatcaggattttatatttttttaatttttttttgttttttcttttttttttccatgtaaaccttcctgcacaaattataattttaattatgtaaatcttgcacatgttatcttagatttatacctatattttaaattttctttggaaaattatacctgtgttttaaattttctttggaaaattatacctatgttttaaattttcatttccatttcttcattgtcaagatatagaaatgcaattgatttttgtgtgttgatcttgtgttcttcactttgagggttttttttaaatgtagacaatcatgtcatcagaaaatagagacagttttatttctttccaatccatatgtcttcatttttcttgctttattgcaatggctggaacttcctgtactatgttcaataaaagtggtgagagtggacatccttgccttcttcttcttcttctttttttttgagatggagtcttgctttgttgcccaggatagtgtgcagtggcacgatcttggctccctgcaacctctgcctcccggattcaagcaattctgctgtctcagcctcttgagtagctgggacacaggtgcatgccaccactcctggccaattttgtgtttttagtaggggatttcacaattattggtcaggctggtctcgaactcctgacctcaggtgatacaccggcctcggcctcccaaagagctgggattacaggcgtgagccaccatgcctggctgccttcttcttaatcatagaaggaaatcagtctttcactattaaatgtaatgctaattatgtaggttttttgtacctgctctttacggggtcaagaaagtttctctctgtccttagtatgctgagacattttatcctgaatgaatgttggattacatcaaatactttttttagtatcaattgatatggatgtatgatttttctttcttagcttattgatatggtaggttacattgatttatttttgaatattgaatcagccttgcatacatgaaataaatctcactttgtcatgacagcacatacttatacatatattatacatacacacacattatacatatacacacattaggtacacacacaatatatccacaaatattgttagattcagtttgcaaaattttaaggatttttgcatctaagtgaatgaaatatattggtctgtagtttctttttctggtgcttctttggttttggttgtcagagtactattgatctcataaaatgagttggaaagtgtttcttcttctattttctgaaagagtttgtttaaaaatggtgttaattcttcattgagtgtttggcaaaatcccataataaaaccaccttggtctggacatttctttttcaggatatttaatgacaaaatcagaattatttctttagtagttatagaactatttaggtgatctgttttatcttgcctgagattgggcagtttgtgtttttttaagaaattgattagttttgctaagttgttgaattcataacagtaaagttattcataattttcccttattatccttttattgtctttagattctgttgagataggttttttaaaatttttgtttatttatttatttatttatttttaagagacaggccttgctatgttgcccaggttggtctcgaactcctgggctcaagcaatcgtcccccgtctttgtttcatttttgatgttggtgacttgagtcttatcttttaaaaaatctgtgatggttaatattaggtgtcaacttggttggattgaaggatgcctagatagctggtaaagtattatttctaggggtgtctgtgagggtactgccagaggagattgacatttgagtcagtggactggtagaggaagacccaccctcattgtgccagtgtggctagaacaaagcagccagaagaaggtgggataagctttgcttgctgagccttctggctgccttctttctccagccttggatgcttccttctgcttctcctgccctttggacctcaaactgcaggttctttggcctttggactctgggacttgcaccagggaattgccaggggtttttgggcctctggccacagactgaaggctatactgtcggcttccctggtttgaagctttcggactcagactgagccactaccagcttctgtcttccccagcttacaggcggcctattgtgggactttgtcttgtaatcctgtgagccaattctccctaataaactcccttatatatgtagtcatatatcctactagttctgttcctctggagaaccatgactaatacaaaatccttgtcagttttgctagatgtttatcaattttatacattcttttagaagactttattttattttattttattttggatacaaggggtacatatgcagttttgttacctgggtatattgcatgatgctgaggtttggaatatggatagtcccataacccatttagtgagcatagtacccaatcagtagtttttcagcccacgtccccctccctctctcccctctctagtagtccccagagtctactgttgccatctttatgtctgtgagtaccccatgtttagctgccacttataagtgagaacatgcagtatttggtttcctgttcctgtgttaatttgcttaggataatggcctccagctgcatccatgttgctgcaaaagatataatctcattctttttatggctgcatagcattccatgtgtatatgtaccacattgtatttatccagtccactgttgatgggcacctcggttgatttcatgtctttgctattgtgaatagtgctgcagtgaacatattatacaagtgcatgtatctttttggtagaacaacttattttcttttggatatatatccagtaatgggattgctgggatgaatggtagttctgttttaagttattttgagaaatctccaaactgccttccacagtgactgaactaattcacattcccaccagcagtgtataagtgttctcttttctctgcagccttgctggcatctgttggtttttgactttttgttagttgccattctgactgatgcgagatggtatctcattgtggttttgatttgcatttctctgatgattagtgatgttgagcattttttcatgtttgttggccacttgtccatcttcttttgagaagtgtctgttcatgtcttttgcccattttttttttgaaacagggtctcactctgtcacccagggtggagtgtagtggcacaatcttggctcactgtagccttgacctcctgggctgaagcagtccttctatctcagcctcctgagtagctaggactaaaggtgcacaccaccatactcagctaattttgtttatagtttgtagagatgaagtctcattatattgccctggccggtctcaaactctgggctccagctctcttcctgcgtcggccttccaaattgcaagatcacaggtgtgagccactgcactcagccttttgcccattttttaacaaaattatttgttttttgatttttcagctatttaagttcctttcagattctggatattatagctttgtcagatacatggtttgcaaatattttctcccattctgtaggttgtctgtttactctgttgatagtttcttttgctgtacaaaagctctttagtttgatgagatcccacttgtcaatttttgttattgttgcagttgcatttgggcacttagccataaactctttgtcaaagccagtgtttgctaggaagggtatttcctaggttttcttctaggatttttatagtttgaggggttacatttaaatctttaatccatcttgagttaatttttgcttgtggtgagaggtagtttgtccagtttcttgcttctgcatgtggctagccagttattccagtgtcatttattgaatagacagtctttttcttattgcttatttatttatttatttgtttttgagacagagtctcgttctgtcaccagtctggagtgcagtggcgtgatctcggctcactgcagcctccgcctcctgggttcaagggattctcatgcctcagcctctcgagtagctgggactacagtgtgcgccaccatgcccagttacgttttgtatttttagtagagatggggtttcaccatgttgcccagactagtctcgaactcctgacctcaactgctccacctgcttttgcctcccaaactgctgggattacaggtgtgagcccttattgcctggccccttattgcttatttttgtcgactttgtcaaagatcagagaggtgtcgctatgcggctttatttctgtgttctctgttctgttccattggtctttgtatttgtttttctaccattaccatgctattttgtttactgcagccttgtacagtttgaagtctggtaatgtgatgcctccagctttgtcctttttgcttaggattgtttgggctatcagggctcttttttggttctatatgaattttcaaatagtttttttctacttctgtgaaaaataacattggtattttgataggaatagcattgaatctacaagttactttgggcagtgtggccatttaaatgattctgattctttcaatccaagggcatggaatatttttccatttttgtgttatctccgatttctttcagcagtgtttcatagttctccctgtagcgatctttcagttcttttgctagatatatttgtacatatcattttttttgtgtgtggctattgtaaatgggattgtgttgttgatttagctatcagctagaacaatattggtgtatagaaaagctactgaagactcttttttgtttcatttattttcactgttgttttcctgttttcagtttcattgatttcttatatttatataagttttttttctgtctactttggattttttttctccctcttgcaatttcttgaaataggaacttagattattaatttgagagtgtttctcttttctaatgtaagcatttaggtgtctaaatttccttctcagcctggctttagctgcatttgacagattctgttatgttttcttttcacttttactcagttctatgtggtttcaaaaaaatatgattcatggactatttagaaatgtattgtttaattccaagtgtttgaagattttgctgctgtttctgttattggtttctagtttaattcaatctagtcagataacatactctgtatggtttaaattcttttaaatatgctaagacatgttttatgagctgtgatatggtgcatcttggtgagtgctgtatgggcacttgagaaattcttgagtagaatgtctaatgtcaatcatagcctactggttgatggtattgttcagttttcctgtatccttgctgatttttaatttagtaatctattaattgctgagaatggggtattgaaatccccagctaacttcgttgattttttttttttttttgtgacagagtctcgctctgtcgcccaggctggagtgcagtggtgcgatcttggctcactgaaagctccgcccccgggttcacaccattctcctgcctcagcctcctgagtagcggggactacaggcgcccgccaccatgcctggctaatttttttgctatttttcagtggagacggggtttcaccgtgttagccaggatggtctcgatctcctgacctcatgatctgcccgcctcggcctcccaaagtgccgggattacaggcatgagccacggcacctggcctacctttgttgatttttaagcttttcagatctattagtttttgccttgtgtattttgaagccatcttgtttggtggatatacacttattattgttatatcttcttggtggattgagctttttataattttgcagtagccctccttggctctagtgatttttttttgctttgaaatttattttatctgatattgttatagccacttctgctttttaaaaataaatacttgcatgatatatctttttccatagttttattttcaatctatatatgtcattatgtgtgaaaagaagtttttatagatatgtatagttgggttgcattttaaaatttactgtgccaatctctcttttaaatgatgtgtctgtaccatttatgtgtgtagttgttgatatatcaagtctgcttttttcctcattttttatttcctttctttctcatttttctatttctttttcttgcctttctgtggattacttggatattttttagagctgcatttttatttatttataagtttttgaaacatatagcttcgtatagttttcttagtggttggcctaggtattactatttttcttagtggttcccctggtattactttatacatacttagtttatcatagcttacttttttacatttttcaactttgaattaagtatagaaaactttacttccatttaggtccttttaccctctcttctttttaattataattgttttaagtatttcccatacatactttgagtaacagaagagatggttgctttttccataaaatattattaaagaattgtatgttagcaatagtctgttatgtgtacttgtatttttcccaattctgttattattctttcctttctgaagatctcagatttatcattttctttgtgttaagagagcttcctgaagccattctttcatgggacatctggtagtatcaaattttcttagttttcctttgtccagaatgtcttttttcactcctcattcctgaatgatggtttggccagatacaggaaatgggattaacagttactttctttcagcacttgaaagagaaaagcctggccaagatggcaagatcctgtttctacagaaaaaaattaaaaattagccaggcccatggtggtgtgcgcctgtagtcccagctacttgggaagttgaggtgggaggattccttgagcccaggagttcaaggcggcagtgagctatgattgtgcctctgtgcttcagccacatttggagaatgtggctccaaatgcctgtctcagccagcagtcttatgcacaaatataataggcaagactaccacctccatttttactagagggaagtgtaattttttttttcttcagaccaaaatttttcctctagaatattcttttgacagtgaattctgttaagggaaagagaagacaagattgttgggatttggtaaattctcactcactaaaagatgaattaagccctagcctttacatatatgttttagttgaacagaagtgtaaaattaatttgtagtaattgcacaagcattccagaagattggcttgataccttagtggtcttttaaagtcagctatcagaagaacatgatgcgtatttgattttaaaaaatctttcgagtcttttttagagttgattttgttttcattagtaatcctttgaaaatttgccataagcaagtcctgcaagccccatacatttttcgcaccatcaaaagccttctcgggattaccccaagagtacttagattcactgtggtgtttgtgaagcccctttgcaaaattatgagagtaagagaactctgacatagttgactccattttgcttctaacttccaagctatctttgatcattcctaggtgtaggccaagctaattttggatggaatttagtttatagtttaaccttaaagcaaggatgataatagttctttcccaaattaaactgtctttttaaaactaatgaaagactgcaaggttaggattatgagaggggcctgcattgtgctaaaatgtaggtgtagttaaacaacaaccagccattgatccggatattaaaagatttgtgacttacccaattatttctctaaaatccctactctagaacctaagattggccttttgagatgtttttcagacttctgcatttctgactgttgggtgactccacctggaccctcgactcctgactcaactggtcctgtggcctccacccggaggcagactcagcacacaaggaacattttccacaccgctatgatttcatccccagtcagtcaacattcctcattccctagccccttgcctactaaactattcttgaaaaaccctaatctctgaggcttcagagagactgatttgagtgatagctctgtcttctgtgtggctggcctcccgttaattaaactttacttaatgcaataccatggtcttcgtgaactggttgtttgtgtaacgttgggtgattacatttgcgggctgctgaagctaagcatggtctcctctctgcttctgagagctcacaagagaagggcctagatccttcctgtccaaactaattcagtggggaggagtcatggtcataagcttttcaggcttttaggtacttttaatatgtgttgaattaatgaataaattaagaatcagttcagagtcaagtttatttatctcacgctccataactattttgaaattgtaagcaactaatttgataataacagtcaaatgtcttttatgttagacatttccattttaatcattgctagactagaatttcagggttttaactatatgctctgctatcattctcatttacttctccttttccaagtgccaaagtacctcttccttttttgaaagccttctgatataattctgatttaaactaatttttaataaatgagttataaaaatcagttacaaagatattaaaatattaataatttttgccacctattttaaatcatcctttcatggttgagatttgtagtttttcatagaaaaactagatgactatgatgtttgacaaagatcattcttttcaatatgtaaaatctccagtatgccattctagaggatgattaaaatgaataattcttttttttaactgactataatttatctgtctcatttgagctttggatagggttctggttaagggtcccttggttaggctgtttcctctaattagtggtttctcatctgtttgtgaggagctagctaaaaaggattgggaagctgagaaagaaaagcttcatcagttcatatattccctcgggcacatttgtaactcaatctcccttcctgactggtgtctgcatcatttttatcctgatggtctacctcagcagctgccttagattccataatggatgagttattattttaactctatgatgtttagctttacatttggtaggtgagatagatgatatataaaacctaatttttatcccataaatatatatgtctactatgtacctacaaaaattgaaaattaaaagaaattcttattaaaaaaacctaatggactaaaatgaggaaaataggaaattcattgttttgttataggctacccggagataattatactcaaagtacaaactaaatatttagatgaaatagtcacataactcttgttaataacattaaacaaataaggaaaacattgttctattctaaaaccatacctacattgtcggatcttgcagtcacaatatgactttccaaattattgcttttacactacccccactacaccccattttctagcccaaaagagctaaatttaaatttaaatttaaatagtagcatgctatgagttttttccacctccagcccttctgtttgtgttccaaggggaaatacttggcatatgaccaattctttacctactttggacatcatcagaattgtggatgctgcagcctgtctcttcctgagatgaattagagatgtctgccagtcaactcatggctggcttttgactctaatagctgggcccatagtgttaagtcaggctgcataaagtaaaacatcataaagtcatttgatttaggcccacaatttgaaacaaaaaaaaggtatgtgattttttttttcctccatgttttaagattgcataaacttgtaactagaaatattgaaggttaacattccagaaagactggctgaattgtttcacctggattcctaaaatagattttatggagcagtgtatatggtctccggaattctccaaagtttaattctcatttctatcctactctaattttaaattactttcttctaatgctaagtaaattttagttctgtgttactgaaatttatatattgtttacatactgactagtatttactagatgcagtcgatgatatcaagtgtcttaattattcagatcactgtgataatacagaacttttgcctcatcagcaatataaggtatcaaagctatatatgtatatatactatttatttttaaataaatattttttgaataatcaaaagtcccggtatttcaataaaattaagaaatgggaaagacacaataaaatggcttaatatagacgaacataggtaataaaaagggtttgatggagttaagttaatgttaagagagaatcagtggttgtttccttttgattaacattttttttttgtaaaaatttttttccattaccattcatgaaatggaaacaagccacaactgatttagtgtattttatttcagtgttcaataatgtctgtggaattaagagcaagtagggaaacaggaaatggaacagtctatttagtattgaaatgggtaagagaataggctggtataaaacattggctaatccagtaaagctactttcaaagtttgtcttccttctcctttgatgtcatctttgcagagaagagtattgttgggactaggcatggatcactcagctattaaagtaactctagtgggaatttgcaattatttaaaaagatgaaagacgcagttcattattaataatttatatttcatatcacaaaaatttcatgaatactgaagagttgctgtacctagtgaaaaaaactaaactccattttgtatcaaactctctgttttgtttgttttgctcagaatgagagacactgccctttccaataaaaaatttgaagcaaacactttaaaatatatgatataatgagtttttaagattggtaatacactgaaggacagttaattctaccttgtagagaaggaagggaggggagagctaggctgggttgatgatggctacagaaggaagacaatccaagataagataaaaacacaagtaagtatatgtaagttagaaaatgaataacatttctggattgtctttttatcttgtgattttaatctctagttcgaatatctttcagacttactttggttgcaatccatggtaagaaatacaatttacttcttgacatagtacacacacagacacacacacacacacacacacacacacacacacacacacacagagagagacaaaatttcaggacacagtacttagagttaatacatttcttactacatgctgtgcactctggcactgtaatattctcatgtattctattctattatttcaaataaaatgcttattgagactcaccaaattgatttcatgatcctctagaggttatggtctgtatttaaatatgaaacagaaacaaaaatctgtagtagaaagtacattagaatactacgtttttactacatctgtactaaaaagaacattagaatatatggggaggcccctttgaaatatgcagatttgcaaagtaactaattggctctttttcagcacggtttcaagatggttggaaacagactgatgactggcatatttgccattcaaaaagcgacatgctatggcacaaaggttttgagaatcaaacagacctgtcttaagtctttgacaagttaccaaacccctttgagtctcagttttctcatctgtaaaatagagctaataaagcaatctgtgaggactaaatgaaataacacatctgtttacaaaggttctgagaatcaaacagatctgtctaagtctttgacaagttcctaaacccctttgagtctcagttttctcatctgtaaaatagaactaataaagcaatatgtgaggagtaaatgaaatcacacatctgtttaaacagtgggtctcgaacttgactgcaaatttaaatcacttgaggagctttaacaaatccctgtgtcaaggctgcactccagacccattagcttagaaagtttggggctgggagccaggtatcagtatttcttaaagctccttttgtgcagtctatattgaaatgcctggttgtaaagcctatagtgcaatgtatgtaacatggtagatatttgatacatgtcttgttcccttgaataaatatcaactaatgtatagctagcatttttataatgctcactatgtaataggcactgtgcagagcacttttcatatcatgcagaaaatgtgtgccttgttattctgtcaagtaatgaattagcatatggttgagataaaaagagagagcactgcttattacagaggaaaatggttattttttatcatcaggagctaagttacatatgtaactatttcagtgaattatggaattggcctccagaatagagattgtaaacttaaaaaaatttttagattgaaaatttaaaccttagataatgacttatgggtaggtataataggtcaatttgacaaagataaatacttcaaagataaataggtcaatttgacaaagataaaaacatgtaacgatactaattttagcagggatgtattgatattatgtagtagatcatgtctaatatgttttctgtatggtaccaaaaagtgaacattaaccaacaaatagcgtctgccatattataattcacttgacacccaaatttgttaggcttaatggcatgaagacaataccttatgtttattaacaagatccatatttttcattgtattaagtagatacatttagtagtctgctggtatactttttgttaattgttatcgttttggattttgggcttagaaaatgtattgtgattatttttcaatatgattttttcataataatggctttaaaaagaacattttaaagaatgatttattttaatatataacccattcatttactttgcacttaaataagaatttactaattttgtcgtagtctttggtttgcttcctagttttcaatgacagcttctataatggcactgaaaaagcattcattttttcatagatatatgtgttcgtaatacttagtatgcattcaaataacatttttcccgtgcccatgaaatggatttataaattgctacatcagctttgtttaggtgaaatgcctgtttatttgctttttcttttgtgttttttcttttgacctattcaattattaaaacatttgtaggatacctatgctcttaaatgtaaatgagttagtaaaaaaatttgaggtaaaacatatatagagtgaaccgcaaaaatcttcaggatccagcctgatggatttttacttaggcatatgcttgtataagcataaccctggtcaagatagagaacatttccagcaccccagaagtctccctcatgactcttcccaaataattatccctcatcctgcccagaggtaacctttattctaactttttcactttagatttagtcttgcctgctttttaacctcgtgtaaatgaagtcatacagaatatgtataagatctatataaggaaaactacaaaaactctgatgagcaaaatcaaagaactaaataaatggagatatattccaagttcagttataggaaggctcaacattgtcaagatctccattattctcaacttgatctatagattcattgcattcccaaaatttcagcaatttgttttgtggatattgacaaactgattctaaaatttttatggaaaggcaagagacccagaagagccaacacaatatcgaaggagaagaacaaagttggaggacagacactacccaactttaagacttactataaaactacaacaattgaaacagtatggtattggcaaaagaatagacaaatagatcaataggacaaaatagagagcttggaaatagaaccacataaatataatgagctgatctttgacaatgatgcaaaggcaatacaatggagcaaacatatcttttcaacaaatcatgctggaacaactagacatcacatgcaaaaagatgaatttatacacaggctttacactcttcacaaaaattaactcaaagcagaccaaatagctaaatgtacaatgcaaaagtataaaactcctagaaaataatgtaggagaaaacttagatgatcttgggtatggcaatgacattttaactataacaccaaaggcatgatccatgaaagaaattattgataagctggacttcattaaaattaaaaacttacattctgtgaaaaacagagtcaagagaatgagaagacaggtcatatactgggagaaaatatttgcaaaagacacatctgacaaaggactattatccagaatatacaaagaactcttaaaactcaacaataagaaaacaaacaactcaaacaatgggccaaagaccttaacagatatctcactaaagaagatatatagagatggcaataagcatataaaaagagctccgcatctatgtcattagggaaatgaaagttaaaacaagaatgagatgccactacgtacgtcttggaatggccaaaatccaaaacactcacaacaccaagtactgatgaggatacggagaaagaagagctctcattcattgctggcaggaatgaaaaatggcacagatactttggaagacagtttagcagttcataccatgtgatccagctatcacattccttggtatttacccagaggagttgaaaacttaatgtctaccccagacctgcatatggatgtttatagcagctttattcataattgccaaaacctggaagcaaccaagatgtacgtcagcagatgaatggatatatccagacaacggaatattatctagcactgaaaagaaatgagctattaagtcatagaaagacatggaaccttaaatgcatattactgtgtgaaagaagccaatctgataaggctacatattgtatgattccaaccatatgacattctagaaaagacaaaactgtggagataggaaaaagatcagtggttgccaggggttgggagggaatggggaaggatgaacagacagagtacagataatgtttaaggcactgaagataatcttttggatattgtaatgatggatacattggtccaaacccatagaatgtacaacactgagtgaaccccaatgtaaaccctatgtaaactatgtcagtaattatgatatatcaatgtaggtttgtcagttgttaaaaatgtatcactctggtggtggatgttgataatgggggagggtatgtgtgtatgtggcagggaggggtacagaggaaatctctgtaccttcctcttaatttttctgtgaatttataactgctcttaaaaattaagtatttaaataaatcaatatgaaaaatctttggccctaggctctgaaaacagttaggaactggagatagatgatctaaatcccttcttcccaatattcttctttgtcttacattctattattaagatggctaggactgtttttacaggacagggagactgaagtggggagtttattactagcaataacagaggcatcaaaacgttagaagcaaggagaaccaagaattatgtgccaagaactagaaggtaagtctgaatgacctgcaaaactactgggttcaaaagtgatcaatgatggagtacagaaccaagaggctagcaaactccagcaagtgcagtagagttaaccgtgagtgaaagattccagcagtaggaaactgagtggcatcctggggatgtgaaccatgtatggatcattctccaacaactctatcaaaatcactccaaaaaaactgagtaaatatggaatacctactatgcaagtacaacagatgaacaatataatcaactatagtgtacttgctgtgccttatcaaagcatttaattacatccaccaaacagattttaattcctaaatcctccacatagaaactagatcttaggccttgctaagaatcagtgctaatacttaatatgtgtttatataatagttggaccatggcaggctgtgttggctgaatttaaaggccacatctcaatggatctatcatcaggtaaatgatagttgaagtcttgggcacaaataatataatttagggataagtgttgagtagatgccttcaatgtcctgcccatatcccttgtatcttacttcattatgctgtgtttccaactgtgtgttagtatctgcatttctttgcttgaaggctttcaagaactcttctgggagccttgagtctgcaggcctttgcttttccaggcgtcctccctacattcccttccccctcccagaagagcaggaattgccatggaattagtactcaccctcacacccacagcagccttcaactgctggttgaccctagttgggttaactctgaagctgtgtgttttacactggttcccagactttcctaggggattaagctcttgccacccaccatgaagctgtcattatcatacaccctttattggctgcttttcctactctgtcttgcttccctgctcccctgccagtatttctagcacttcccaaaataaactacttttatttgaatcctcatatcaaggtttatttctgggggcctcaaactaagagctcttggataacaccctcaattaaaaggtagacaggagaaaaactacatcttattttcttaattagcaattatcttttaattttcaagtacttcttggactttctacttggacatgctgttgatatctcaaacctgacgtgtccaaattgaaatcagaacttgaaaaaccaactgcttccacactgattaggaaaaaagattctaggattttgtctgtgtgctttctttctgttcatttctaaggggaaaatattttaaatgaattcagtgtgtactgtatgttcctaattttctctcatttgggtgtgaatagcacctcatacaaatataacctgtactgtaacttcactgctagctattttcacataatgatctcagtcttggcttgaattcctggaatctggaatcagttagtttacatttttatttactctggaagtgttaacctcagaggtagtttagcaaatattctaagtactaaaataaacacaaaatgtaattcacaatcataatccttgtgtactaattaggaatcagggtcttttggaagtagccaatcctatagattattttaagatttatcaataatgtatagtaaaatttatcctggtgtatgattcataattgattcttttcatcattgctttaaaacatcctgaattttcaaaaaacaaattgtgacatgtgaagcaggtagacagtgaatataatatcctaatttaggcatatttgtttaggcttagtaaattaaagcaaatcttcaactttatcattcattctttcatggtaaaatacatatcatttcatttattatgaatcattcttatccttgttcaaataattacatcttcccataccagtgaaagatcttcattttcaattttaatgaccatttaattatccattgtttggctatatcataatttatgtaatttcattattggatacttttaggttgttttcagttacaggtattattaataatggcttgacatacattcttcttcacaaatgtgcttcaacattttagacaattttatcaggattgattcctaagtggaattaacaaatcaaaagcataaacactttgtataatttagacttttgttatactttctaattgttttccagagtgttcccctttagtgatggtctagagagacaaacattataggccaccttcaaagaaggagactaataaattgctttgagtttgacttgagtaatttattctactcagttttgtaatttaataatattaaagtcagtgagttcttcttaaagtgatgatttatatatacaaaagtgatatctaattttatgatatatgagatattagttgtaaataacattttaagtttagtaatgtaacactgattggaatcaatataattgagagagtaaactgagaaacttaccattgtccatcatgagtagcctattctagtctacctgtattctctctggaaatctgaatttttttttttaccaaattactctattacctacatggtcactttaccaaaagtaaacttgagaaaagtaatgtaaccacaaaatactgacattgaatatcatcagatggtgttcttgacacattgctaataatatcatgtttgagaaaataactgtaaatgaaattgagtagttttttgcagctattatttaaaactattaatttcatttgagaaatacttatggagtacctactatgttcagaagaaatttctgtattcaagggaaaattacagttttgtgtatagttttcttatttcccattgtgataagtaagaatgttctcattctgagaacatggaatttatttcaactttatattgaagggagacttctctagacaactttaatgcttattattgatatccttaaaagttaccaccacctttggtgaaggaaaattctatttgacaataatacagatttagatcatgaagtcggcttctcatttttccttgacagtataagatgagtactccatgtaggaataataacaaggaactcatgagctgagaaagatacctcagtttcctagtctcaatgttaaaagagaccaagagaaatgacagttttccaggtcagtatcctaggtgactttgagtcttccaacacatatatttttttctattatgctttgtaattaaatctcttcagcttggaatttagctgttttagtttcatctaactggaacccaagtgagaatcagaaggtaaatatacttctagttagccaaagtaatgtgtctactcaaaacatgaatttagatataatttctttgcctttgtttcccattgtacagttcttatcttcttggtgggtcagtaattgaggttatgaataaggagagcagaaaagatggcaggcaacctcatttttggattaggtgagatggagagctggtactcatgactccatttgttttttgtccaataatattatggcccagtatcacaacaacaggcagctgtgatattggccatccactattatttgccactgagtttgttattgtttttataagcccatgggtatggtgcatttcacactttgctccaaattaagtcagtctcctcccacagcaaagttgctggttttcataccttgccaactgtggtagaactactgcaccaatggagctggagggtggtggtgtgtgggaacggctgcaggttaaaatgccatcccgactgttcttaccccaggttcaatagtttttcttgaataaaagtgtcttcctttcttgtatgcctttcgtcattttcaagagtcatgaaattattattcttgactctttttttttgctgttttatctttgttttttgagaagaattgctgaactcctcattccagcgttttggaaattttgccattttggatccagttttaactggaatgttaaaagttatattttgagtgagggcttgagttagaaaacctatctagattatgaacaactaaattatactatttttacggggccaaaaattttagaattttagagtgaaaaggggtcttagttccactttctcttttttcaggttaataattgggaaccttagtgccttgtgcagttaccatgcagattgttgatattagaactggatttggaattagctcattcctgagtcagtcactgcatcccctaccacagtgcagctgcagacactgtgtcctccttctgcaggttcagccctttccccctgagctaatccttcccagtcaaagcacatgaagattctcagccctgaccaaagatgaggtctgaatgaattgtgctgccttgaaccagaagttggagatggggtctagtaatattctccaggaaattcttgtgcacattcaagtttgagaactgttggcatagttggcaaaaggtggttgttgttgtccttagaaattttgttgcactccagaaattttgatagccaattaacttcttttttaaaaatcacatctaagatcctgtttgttataagacacaccattattttatttacttaaaaaaacctcttcaaattcaactatgcaacagtgctttcttagtagtaagtaccattttattttatacatgttgaaagaaccctttaaaggtagtttaaaaaatattgcattactttcatccatacaaaagagggaaaatttaagtaaaataaattcattaaggcattctgtaaacttcttcacattggaagacagactcctctgaatctcttcttgattcagccctcattgtctatgtttttccacacaacatcattctctggccatcaagagttgatgccacatttcttaaaagggtgtttcactattttctgggtttttctttcagcttctgacatggattctgcaaattttgatgtgtatgtacagcagtgataatggtgtcaggactaaccacttgacagtgattataagataatcacaattttataggtttttaaatgttaaaaaaacagtatggatagaaccaaagaaatatgatggtgattatggacaatctctattttctacccatttccttacttctattctaaatactgtaaattattctttatacaactgtcttcatccatttccttcttttcataatgatctggcatgcttagtttaggccgtggttatatttaggttggtatatcatttcctccagaaccttcttgcctcatagagtattttaaatcaggtttatagtttcatgaaatgtagctgatcctatggaataatgaatgtattagtcggggttattcatagaaacagaatcaatta

SEQ ID NO: 20 - DNA, 24918 bp, Homo sapiens
  source 1..24918: mol_type = other DNA
aagtgttgcgcaggcgcatccgatcgactcggtaggtggggatctcttggagacggcgacccaggcatctggggagccacagaagtcgtactcccttaaaccgtgagtttccgacggtttgttccatggcgcgggattgtgagggattaggaacgaattctggatcgtgacttcggttttctcgccgtgcagttccttttcccgccccccttcggatccctccgacctgcggcgggaaagtcgcgcgcctgcgcactaagcatctggttcggtctctggcccgagggaagccggtccttcccggctgagctcgcggccagcgctggccggcggattcccattcattcacccttctcctcctccgcccagtactcgtggccagggtcgtatcagttctccgtcaacttgcttggggccttggacgagcctcctggcgcttcctgtcagtggcgaaaaggttttctccctcagttcttttcctgacttcaaaccgcccccggcgctcggcccctcccccacgcggtcccgctggctgtgccggactggcagcctcgccgtttcccactgcgcctgctgctgcgcgggtgcccaagccgggaaattctccctgcagccccctgccggtgtttctgataggtgaaaataaagcacatggaattccttagacaaggccacagtatgccctactgtggaggtttggacacatcgtgcgtttgaaaatgtttgcccctttggggggcagtagcatgtttttagtgcgtggtttagcgagtgatctaaatttctctagtgttctaattttcacagctgctttgctccccctgtggatgtaaccccttagctggcattttgcatctcaattggcttgtgatggaggcgtctttggggattcagatggatgagccaatggctttttctccccagcgtgaccggtttcaggctgaaggctctttaaaaaaaaacgagcagaattttaaacttgcaggtacgtgtttaaatccaaagatgtacagttataaagatttttcaggcaacaattctgtgttttcaattcctctcaaaaaataagattgaatcttataaagtgaattgtatgtttctataggacagtgttaaaacagagcttcgtatgatctaaatgtaggactgaattgcgatttggaagactgtaatacaacctgttttacggttgaagttgctatggtctcagtattggtaattaagaatgcagaaatttgatgatgcccaaattaaatttctcttttgtatctgtgttcttatctctactcaccacattgccttaagcttaaatgtagaaattgacactggagatcatcacttaagtattcaaaagcagaactcacagacaaaaaaatatgaaatgtttgtagcaataataaagcaccatatctcagtgtacagcatgaaatgttctttgaccgtaaaccagaccttagggtgaataagacagggtcaagcagtgcctgctcttgtacactcgcatgtgtaccttcatttctgctctggcacaggacctgggacatagtaggtatttgttaataataaatatttgttaaatagaggaattctagttgactgtatttttttttttctgaaagggtagccagatcatctttcccatctttgtcttaagtgaattctgtgcttgtctaaaagatacttattttgaccttttgtccatatattctttataaccccaccctagaaaaatatgacatcacatactttctgctttgatggaagtcagttatcccacttacctaaacttgaaactttaatcttcagctgatgctttttatttgttccccatatcgtcacctagctttatttctttttagtaagtatggcattgtgtcttctttccattcccatttccaccacattaattaatttccttacactttgttcctgatttacaacagtttctcacctatgctgcctgcttgcacttttccattcttcagttcatcttgtatgttggtgctagaataatcttaaaatgccactttcatccagtttcatggatactgttcctcttcctttccatttttccagcagttagctgtttttttagttcatctttcccttactagtcactggacacataacacagtaacacagtcattgtagtattctttttctattgcttaggactctgcattttgtctccactgtaaaccccttggcggcagtatctcctctggtttctaaagtatgttgtgacttcagcagagtatctgaatggatgactctgaattggttctagcatcatgtttaggagaatgccactattctaatattctgaaaatctgctgggaagtaatgaatggggtgaattttattacggatttcaaaagttttgtagcgtttatgtaacagaacattggacattataatatgataaattataaaacgtgctaaaactttactcttatggttcttttttaaatatgatcttaataacagctaaagttatataaacataacttcaatagggagcaaagctgatgaggtccaggcacataacagtctagtaatctaattgggaaagtaaatcaaattagatcatgagacaggtatatgcctgcacctcatcaactttactccttattgaagttatatttttgattggatgttttatatatcttagcattcccagagcttaacagtgtccagcacatagtaggtgcttgaaaatatttgaatgaatgatttaatgtaaggatataaagtaaaatacttagtgtaatggatgaatagcatgtctctttattttgagatatttgtcagatttttataacatttttctgataaacatgattattgaaatttttgaagtaaagaaagccaaaataaagtcttttcccattattgaaatattgccactgttgacattttgttatattcctttagcctttctaggcatacataggtacattttttagaaactaaattgggatcttgttttgtttttgtttttgaaaagagaaccagaatatgggatcttatttctgatctccattttttttaatatatatcttgaatattgctcatgtagtaaatattctacaactggatttaaggtccattgcatattatattataatatattcaatcaccttttactattgaccctatagattgtttctattttttcctattaagaaaaatgctgtaatgcacaaactatctggcataatattggtcaaatgtttattctttcactgttttggcaagcttttttttttttttttgagacatggtctctctgtcacaccactgtcactggagtgcagtggtgcaattacagctcactgcagccttaactcctgcactcaagcaatcctaccccctcagcctcctgagtagcttggattacaggcatgtgccgctacactcagctaattttaaatattttttttagaaacaggatcttgctatgttgcccaggctggtctcaaactcctggcctcaagtgatcccctcctatcttggcctcccaatgcactgggattacaggtgtgagccaccatgcctggccagtaagcttttatttttttttaagtatctactatatgccaagttttaataagtgagaaagatctgttcagtgaaagaatgatgtataaactctatattgaaagtctcctccatactggtgaactctactggaaggaaggcttgcttcattctgtttgctacaatgacacccttagccatgcttctaaaatgggctatgggtaccatctttgtttgcctgggacagatctagcttacggctattgtcacaatgtaattattattcctgctgccttttcactcaagagtgtcccagtttgggcttatattatgtattatcccctagttccaggaggtataaaccagagagtacatgaagccccagaataaccatgactatatgcctagagtgtcagttttaatccatgacaagatattgaaaacgtttcatttatgtgatgaatatttattgtctgttatatacatgtacttttttaggtgctagggataaatcaaaccataaaacagaaattaacactgtggtagttagacaatagacagagagtaaacaaaagaagtaaatactgtgctcaaaagtgattaatgttactaagaaaatgtaaaagggaaggggagataggaagtattggggaaggagattgtaattttagtgagtatggttgctcatagccttctgtaacatttgagctaagacttcaaggtggtgaaggagtgacctgtgcagatatttggggaagagcattccaaacagaggaaacggcaagtacaaagaccctgaaacggcaagtacaaagaccctgagatgggagtgtgcctagcattcaagaatagcaaggaggtcattgtggctagaatggggaaggtaattggaatgaagtcaaagagagatgtaaagaggctttctaatggagtgagatgtgaaaccattagaggttttgagcacaatagtgacaaggtgacttagctttatcagaatactctgtttaaactctgtttgctatgttgcaagccgactggctactatgttacagatagactccaggctggcaaggagtgtagttaaggagactattggtatattaaaaccaacttggatatattatgcagcagaaaacaaaagtgacttaaaatgtcaaaatagaagcctagaccttcatgtataaaatagaggcatttaaataatttttagcatattatagattttcgggatcctcctccagtcctcaaagtctgtttcatttgtctgtctttagtactgttttccagcttttgacatgaatgcacttttctgctttctgctgtcatttcccacttcagaatttgaggatattgcattcactttggttgccaggaagttttactgttgtttaaaattgttgaagttgttctgaagtgacaggaaaccttaataaacattttgatttttgtaaagaggagtagatgcataataagtgagtagtggtgtggaagtacccttaatgtttctcctccctttcacatctgttctccacttgtcatttttctgcttaaaaacttcctatagctttcatgtgcattctctcttgtcttcctcagccacattctatttctattattgttattattgttattattattgagacagggtctccctcttccatcacccaggctggagtacagtggcacgatcatagtttagtaacctcaaactcctgggctcaaggtatccttctgcctcagtctctgtagctgagactacaggcccgtgttacaaagcccagctaatttttgtttgtttgtttgttttttagcttttttaagagatagggtctcaaacacctggcctcaagcagtcttcttgccttggtctcctaaagtgctgggattacaggcctgagccaccgccccaggccacattgtatttcattgtctctcagccctccccctaccctaatcatccaagccttttttttttcttgttcctgtctttacagacgtagttaatttttcctaaaatgttttcttccactttcactacttggtgaatgcttcagaacaaaacttagctgtcaactgaaggcttcctatcaccttcagaaatcctccccaacctagtagtatatacattcttttattacaggtgtcaccttgtattaagaatgataacatgtttcctttactagaccaagctcttagtggctgcatcaaatttattggttttttttacatacccattgctgagcattttttaagacagcgtttatttaaatgaattagttctagccaggtgcggcggctcacacctgtaatcccagcactttgggaggccaaggtgggcagatcacttgaggtcaggagttcaagaccagcctggccattgtggtgaaaccccgtctctactaaaaacacaaaaattagctgggcgtggtgttgcgtgcctgtaattccagctgcccatgaggctgaggcatgagaatctcttgaacgcaggaggcagaggttgcagtgagtggagattacatcactgcactccaacctgggcaacagagtgagactccatctcaaaaaagaaagaaaattagaaaatatatataatcagcaacacctctgtgaaattgggcaaatgatttaacctccctgaattgagtttccttatctgaaaaatcaggataatcattcctgctctgccaagttcacagtactgttaggaagacctcaaaagatactgcatgtgccggtgctttgaaaatgtcttaaacttatgctatatagggctagtagagcctagatactgtaataaaatctgaagacttatctagttctcttctgtatccagtagtttactgggttttgtattattgcctccccttgttttaactatgtacatttttataaagaactgatacttatttaaaagtagcaatttatctgcagtcaaggatagaggatactactggcaattgggacaaatttttaaaaatacttttttacatgcttgagagctttagtaggccttctctctgaaaatatagtgtgaatatttaatacataaaattttaccaagcctttaagattttgtatctttacgggaaatagttttcaagaacatcgcaatgtgtccttgtcatgccatctagtgatcacagcacaaattgtttagttattttaaaaatttggtgctttttcatgttgtaatctctacagtaacaatgtatctcttagtatataattccagtatagtagaaatttggtgtatttaattctgggactgtcatttttgtctgttcaagaggtgtgtgtgagttatagcaacttgatgggttttaatcttatcacaatgttattaaaacttatgtataattaattactcatattttataatttatttcattgagctttttaaattttaagaaactgtaaaatatactgtcattgattaaaactctaaatttttgtttccttgaaaggtgttaaaaaagatattgagaagctttatgaagctgtaccacagcttagtaatgtgtttaagattgaggacaaaattggagaaggtaatctggggatatgcttttactatttttacgaggtcttttttccattctattttccttttttagtcttggttttcattactatttcttattgaaaaatataccactttttagactattaagaccatagttttattactaattatggtaacagcttttctttttcaaccttaaagaaagaataaataataaatatttactgtaaaatgaagtcctgttttaatgtattatgccattgaaacagtttttacaatctatcttagaattgtttcattaacatttttaaaaaccagatattgaaaaatttaataaattgttttacaggcactttcagctctgtttatttggccacagcacagttacaagtaggacctgaagagaaaattgctctaaaacacttgattccaacaagtcatcctataagaattgcagctgaacttcagtgcctaacagtggctgggtaggcaatttaaacatattttaattgaacttgtatataatttataagattttaaagtagatatttagcagggatgaggggattatatgtgaattaaatacatttttcagtcaagtgtttgcaatttgctagcactttccttctaaccttgcaatagttagttaaatttatagtaattcttttagattggatttcccttgaggctcgacctgatttcctgtcttttatcactgctttttgtaaccttcctgccaaatcataaaccttggctttcatggtttacattattttgtaaatgtagggaactcacatttcacatttccccagctattgacgacctcatctaatattttatttagaataacagaatcatctggtatggtttctctctgctaggtcatttctgtcaacatatggacatgatttagaatcttaccctcctaaactgccctccttcttccacctgctccatcatttctttgttcccccttacagccagacttctcaaaaattatctgcatacattgttttcattccacacctctctttcactaaatacctattgcggctgttcttctctatgctaaactggaaactatagagtcaatcattactctaggcatcatttaacacaattgacgtgaacccttgtcttgacttctgtcctgccacaccctccttgttttcttcttccctcatttggcctttcattttcagtgtctttgctagctcttccacttctatctgacccctaaatattggagttcctcgtgcttgctcttaggtttctctgtattcttagtgtcctccatttccacatgatctaaagtaatgattcccaaaagtatatagttaatctcagaccttttatcttaactacaggtttgtgtatatccacctgcctatttaacatttccacttggtgcctgataaatatctcaaacctaaaagacaaacctaaaccttaacataccaaaaaaaaaaaaaaaaacaccacaacaaatgttcttatccacccgtctctgcaaatggcccatctacacacttgtttgggccagaaacctagaaatcatcctcattttctctatttctctcctaaaccacattaatcactaagtcctagccattttggctctaaagtatatctagaagttcatccatgtctttctgtcttctctgccactacctcagatgaagcctagactacgactgtagcctgcttcttccttctccccttaattctgtctttacacagcagccagaatgatctttaaaatataaaatatatatgtatataacttaaattgggtcattagttccaccacttaaaatctttcagtggtttccctatgtactttgaaaaaaaaattcaaccttctcatgcctatcttcccacctccctcactgtgctccatttctttagtttatcaaatttgtctcaagagctttcttacctcagggccactgcccagactgtttccccattcaggaagacctctcccagtcattgcttgctgacccttcatcttctgatctgagcaagagtgaaactggacgcagtagttcatgcttgtaatcccagcactttgggaggattgcttgaggccaggagtttgagacctgcctgggcaacctagcaagaacccatctttacaaaaaacttaaaaattatccaggcaaggtggcacacatctgtagtcccagctacttgggaggctgaggtaggaggatcgcttgagcccaggagtttgaggctgtaatgacctgcgatcactccattgcactccatccagcctggtcaacaaaacaagaccctgcctctgagaaaaaaaaaaaagagtgacattgcttgaaagatgtcttctctgaattaaattagattctcctatttttttttattgtcatagcatctttagatttctttcaaagcccttatcgtattctgtcattataagttaccttgttattatctgtattgtccactagatagtaaactccatgaggacagaaattctgtaaattttattcactattgcatcactaatgtctataatccctaacagcaaataacagtgccaactaaatactgaatgaatgaataagcctgtttgtttcagccttctgtgtattatagaagacaagaaaatgagatggcctctataaagaatgcttgcatacattcttgtaccctaaatatgatcatttctttttctatatttttaactgtctccctctaccactttttctttttctgtgcttaaaaaagtacatgctaaaaatgccttcatctgatcttacaatgcagtcaggcaaattgtcttcaggctcagcttccattgtgttatattttccttccttctgttttgtttcttcctttccacttaaattgctgtcttaaaaattaccagttaattattctttgcctaactaaaagccttccctcagttgttattctctttgacttccatgctaataactcttccttcaaaattcctttcttatttggctctctaacttggcttcttccaagctcagttttcttttctcgctattaattttcatgtctgtaggtatcacttctctgcaggtactctcactgacttctcacttgtcttctcacttaaggcttagtcccttgtctagataactctatcaaaatgatgaggtctggttttagatgcttcttttactggcttctctactcattttttggtatctctattgttttcttactcaggctcaaaatcatagaaatcacctttgtcctattttcctcttttatgaagcagtgtaacatagtgattaagaacatatatctggagcaaaatgcctgggttcaaatcctggctcattgatctattagtttagtgaccttgatttatttattactgttaccatcttatctgctaagtcttattaatcttttcccttttttctcattctgctgcttccccagtcacaactataattacctcgtttgaattattatagtaacttcaaaactggtgccatttttgttttaaaagaaaactttaacacgagaacacaagtcacttgtgtttatattatgtgatgatgatttaagtcagttttctagcaatatgtatgcattgctaaaattgcggtttttaaaattaggcataaagtttcagtccctctgacctttcttctaaaagttccttgtgcatttttccactagggggcaagataatgtcatgggagttaaatactgctttaggaagaatgatcatgtagttattgctatgccatatctggagcatgagtcgtttttggtaggttttaatatttcttgaatttttattagctaaatatttaattgcaaacaatatttgtaactcatttcatttgtaactttgttttaggacattctgaattctctttcctttcaagaagtacgggaatatatgcttaatctgttcaaagctttgaaacgcattcatcagtttggtattgttcaccgtgatgttaagcccagcaattttttatataataggcgcctgaaaaagtaagtatgaagagttactagaaaatatttatcctatttcttttaaaaaacaattttattgtctatatttaaggtattgaacatgatgttatatatagtacaaaagttactattgtgaagcaaatatttatctcagttacccatcttatttttgtttttacggcaagagcagctaaaatttactcatttagtatgaatctcatatacagtacagttttattacctgtaatcttcagagtgtgcattaggtctagatttatttatcctacatatctgctactttgtatcctctgacttatatctcttagatataatataacatactgcaatagccatgcacagattatttctgtttcagtttctttgtgattggaaagggaaatttggtgatgaagaagataaaattgtattagtggaataatgtacattattagatgtactatggttcagtggaaatagcatgaactaacagacttagagtctaataatttttgaccttagacatgtctcttatctctggacttcatttttcttttctagtaagtgaggggattggaccacatgatagccaatttcctgttttaacacaaaagttttatttttatgtatactttttaatgctgattataattatagagaaattataagctaaaaataacataaatacctctatataatggatcatattaaacataataatattataacttcttttttgagcttttatatgcctgactttttaattttctttaattggatcagattttaaaaccatgattttaatttttttaagctttcttaactagaaattatctgctatgatgccatctctgccaccatcagagaacaacggactgtgtttatgttatgtattcctcttctgccttattaacacagaccactggaaaaagaaaatttgattgtgggacaactcttaattttcaatcctggttagctgttaaattcttactttgtctggaaaacttatttttttttcttttttccagaatgttataaattcctaattgatcccaaaaagaattacagtttttatgaggatggtttgagagtattacaatgttactaagctttaattgctacagataagtaaaaatgcttaattttgtctcttaggtatgccttggtagactttggtttggcccaaggaacccatgatacgaaaatagagcttcttaaatttgtccagtctgaagctcagcaggaaaggtgttcacaaaacaaatcccacataatcacaggaaacaagattccactgagtggcccagtacctaaggagctggatcagcagtccaccacaaaagcttctgttaaaagaccctacacaaatgcacaaattcagattaaacaaggaaaagacggaaaggttctatctcttttatttcttaagtaccgacactgttttagaaatatactccttcaaccaacagagggagatagaatactaggatagtacttataatttaaaaaacttttttttgcatttgttatatgtattcatttgattaaattttcactaagatttgtactgaatcattttggttactattttaaaactaaaatttactttgtcagtttataacatctgtcattaactattatgaaatcatattttatgacaaaaatggaaaatattaaattttccctgcatgttaaaaagttcagattaattatcctttttaaaagaaagcattagttataggggaggaattctgaagtgtctatctccattttagctgcacagcaaaatgtaacatccatgcaggtggtttttgaatttttttttagttatatatatttgtggactatgataacattgtatgggtgttgagttctgtctagactattttctcctttcacagaagtggtttggtgcctgagaatgacttggatgcagctgtttttgtttcatctcacttaactctttcaaaactatggcagagtacagctggcagaaagtgttacagatataatccttattttccttgtttttgttggtattgtaggagggatctgtaggcctttctgtccagcgctctgtttttggagaaagaaatttcaatatacacagctccatttcacatgagagccctgcagtgaaagtaagtaatgtagcttaatagcataatggtcagtcagtcatacactgaagagaatttaggtaataactagattaacatttattatcagaaatttttttaaactagagtttggctttggcagaaggtattactgctttaagcatttagtcaaaacttgttttctccagtttttttctgaacttttctggtggaattttttctcatttttggttagctattactgtctttctctagaggaacatttagaacattaagggctttctgtcattgctagagtgtgagctccatacagttagctaactattctgacacatagttgatagtgtaaagatgtttgtaaagttaacaaaatcatcatcaatgtagatgatttcagattgacttatgatatcttgtgacagctagacagcatgagcaacaaattaaaactgtgattttagccaacgtacttgtgcagtttacagttctgaaatggagttagacactagaacataactgttttatacttctgtaatatatcaggaaaagttctaataaagtataactcaaatattggccaagctaggactaattagtaaattttaatataaggtgactttacagaaaaacccaagaagaccttaaacattttaatagacaacagtttatttacagtccaatagccattcagcagtttttaaagttatgcttccgctattgctttttgccatactagcattttaggacatcatgtttaatatcatgaaaatagaaaaatgagacttttcttttacagctcatgaagcagtcaaagactgtggatgtactgtctagaaagttagcaacaaaaaagaaggctatttctacaaaagttatgaatagtgctgtgatgaggaaaactgccagttcttgcccagctagcctgacctgtgactgctatgcaacagataaagtttgtagtatttgcctttcaaggtaatgtgttttgatggtgttataaaatcaccagcatgctgccattagaaattgcattgacttgggtggataattttgtgagtgcaagggatcagttcagatcagtgaactgcaatgggccttgatgcagagcagtagtatgttgaagagcaaatgataacagttttcatatattatttatttaatatggatatactctggaaaacacatttgctcttatatgcaaataagtgggacggggtggcttttagaagcttagaatcacacattttgattgctgatgtagtcttttctgttttctctttttattcccgcttatgtggagtaaccagaaccaaatagtagagctcctcttttactcccacctccaactctttgactcataaatttcttcctttccttcaaggcttggctttcataaagcctttcttgattaactcaaatatataagtgtatctgtgatcaattactccaaacaaatgaatttttatacctgtgaattgctattgggttctattttttctattatggctcttattatccactactgctttttattcttggaggttattttaaacctttctggagtaagtccggggaactagtagagggggtaaaaaacagaagaagaaaaatctaggatttttatcacactagattatcatttactttatagtaacacttattatataggtatcaaggcaaaatttactgtgaactaaattgatgaatgttattttttagacttacatagttcaactttaacataactagagaaatcttatttcatcataaggcgtcagcaggttgcccctagggcaggtacaccaggattcagagcaccagaggtcttgacaaagtgccccaatcaaactacaggtatgttgtactggaaatacagaacctagttaaaatggattgttccagacgtattttattttatgatctttgtctatttataactaatatttgagttcttctgcttttaattatgtaagcagttcttgcagtgtggcattcctatttttgagctaatgctattctttatgaaagtttttaatcctaatgttgcctctctttttttgtttaaacagtttattccatagattacattttgcgtatttatttacaagatgatcttaccatcttgtaaataaatacgcaaaatgtaatctgtggaattttgctgacatcacctttgtgggggaaaaaattatgtttaatagtttttgccagccaaagacttaaagcattttatttgcttgcttaatacctcaaaagtttcctgtgatgtagatatatttgtgtttgattaaaattacttttgttattatataaacaatataatagcagttagaaggttttgaaaaagaaaaatgtcttccgtaatctaaaaacttaccatggagctggaatccaggaaacatcttgaatgaatagatgaatcctgctattcacttggattatgggctttgaagaaatgtattcattcattgaatgtctgttcttgcttgctaatgataacaaataaataaatgagaccatctgttcacactctagtcaggacaccatcaaataattataaaataacctgttgagtatggtaataaaacttattcagggtatttaaggagtatctaactatcctaacccaaagagattatgaaaggcaattcatgaaagaaatgacctcttagaatgtaaattgggctgagaagttagcatagaggcatgagccaaggaactcaagaaacagcatacaggaaactaaaaaagtttcattttggccagacgcggtggctcatgcctgtaatcccagcactttcggaggctgagatgggcggatcacctgagatcaggagtttgaaaccagcctgaccaacatggtgaaaccccatctctactaaaaatacaaaaatcagctgggtgtggtggtgcgcacctgtaatcccagctactcaggaggctgaggcaagagaatcacttgaacgcaggaggcggaagttgcagtgagccaagatcgcaccattgccctccaacctgggcgacagcaagacttcatctcaaaaaaaaaagtccaattttgctagaatattaagatgcaagttgaggaatggtgagagataaacctggaatgaggtagacaaggtcagaccacagttgttacagtttggactatatactgtagatattggaaagttaagtgaaaaaagtgacaatggtatatcctagatggatcattctggcaggcgtgcaaacagattagcttttggagagtggtggcatgaatttgtccgggtgagaggatgaaaatgtgaatgagggtattggtaataggaatgaaaagaaaagtgaagggttagaaaggcagagcttggtggataattggatgtagaattagggtgtggtatggtgagggaaaaaggcattcaggatgtttaccagattcctagcttgggagacttggatgtgtaccagtaaccaaggtggagagtaaaggagaagtaactggtttataggggaaggtaaggttagtttggggtataattggtttgaggtatttgtgggacatccaaatagagatttccagcagaatcaaagttaagtctgatgctcagcgaaggagctgggctagaaatacagatgaatgtcatcattatataaatgacagttgaagccatgaagtggatggaccaatcagggagagtatacagagggagaagttaaaactctgaggaatatccgtcagcacttaaggcttggagaaaacattgaaggagcaggcagaggtaccaaaggagctaagaaaggcaagtagggccgggcacagtggctcatgcctataataccagcactttgggaggccaaggcaggcagatcactaggtcaggagttcgagatcagcctggccaatatggcgaaatcccgtctctactaaaaagtacaaaaaattagcagggcatggtggcacacacctgtagttccagctactggggaggctgaggcaggagaattgaacccgggaggcagaggttacagtgagccaagatcgcaccattgcactccagcctgagcaacagagtgagactcagtctcaaaaaaaaaaaaaaaaaaaaaaaggtgatacagtagcccaaggaacagagagcagataacctggtgatactaggaagtcaacaattaagagagatgtcaactttaagaaaaaaaaaaaagagctttttaacatcaagttgagctagtcgtaatctttaactaccagaattcagaagattaaagtttctatagtgggaatgtaaattagtacaaccactatggaaaacaatttggacgttcctcaaaaaactaaaaatagagctactacatgatccaacaatcccactgctgggtatatacccaaaagaaaggaaatcaatgtaccgaagaggtatctgcactcccatgtttgttgaagcactattcataatagccaaaatttgaaagcgacctaagtgtccgtcaacagatgaatggataaagaaaatgtggtacttacacacaatggaagtactattcagccacgaaaaagaagatcttgtcatttgcaacaacatggatggaactggagatcattatgtcaggtgaaataagccaggcaccgaaagacaagagttgcatgttctcactaatttgtgggatctaaaaattaaaacaattgaacccatagagagcagaaagatggttaccagaggctgagaagggtggtgggagggtgtgggggatgtggggacagctgatgggtacaaaaaatagttataaagaatgaattatccagcactttgggaggccaaggcaggtggattgcttgagctcaggcactcgagaccagcttgggcaacatggtagaaccctatttctaccaaaaatacaaaaaagtagctggatgtggtagtgtgcatctgtggtcccagctactcaggaggctgaggtgggaggatcacttgagcctgggaggcggaggttgcagtgagccgagatcacactaccacactctagcctgggtaacagagccagaccccatctcgaaaaaaaaaaaaaaagaatgaattaagacctagtatttgatagcacagcagggggattatagtcagtaatttaattgtgcagtttaaaataactaaaagagtactttgaggggctgaggcaggcagatcacttgagcccaggagcttgagaccagcctggccaatgtggcaaaacctcgtctctactaaaaatacaaaaaaaaaaaaaaaaaaaaaaaaaagagctgggcatggtgacatgcctgtaatcccagctactcaagaggctgaagcatgagaattgcttgaacctgggaggcagagattgcagtgagctgagactgtgccactgcactctagtctgggccacagagggagaccttgtctcaaaaagaaaaaaagaaaagaatataattggattgttcgtaacacaaaggataaatgcttgagggaatggataccctgttttccaggatgtgattattacacactgcatgcctgtatcaaaacatcttatataccccatcaatatatacacctactgtgtactcagaaaaattaaagtcttcacagtcacaaaaaaataaaaaagtaattttttaaaagtttctatagcagtagttggtgctagtgtcagctgaagaagagcttctaatgttcattacttttcactaaaatgaaagcactttgaccagtatggtatgtaattctcaaggatcattcagattttttcccacatagctatttttggattccttttgatcctataaaatgtgcgtttacttagtgtttcctagtgattaaatatccttttaaatttaccaacacgttgctcaagaaagaaaacatattttgcagtgaggattctcagtcctggttgtacattaaaatcacctgaggaacttttttaaaacattgatgcctgagccctacttcagaactgttcaatcaaaatctttgggtctgggcatctgaaatttttaaggctcccaaggtgattctaatgcataataaatgttgaggactattgatttagatgataaaattatagatttgaaatttatttttaaaatttgtcttctgttgcagcaattgacatgtggtctgcaggtgtcatatttctttctttgcttagtggacgatatccattttataaagcaagtgatgatttaactgctttggcccaaattatgacaattaggggatccagagaaactatccaagctgctaaaacttttggtaagcagttttgtattatagaaccaaacaaaatgcctttgattatctcctacaaatcacttaataaattattgtgaaattttctttacaaataaacattcagtcttgataaagttctctaatattaagtagaaaattcttcagttgcttgaaaataaatttatcacctctctatacatataatcatttaatcttattaagcacaaagtaatacactgttgcagtatttaaagtttacctttataattttataagaataaggagtaaaatcttaactccttttagttatggtttgacttttattacataaatttaccttttattaaaggcatgttttactttgtaatatgttttacttttttattgtcttttaaacatcagatgcactatgtcttggtacttagagtgtccttgccttaaatgatcttaggctatactaacaagtaaacagttaattattaatacagtgtaataaggactagggaagagaatggaaatgtgtgttgtcaggttgtgtaggtttacggtagcagagaagcagaatgcatagaaggccttaactgatgggatattattgtaagcatatattggacttggatgtcatctccttagccacgcaagttcttcaagactgggatgtgcagtgtacttcatagggcacataagaattatctcagccttgctctggccaacaatctgaactcaagtgcccatttaatgtttattttccacgctcagttatagttaatactttccaaggaataagtgggattgactcagcttactaccatacaatacagaacacctcaggagacaaagtttcagccagcctacctcaagagtagctgggctgtcttgtgctcaaccccaggatcagtgggtcttaaccagagttgcatgtcagaattatctgagaatctttaagaaatacatatgcctgcccactcagcctattcttggaaaatatgattcagaaaaacaagatacttaggaaggctccagccttgttagtttgaaaaagcaagtgattctgactaagaaactatgggtgtttaagaaccactgcaaaaattactgcccttgcttatgcactagtgctatagtctaatctacaagaaaaacttagtggtggttgtgaagaaagcctcatcttaatagaggcttgccaaaatatgtttctacagtaaagtcagtccacgatttgtaactatcttgtacttattgtaagaaaattttatttgaagataataggatgaaataatacaagggaaaaaaagtgaccatgagtggaaagcaagattgatatcttagaaatggcattcttacataataatataacaagtatgtttattctcaactgagaaaactttcatctactattgaataacttcgtgagaggtttatgaacatgaagtttatcagccaataccaacatattttattgaagagcttgaatctcccccattgtaatccaagttataatcagggccaacaatggaaatacaacatctgacccaaaaatactctagatcaagtgccatgatagcaagcaagagcttttagagatttatcattgtaatacttctcatattaaaaaaaaaatagggccagccgtggtgactcacacctgtaatcccagcactttgagaggcttaggtgggcagatcatgaggtcaggagaccgagaccatcctggccaacgtggtgaaaccccatctctattaaaaacacaaaaattagttgggcatggtagcatgcacttgtagtcccagctactcgggaggctgaggcaggagaaccagctgaacctgggagatggaggttgcagtgagccaagattgcaccactgcactccagcctgacgacagagcaagactctgtctcaaaaaaacaaataataaaaataatgccataggacttgtctcagttgtattagtatgacatctgtagttattttagtcttgatcttactataactttggactgagtataaaagcctcaaaatttcaacaaacacaactgtgttcccctttgtaacctaaagaaatgacttggctgagattagcagtgagagcacctttacttctcttatctgtcctcaacccttaaacctggctccattgtgggttgtcattaagtactcagtgaattgtgttgaataaattaaaaagaaaagtcttgagctgaaacaaattcctgacacatagtagtctgtaataaaatatgttgactgatagtgttacttgaagttatttttcctgaatattgtaaatgaaccctctttttggtcatataaaaaaaagcatattgtataacttggggacatgctataacatatactattagttattttatgacttcagaacaagctaataaaggaataaaactatatgaatattcccccctggctataattttctagagagaataggaatgatagaatcagtttaaaagtaaaaaagcattggcatattgtactctcaaagaatttggtcttcagtaattgtttgtttcctccctttccctcccccatttttttccctggcttagtacaccagtccagtagttagttcagaatatgtaaaggtaactttttatcatccacagtcagattaatgactttgttgacaatctacattctcagaaaggcatctaaatgttgtggtacttgttgtttcgtacatttagtatatttctgtttaataaggaaatgtaaggcaaaaataatacatgattgccatttgtgtgattaacttttttttgcacatctgataataaacccatcaggaagttatttcaaatacatttatatttttaaaaacagatctagtttgtttatttgttcattcagaaacatttattggggctttatgtgtgccaagtactattgcgagtctctgctttcacagagcttaaattctagtgagggagagaacataaataaatactatgagaaatgagtggtactgagataaaaggaaaaggggagggaagaggcttatttaggataggttggtcaagaacagcatctctaaggatgtatgtgtcatttgaacagttgttgaaaagaataatgcctttttgtctagtccaacagacattaactgactacctaatctgtaccaggcataggctgggtttggggggttcaaagataaataagacagttcctgccttcaaagagctcagtctactaggtgggacagacatatataggatagcaaaagtaatagtagaactctcaagatacagtagaaactgaaattgatcagttctctctgagggtgtcaagcctcagaggtgattcttgatctgagtggtgatgtcagtgagagtgtcctgggcacacaaggggtgcagggcatcctaggcaaagacaggagtcatgtagtcaaagacatagaagcatggaaaggaagtagagtgggggcgtgggagctgcagctagttaaagattatagaagggtaagatgaagcttgagaaattggcagagtcaagtgagtgcctggcatagcttagtaagtcactgctttgtacttactatctcccactttatctcccactatgcaattcaaatacaacttaaatatagcatgtggtgctctatctcatactgtgtgtgtgtgtgtgtgtgtgtgtgtgtgtccatgtctataaagcatatgtttgaactttcatgtttctcatgagagaggcttctgatatattcaaataataaaatgtttttttctgtttttgttttttcttcttttgcttttagggaaatcaatattatgtagcaaagaagttccagcacaagacttgagaaaactctgtgagagactcaggggtatggattctagcactcccaagttaacaagtgatatacaagggcatgcttctcatcaaccagctatttcagagaagactgaccataaagcttcttgcctcgttcaaacacctccaggacaatactcagggaattcatttaaaaagggggatagtaatagctgtgagcattgttttgatgagtataataccaatttagaaggctggaatgaggtacctgatgaagcttatgacctgcttgataaacttctagatctaaatccagcttcaagaataacagcagaagaagctttgttgcatccattttttaaagatatgagcttgtgataatggatcttcatttaatgtttactgttatgaggtagaataaaaaagaatactttgtaatagccacaagttcttgtttagagaccagagcaggattaataatttattttaacattttagtgtttggtggcacattctaaaatatagattaagaatacttaaaatgcctgggatagttcttgggactaacaacatgatcttctttgagttaaacctacctaagtagattttaggtgggttcctattaggtcagatttttagcttccctaattacctttcactgacatatacagaaaaaggagcagttttagttttaattaattaaaattaacagatgtgatgaggattaaatgaatcaaaagacttaatttgtagattcttttagagttatgagctaggtatagtttggggaaactcaacctggtgctggtgctcttaacaattttgtaaataaagaagataatttccttttctagaggtacatattaggccttttatgaacactaaaacaatgaggaaatgttggtcatggggcaaagtatcacttaaaattgaattcatccatttttaaaaaacacttcatgaaagcattctggtgtgaattgccatttttttcttactggcttctcaattttcttccttctctgcccctacctaaaacattctcctcggaaattacatggtgctgaccacaaagtttctggatgttttattaaatattgtacgtgtttacagttgggaatttaaaataatacatacactggttgataaagggaagctgcaggaccaaggtgaagattgatagtccaaatgcttttcttttttgagttgtatattttttcacaccatcttagatataattaggtagctgctgaaaggaaaagtgaatacagaattgacggtattattggagatttttcctctgcgtagagccatccagatctctgtatcctgttttgactaagtcttaggtgggttgggaagacagataatgaagtaggcaaagagaaaaggacccaagatagaggtttatattcagaaatggtatatatcaatgacagcatatcaaacttcctatgggaaaaagtctggtgggtggtcagctgacagatttcccatttagtagtcatagaatacagaaatagtttagggacatgtattcattttgttattttgagcattgataggtcagtatatctacctaatctgtttggtaagtataggatatataaaccattaccattgatctgtcttatgccataatcttaaaaaaaatttgaatgctcttgaatttgtatattcaataaagttatccttttatatttttta

SEQ ID NO: 21 - DNA, 32744 bp, Homo sapiens
  source 1..32744: mol_type = other DNA
acgcgtagcgcggggcggggccagaagagcgggctaagacgccggaggaggtggcggcggctgggagaggcgagggttctggccggtaagtggagttgtggagaggttcagggtggccagggctcgcggttggccgtgagccgcggcggacttggtgctgcgggccgactaggccacgcgaggtggtggagcctgcccacctaggcgagcaggaatcggaagacatggcttcctctgatgcagcccgcacgcgcgctggggtgttcactcgccttccagcgcgctgccctgaggaccgggctgactcgcgcccctactgagggcttggggccgagccttgccgccaggagaagcgatggtctcctcctgaaggccgccgttgtcttgtctccgtgtgatacagtgatttcactagctggattgatcactttggggactgcaactcctagagagaaatggaatggagggcatctgaatcttcaccccctatagataagcttgtgttgcaccccaatttttgtgaggtgagacattaaaaatgaaaaatcccctgatgattagaattttgatttcaggtccaccttttggaaattttttttcagaaaagaagtgctttgctttttaaaagccctttagttcgtatatgcctcgcctcttgggagtgctcgagaggttttttttgtttttttttccttcaaagtagctttcaaaactatgctcctagaaaacttaaaacatgcaataagggcttctaaaaaaacactttattttcttaggcaaacatactaagattcagtaataacatttcaactttaaaactttacattttctcctagcatgctattggaccaaaaaacacaacaacaaaaactttccattttctttattgtatttactaataatttatcacactgaaacataacttttgaatacttaagtgtaatatcacggatagttaacagtgtgttttgtatttgtagattttagcatcgaaactaggagaaataagaatggctgtagaggaacttcagtctataataaagagatgtgtaagtattaatttttgtaaaattaaatacctttcaaaatatgggaagggcacagattgtttttaattatatttgtggtcactcaaattgtttatcttctttaatccttgctttttttgacctgtaaagagcatgagtgggggaggcagattggattatttctccaggtgacatacttatctaaataaccttttacattttaatcctgatccttttcatagatttcactggtacagtagatttcaaggtcacttattaaagtatttattagggtaatcctaattttgatacgtgtgttatttacgttacatttatctagaatttaaacagatttccttttttcatagataaatcaagaagttattgtatttaatttttatttgcatatacttttttttgtttgttttttgggttttttttttttttgccagcaaatcctagaagagcaagactttaaagaagaggattttggcctatttcagttagctgggcaaagatgcatagaagaagggcacacagaccagctattagaaattattcaaaatgaaaagaataaggtgcgtacaatcttggtgtttacttttcagtcttgggaagagaataatcacatgatgctattcatccagtcatttatccatcaaacatttaagaatctacttaaattttcacagtagggaactgaaaacaaaaaaagaattagaaatatttaggccaggcgcagtggctcacgttcgtaatcacagcgttatgggaggccaaggcaggcagatcacttgagcccaggagtttgagaccagcctgggcaacagagtaagaccctgtctcagaaaaaaaaaaaaaaaaaagaaaagaaacagtcatatacttgaaggtttttaccatctggtcaaacataaacatgtaaacaactaacaataatgaggcaaaataaataattgctatagttgaagtaaagagtttttagaagaaacagaattacttctggtttagggagtccaaaaatggtgtttgagtcattaatttacaatgagaaatatacatatcaagcaggctaaatattcattttgggtgatcagcccattctcctccagccaaatgtgtatggaaaaccaaattttaattaaaacagtattttatgtgcatagaatcagaacaggaggaaaacgatatgtcattatactagccagtatcatccagttacaatggtttgagaaatcatcctccacaatggaaaaggatcttatttgtggatcaggaataactttttcctgggacactgtgttggcaacatcctgccaaattttgtgtctttggatactccttataaggaagacggctatggtttggctctgtgtccccacccagatctcaccttgaattgtaataatccctgtgtgtcaaggatgggaccaggtggaggtgattgaatcatgggggtggtttccccatgcttctcatgatagggagtgagttctcaccaggtctgatggttttataaccatctggcatttcccctgttggcactcagtccctctcctgctgccctgtgaagaggtgccttccgccatgattgttaagtttcctgaggcctccctagccatgtggaactgcatgtcaattaaacctcttttctttctaaattacccaggcttgggtattttttcatagcagcatgagaacagactaatacaaagaccatcttccttctaggtacacactctttcttcatttgcagtgctacttatttattagaagttttctttcttgatatcacagtgtaatcatgttgatctgtgtttctctccagggcatcttgattggatttgggggattcctaaaactttttaatcatatattattataacatctcttagtcagtagttcaaatggcttatacccttcttattttttattaaaataggacattttatttagtttttgatacatgtttatgataactttgtaacctccaatataataaatcttatgttttttaaactcttcttgatttttttctaattgcgttctcaggataaccttctaaagtacttagctttcagctaataataaaaaaattaataacaactaatatttattgcatgtttacatgtaccagatgctgtctttagtcctttacatttattaacttaattagtctctccaaaatctcagaaggtaggtgttcattttgtaactgaaaagttaaatgacttgcccaaaagtaagtcagcttttatgtaacatccaagattcagacctgtgtagcatggttttggagctcctaaccactctgctctacctctggttagtgctgtatggcgtatggttttagggtagaatacaggggattgcttgattgagagggagaggcatcaaaaatgactgggtttctagcctctaaaaggataacatatgatatcaaacagaaaaaggcaacctaagtagagggaaaagttttctgaaggaacaagtgagttgacttttagaaattttgagtttaagtacagcagtcaattggaaaataaggttttgagctcagtagagatagaggaattaagatgtagatctctgagacacatatctgtgagactttaattacctaaagattgggtaattgaagcattgaggagtgaaaaaaaaaaacaagaatttacctgagttcacataaaaggggcagaagagaagaggcccaagatcccatcttgaagaatttaagaaacaggtagagagaagaggcctgccaaggagatgaggatcagcaccacatcagtgaggcagaaggaaaagggaagtataaacaaagtatttttcaggcattgcatgccttagcgttttatttttagcatgcttctgaatagctaatgggatagatttaaacatgtgaggcttagtcttaatagtttgagaatcacctttgcaatatgtggtcagctaaatgcaaaggtttagatattgataagacaatgttcaaaactgactacaggctgggcacagtggttcatgcctataatcccagcactttgggaggccgaggcgggtggatcacctaaggtcaggagttcgagaccagcctggccaacatggtgaaaccctgtctccactaaaaatgcaaaaattagctgggcgtgatggtgcgcccctgtaatcccagctactcgggagactgagatggggggattgcttgaacccaggaggtggaggctgcagtgagccaagatcgtaccactgcactccagcctgggaaacagtgagaccccatctcaacaacaacaacaacaaaaaactgactacaatttaattttcttgccaggtgacactatcaaaattgaccaagatttactattatcttcacctataagactgaattaaagaaaaaaaataaaaataaaaagatttactatttactgctttgtgagagaccattcacatactatttattacagtatattataattgttgtagttattgttaatctcataaattaaactttgtcacagatatgcatgtatagtatttatatatagtgtttggtactattcatggtttcaggcatccactgggggtcctggaatgtaccccctgcagataagtggggagactactgtatcgtatactctatttttattatcttacaagactggggtcaagatgaggtattataggtgtcattttgtcttcttcctagatcagattttttttaaaaaaattctaatttttgtgggtacatagaaggcatatatattgatgggtacatgagatgttttgatatagacatgcaatgtgtaataagaatatcatagagaatggggtatccatcccctcaagcatttatcctctgtgttacaaacaaaccaattatactcatttactttaaaatgtacaattagttattgactatagtcaccctgttgtgctatcaaatagtaggtcttattcattacttataacttttttttttttttttggtacccattagccatcttccctgcctcccactaccattttcagcctctggtaaccatcctcctactctctacgtccgtgagttcagttgttttggttttcagatcccacaaaaaagtgagaacgttcaatgtttttctgtgcctgacttctttcacttaacataatggtctacagtcccatccatgttattgcaaatgacaggatgtcattcatttttgtggccaaatagtactccattgtgtatgtgtaccacattttctttatccattcatctgttgatggacacttaggttgcttccatatctgagatattgtaaatagtgctgcaatgaacatgggagtgcaaatatctcttcaatatagtgatatcctttcttttgggtatatacccagcagtgggattgctggatcatatggtagctctatttttgtattttttgaggaactgccaaactgttctcattaatggttgtagtaatttacattcctaccaacaatatctaaaaaaaaaaatacaaaaaattagccgggagtggtggcgggcacctgtagccccagctacttgggaggctgagacaggagaatgacgtgaacccaggaggtggagcttgcagtgagctgagatcgcgacaatacatgtcgcgacaatatatgagggtttccttttctccacatccttgccagcatttgttattgactgtcttttgtatataagccattttaactggggtgagatgatatcccattgtagttttgatttgcatttctctgatgataatgatgcgtaccttttcatatgcttgtttgccatttgtatgccttttgggaaatgtctattcaaatcttttgccaattttttaatcggattattagattttttcctttagtgttgtttgagcttcttttctattctggttattaatctcttgtcagatgggttagatctgctttttcattatttatatatttttttgagatagggtctgtctctgtcacccaggctggtttgcagtggtgtgatcacaactcactgctacctcgcctcccaggctcaagccatcctcccactcatcctcccaagtagctggggctacaagcgtgtgccaccagacccagctaatttttgtattttatacacagggtttggccgtgttgcccaggctggtcttgaactcctgagctcaagtgatccacccacctcagcctcccaaagtgttgggattacaggcatgagccaccatgcttaaaaaaaaaaaaaaaaagaaaagaaaagacggggtgcggtggctcacgcctgtaatcccagcactttgggaggctgaggtgggcggatcacgaggtcaggagatcgagaccatcctggctaacatggtgaaaccccatctctactaaaaaaaaaaaaaaaaaaggcaaaaaattagccaggcatggtggcgggtgcctgtagccccagctacttggggggctgagacaggagaatgacatgaacccaggaagcagagcttgcagtgagctgggacagcgccactgcactccagcctgggcgacagagcgagactcagtttcaaaataaataaataaataagaatgtatttaactttaaaaaacagagacagggtctcactaggttgcccaggctggtctcaaactcctgggctcaagtgatcctcctgcctcagcctcctaaggtgctgggattagagacatgagccactgcacccagccaaccaccgtgcttttaaagaaggactctaggagggtagtgatcttatccagtgtgttcctcactttatttctaacctctagaatattatagtgtaggcttggtaaatactgatgagttaaaatacaaagcaggccagagaagtggaatacattgttgatcctttgagaattagtggttttgataatgaatgtgaattagtcattataaagataaacttttacttgtatggtaagcattctgaaatatctttgaacatagaagccacttgtatgtaggagagaaaattaatgaagttgtatcccttcttttttttataaattacaaggattatatttagagactccaagaactttaaaaggtacatgagcattggctggatttctttatgaataaggggagcaaaattgtctgtggaagttaagtacctgtattaagcaaattaactcttttgttggaaatagaggcactatttaaatcttgggaaacaccaacttgcctgataaaaagtaaagacccttttgcctttcctcagggaacatattaaaaactatttaaaaatgttgatgtctgttagtagccaaccctggaaagtctctggtgaaatgtcataggcttcacttgtctcatcttcctatttcagaaacaattctgagctcttccaagataggaaagcacactgcgagagtcctatagatggcagtgtttgctttactctgaaaatgtttttacaggtcatcatcaagaatatgggctggaatctcgttggtcctgttgttcgatgccttttgtgtaaagataaagaggatagtaaaagaaaagtttattttttgatctttgatttattggtaaaggtaagttaacaaaacaaggttctctttatcataacacacagcagtattttataattccctttaatgtttattgtttggtaagaaagcttttggttcatgaaagtacatgcagaaaggaactcgttggagaaaagacccagtcttattgattggataggcaattccatttcaggatttcccaaattttctggataaaagaattgtctaacctcatattaacctcatatcggacccattgattcagcatctccagggagagacctgggaagctatatcttaacaagtagccttatcgtatagatgtggaatacaagctttagagaggtagttcaaggtcacatttatcttttggcaacattggaactagattaaaatctcagtcctctttcctttgtggtatgttccctaaaagaaaatggaaggcctagaatacaagtgattaaaattgaagtaggaatagggtagaatacagatcagttgtgactaacaaccttagaaagcgaccctgggtaaaaggctagtagagtttacagtcaatatttgatggccaagaaagataaattctgagaaaaagtatattataagaaactgtttagtgatcagtgcaaatatacccaaatatatattggaaggagagctccatctgtatgagttattgactatgggagctgggagcttttaaaaaaccagtcaagtgagatgataagatatggccagtcagaaagcaatgcaaagttttacctgttcaaaaaatacaaaagagattccagactagtctaaataggcttgcagcatgggattgaaaggtcccacctgctggagcccctgagaatctgttaaggcaatttcagagtggacaggtgaagctcaaaggaaacctgagcctaaagatccattgacttcttgctttttagttttatagttacttgaccatcacagattctgtgttttgctcatgcatattttttcaacaattgtataaataattttaatgttaagcaaaaacataattgtataatattttgtcgatacatgccttcttaaaaatagtaataatgtggctttaaatacaacttgtattaaacaggttcaattgtgaatatttttatagttatgcaatccaaaggaattattgttgggtttgcttgaactgattgaagagccctctggaaaacagatatcccaaagtattcttcttttgcttcagccattacaaacaggtaatgagaattttgatatcagagtacttcttgttgtatctctaaatgccttgatggttacctcaaaatgtcaatactacaccaaagtaaagtttacagctaattagtgagtactctgcttaaaccaataatagcaatgccaatgtgaatactgctgctcatagaaagattatagtatctggccagagtgggtacccagtaaatattctgttgaatgtcatactatttttcatgtgctatattgaaaactatacctttttgcctaaccttcctatctgctgcttaaatctagaattttctctctaaacatgtttcaagggttacctctgtggtgtctgcagtactaaatctgatagcattatggtagtctggaagagtatcaggcaaggcattgctcagcctctgctttgggaggttggattgggcatagcaaagctactactgaagaatgaaacgaggagatatgggatgataaggctccatggctgagtgcagtaacagtattggtaggtaatgggtcttagcaaccaaggcagacagtatccataggaagaggttatttttcattttaggaaattcgtttatctcacaatctgatagagggacctagaatcagaaattaaatttgttttaaatatgaatgcctgccagcttcatactacctgtaatattcagtcttctagggaaaaaaaatctaataataccacctcctatttgtgtagtgctttatagtttacaatacacttatattttgtgcttataacaacccaaaaacatggaaagaacatgtttctgtcttaagtacatagcctgttacacatagtctgttataaacataacctaaacagcatttcatggcaagatgctgtattattttatgcacaactaagaagaaaaaaacactgccaattagactgtgatgtgtcatcttgattcaagagttgttaaaatgtgggaggaggaagtgtcttataattccacatttgccgaatttcttgtcccatgtttagcatacttgatgagcgacaacttgatctctgttttagtgattcagaaacttcataacaaggcatattcaattggattagcattgtctaccctttggaatcagctatctcttcttcctgttccatactcaaaagaacaaatacaaatggatgactatggcctttgtcagtgttgcaaggccttaatagagttcactaagccttttgtggaagaagtcattgataacaaagaaaactcactggaaaatgaaaagttaaaggatgaattactgaaattgtaagtataattttaagaacatctcacagtggacttaagtaattgatagttcagttattttatgtttcttcactttgtttgacatgtaaatagaaatctagtttcagattttgaattttagaagaatgtggggttcagttgatacagcatgggaacttgagacatttatattttaaaaaattataggccgggtgtagtggctcacacatgtaatcccatcactttgggagactgaagtgagaggattgcttggggccaggagtttgagacgagccttggcaacatagtgagacccccatctctataaaaaaatttaaaaattagctagatgtagtggcatatacctgtagtgctactgcttgggaagctgaggctagaggatgggttgaatccaggagtgtgaggctgcagtgaatgatgattggccactgtactccagtctgggcaacagagcaagaccctgtctttaagaaattaattaataaaataattataaaaccaaaatccattcatttactttatattcttctttgtattgccttattcatcatagtaggtgaataatgaaagtgggggaaatagatacatgtagctcagggtgagtgtgggaaatagatataggtagctctgtggagaaattgtgttttactctttcaaaggaagcagcagaaagaccaccagacagaacatccaactggaccacaaaaatagtggtagagtatccacccaatagcattccctccatgggtactatagactaaacatctactgttcaatatggctgtagcacttgacatatggctggtccaaattcagatatactttaattataaaatatcccctggattttgaagacttgttatttaaaaaaaaaaaacagtaaaatacctcaatttttatattgataacatgttgaaatgacaatatttcagatatactgggttaagataaattattaaaatcatctctcccattcttactacttttttcatgtgtctactaaaagatcttaaattatatatggggctgtgttatatttctattggacagtgatagactagattaattacatggaccagtaatttttaaattttggctacttgggaggctgaggcaggaggatcacttgaggccaggagtacaagaccagcctgggcaacatagcaagacctcgtctctaaaaaatagaatataaaataatattttaattttggagactaatactatttttagcttcctacttgtcaggttaggacatttaaaaaaaaatttacagccagacgtggtggctcgcacctgtaatcctaacactttgggaggtcaagctgggagattgcttgagctcaggagtttgagaccagcctaggcaacatagtgagaccctgtctctacaaaaaataaaaaagttagctgggcacagtggtgtgtgcctgtagtcccagctacttgggaggctgtggcaggaggatcctttgagcccaggagtttgaggttacagtgcactattattgtgccactgtactccagcctgggtgacagacaccctgtctcaaaaaaaaagttttttaccatttataaaacccattatttcataaaagaaaaggtattttaactaaagaaataggaaaggcttaatcacagaataaagtttggttttctaaataaaacaaatagagctgtgtgaaaaaatgactgtatttcttgattttttctttgaactaatgaaaacaacatcatagactagcaccagccctcaaacattcagaattcaatggaatagttcagatgtagaagtcagtcttagcatgttgagtctagcaaggtgttctcatgttctccccattactagtacgaacgacgttacatcaccagttttatagaccattgagttattgatgcttgtcttaatccatttgtgctgatataacagaatacctaagactgggtgatttataatgaacagaaattcattggttcacagttctggaggctgggaagtctgcaattaaggcgctggcatctggcaagggccttctagctgtgtcataatgtggctgaaggtaaaagggcaaaaggcaaaagtgggctgaacttgcccttttataacagcattaatctcatccgtgagagtggagcccccttggcctaattcccacctccttatggcagttaaatttcaacatgagttttggagagcagagtcattcaaaccatagcagtgcttatgttatttttcaagtaaaattaacttagatttgaagacctagggattttatacttggaagtgttgatttcatagttacctatttcttatgccttagttgtttcaaaagcttgaaatgccctttgctgacagcacaattctttgaacagtctgaagaaggtggaaatgatcctttcaggtattttgcatcagaaataatagtaagtacagctaatttaatctgctataatcttaaatgttatcccactatattctcagtactgcacatgtaaattgatacattcattaataaagaaatgtgtattttttgtagaacacacataaacaaaagatggaaaataaaacagcaataattttattatccaaagataaatattaacatcctccaggcttttttcttatatacttatttataataatacatatatataaatttttcaaagattttatatatatatataatcttgtaatctacctttttcctcttcaacagtatattatgaatatttttccattggcttaatagtgttccatggtatggacttagtataatgtatttcacctgtgccatatagttcaacatttggattgtttctaattttccattattgtaggacaactccaagttttctttttttaactgttaagtctatgataagtaacctagtaattaaatttttgcatacttttcaaattatttccttaaaactcctagagtggaaattccatgccctgtgataaatattttcaaaatagctccatatttaagtaaattttattttaaaagcaatttggctttatgcatcaatagtattttaaaatgtgctcagattctgtattagagaaataatctgaaatattaaaaaatttattttaagttgatgtttctgaatttcaaaagagaaagtccatgtggctgtgtagttttcttcagccatgttcagctacatgagtgcaggtgcagcataggagtaacatttggttgaattagggtggggttttaagaacagggtaagttgtagagagcaagaggggggcaagggattgagcatgtatgtaaggtgatttctttttcaattatactttaagttctagggtacatgtgcacaacgtgcaggtttgttacataggtatacatgtgccatgttggtttgctgcacccatcaactcatcatttacattaggtatttgtcctaatgctatccctcccccagccccccacgccccaaccagccatggtgtgtgatgttccccaccctgtgtccatgtgttctcattgttcaactcctaccaatgagtaagaacctgcggtgtttggttttctgttcttgtgatagtttgcttagaatggtggtttccagcttcatccatgtccctgcaaaggacatgaactcatcctttttaatggctgcatagtattccatggtatatatgtgccacattttcttaatctagtctatcattgatggacatttgggttggttccaagtctttgctattgtgagtagtgctgcaagaaacacacatgtgcatgtgtctttatcatagaatgatttataatcctttgggtatatacccagtattgggatggctgggtcaaatggtatttctagttctagatccttgaggaatcgccacactgtcttccacaatggttgaactaatttacactcccaccaacagtgtaaaagcgttcctatttctccacatcctctccagcatctgttgtttcctgactttttaatgatcaccattctaactggcgtgagatggtatctcactggttttgatttgcatttctctgatgaccagtgatgatgagcattttttcatgtctgttggctgtataaatgtcttcttttgagaagtgtctgttcatatcctttgcctactttttgatgggattttttttttcttgtaaatttgtttaagttctttgtagattctggatattagccctttgtgagatgggtagattgcaaagatttttctcccattctgtaggttgcctgttcactctgatgatactttcttttgctgtgcagaagctctttagtttaattaatcccatttgtctattttggcttttgttgacattccttttggtgttttaatcatgaagtccttgcccatgcctatgtcctgaatggtattgcctaggttttcttttagggtttttatggtgttaagtcttacatttaagtctttaatccatcttgagttaatttttgcataaggtgtaaggaagggatccagtttcagctttctacatatggctagccagttttcccagcaccatttattaaatagggaatcctttccccattgcttgtttttgtcaggtttgtcaaagatcagatggttgtagatgtgtagtgttatttctgaggcctctgttctgttccattggtctgtatatctgtttcggtaccagtaccaatctgttttggttactgtgtccttgtagtatagtttgaagtcaggtagcttgatgcctccagctttgttcttttggcttaggattgtcttggctatacgggctcttttttggttccatatcaactttaaaatagttttttccaattctgtgaagaaagtcagtggtagcttgatggggatagcattgaatctgtaaattactttgggcagtatgaccactttcatgatattgattcttcctattcatgagcatggaatgttcttccatttgtttgtgtcctcttttattttgttgaacagtggtttgtagttctccttgaagaggtccttcacatcccgtgtaagttggattcctagctattttattctctttgtagtaattgtgaatgggaattcactcatgatttggctctctgtttgtctattattggtgtataggaatgcttgtgatttttgcacattgattttgtatcctgagactttgctgaagttgcttagcagcttaaggagattttgggctgagacgatggggttttctaaatatacaatcatgtcatctgcaaacagagacaatttgacttcctcttttcctaatcaaataccctttatttctttctcttgcctgattgccctagccagaacttccaacactgtgttgaataggagtggtgagagagggcttccttgtcttgtgccatttttcaaagggaatgcttccaattttttgcctattcagtatgatattggctgtgggtttgtcataaaagctcttattattttgagatacgttccatcaatacctagtttattgagagtttttagcatgaagggctgttgagttttatccaaggccttttctgcatctattaagataatcatgtggtttttgtcattggttctgtttatgtgatagattacgtttattgatttgcatatgttgaaccggccttgcatcccagggaagaagccgacttgattgtggcgcataagatttttgatgtgctgctggattcggtattttattgaggattttctcatcgatgttcatcaaggatattgccctaaaattctctttttttgttgtgtctctgccaggctttggtatcaggatgatgccggcctcctaaaatgagttagggaggattccctctttttctattgattggaatagtttcagaaggaatggtaccatctcctctttgtacctctggtagaattcggctgtgaatctgtctggtcctcgactttttttggttggtaggctattaattattgcctcaatttcagaacctgttattggtctattcagagattcaacttcttttaggtttagtcttgggagggtgtatgtgtctgggaatttacccatttcttctagattttctagtttatttgcatagaggtgtttatactattctctgatggtagtttgtatttctgtgggatcagtggtgatatcccctttatcattttttattgcatctatttgattcttctctcttttcttctttattaatcttgctagaggtctatgtattttgttgatcttttcaaaaaagcagctcctggattcattgattttttttgaagggttttttgtgtctctatctccttcagttctgccctgatcttagttatttcttgccttctgctagcttttgaatttgtttgctcttgcttttccaattcttttaattgtgatgttaggatgtcaattttagctctttcctgctttcttttgtgggcatttagtgctataaatttccctctactcactgctttaaatgtgtcccagagattctggtatattgtgtctttgttctcattggtttcaaagaacatctttgtttctgccttcatttcgttatgtacccagtagtcattcaggagcaggttgttcagtttccatgtagttgtgcagttttgagtgagtttctgaatcctgagttctaatttgattgcactgtggtctgagatacagtttgttgtgatttctgttcttttacatttgctgagtagtattttactaccaattatatggtcaattttagaataagtgcgatatggtgctgagaagaatgtatattctgttgatttggtgtggagagttctgtagatgtctattaggtccacttgttccagagctgagttcaagtcctggatatccttgttaaccttctgtctcattgttctgtgtaatattgacagtggggtgttaaagtctcccattattatcgtgtgggagtctaagtatctttgtaggtctctaaggacttgctttataaacctgggtgctcctgtattgggtgcatatatatttaggatagttagctcttcttgttgaatttatccctttaccattatgtagtggccttctttgtctcttttgatctttgctggtttaaagtctgttttatcagagactaggattgcaacccttgcttttttttttttgctttccatttgcttggtagatctttctccacccctttattttgagcccatgtgcatctttgcatgtgagatgggtctcctgaatacagcacaccaatgggttttgactctttattcaatttgccagtctgtgtcttttaattggagcatttagcccatttacatttaaagttaatattgttatgtttgaatttgatcatgtcattatgatgatagctggttattttttctgttaattgatgcagtttcttcatagtgtcactggtctttaccatttggcatgtttttgcagtagctggtaccggtcgttcctattcatgtttagtaaatccttcaggagcttttgtaaggcaggcctggtggtgacaaaaatctctcaccatttgcttgtctgtaaaggattttatttctccttcacttatgcagcttagtttggctggatatgaaattctgggttgaaaattcttttctttaagaatgttgaattttggcccccactctcttctggcttgtagggtttctgctgagagatctgctgttagtctgatgggcttccttttgtgggtaacctgacctttctctctggctgcccttaacagtttttccttcacttccaccttggtgaatctgacaattatgtgtcttggggttgctcttctcaaggagtatctttgtggtgttctctgtatttcctgaatttgaatgttggcctgccttgctaggttatggaagttctcctggataatatcctgaagagtgttttctaactttgttccattctccctgtcactttccggtgcaccaatcaaacatagatttggtcttttcacatagtcccatatttcttggaggctttgttcgtttctttgcactcttttttctctaatcttgtcttcttgctttatttcattaattggatcttcagtcactgataccctttcttccacttgatcaaatcggctattgaagcttgtgcatgcgtcatgaagttctcgtgccatggttttcagctccatcaggtcatttaagtgcttctctacactgtttattctagttagctatttgtcttaccttttttccaggtttttatcctccttgtgatgggttagaacatgctcctttagctcggagaagtttgttattaccgaccttccgaagcctacttctgtcaactcatcaaactcattctccgtccagttttgttcccttgctggtgaggagctgtgatcctttgaaagagcagaggcgctctgttttttggaattttcagcttttctgctctggtttctccccatctttgtggttttatctacctttggtctttgatgttggtgacctacagatggggttttggtgtagatgtcctttctgttgatgttgatgctattcctttctgtttgttagttttccttctaacagacctctcagctgcaggtatgttggagtttgctagaggtccactccagaccctgtttgcatgggtatcaccagtggaggctgcagaagagcaaatattgctgcctgatccttcctctggaagctttgtcccagaggggcacccgcctgtttgaggtgtctgtcggccccctactggcaggtgtttcccaatcacgctacgcgggggtcagggacccgcttgaggaggcagtctgtctattatcggagctcgaatgctatgctgagagaaccactgctctcttcagagctgtcagacagggatgtttaagtctgcagaagctgtctgctgccttttgttctactgtgccgtccccagaggtagaatctatagaggcagtaggccttgctgagttgcggtgggctccgcccagtttgtgcttccaggcctctttgtttacactgtgagctactcaagcctcagcaatggcggacaccccttcccgtctagctgcagcctcgcaggtcgatctcagactgctgcgctagcagtgcgcaaggctctgtgggtgtgggacccaccaagccaggcatggcagggtatctcctggtctgccggttgctaagactatgggaatagcacagtatttggtcaggagtgtactgtttctccagaaacagtctgtcacggcttcccttggctaggaaggggaaattcgctgacccctcgcacttcccgggtgaggcaatgccccgccctgcctcagcttgccctccgtgggctgcacccactgtccaaccagtcccagtgaggtgaaccaggtacctcagttggaaatgcagaaatcactggtcttctgcgtcgatctcgctgggagctgcagacctgagctgttcctatttggccatcttggaagtgactcctttttttttttttttttttttgtgacagagtctcgctctgttgcccaggctgtcgttcaatggcatgatctcagctcactgcaacctccacctcctaggttcaagcaattctcctgcctcagcctcccaagtagctgggattacaggcacccgccaccacacctggctaattttttgtatttttagtagagttggggtttcgccatgttggccaagctggtctcaaactcctgacctcacgtgatccacccgcctcagcctcccaaagtgcagggattacaggcgtgagccactgtgcccagccgcaaggtgattttaatgtacaaagtgactttaatgatggacatagaatttaagctgggtaaggagtaaagttaggacatgcaagagacagtgaaaaggtgattggatcattaggttgtagaacctggtgtgggtgacagatgtttggagttaggttactaaaaggggtgaactgaaaaaataggtgtaaagaataggatgcttgaaaatagtattatggaaagattatagttactagtatcaatgtctggggtgtgaccatgagagggtgttctaaaggagaggatagaggcaaaggtcattgggctagagaaaatgaaatacttgagatttcagagtatcagaagatctttggttgtacatttaaatcacacagaattataatgttggaaagccatgtgatggggtgaccttggggtctactaactgcaacaaggaggggtagaaatggtaaagtcataaaaaatgagtttcagagttgagggatttttagagaggatggggagagaatggtgtagaagcagcaaggagaacagatgtattcccaggctcagtggtacaatgggtatagatgaaaaatacagtagtcttttgaagggttgcagagaaagcagctgttttcagatgagagccaattttaatttaggagagatggaaaaaggggtcagatgaagggatgctagaagtttatgggaataaattctgaagatgagagatgacttggtgactgatataattaggaatacataatttaataaggttaatgctgatggtcacgataatagtgaagaggctgtgagggatgaagtaggagaggtgacgggttttctctggagcacacaaaagtctgggggctcttcattgttaccagtgctagagcacagtatcatcttctggaggtagtataagcaccatcacatatgatatgtattttgagaagacaactatgaaagttggaaactattaaaggaaatctggtgatgtagaaaaaccaaactcagtttctcctactatagtcataacaagtttctgacaccagatgtatggagttccctgccctgccccctgcccttcacggcaagcaagcaagcagttgtacaacggacaccaattgggtgtcctctaattcaattccaacgttacctacctggagatagtgtcagatttcacaggttgagggctaaatacctcaagactgcccccccttccaatgccagtctcaagccctaggatgttttacctgtgctctaactgactggcaataaatcaggattcccaggaccccctccttgggtttgattaatttgctagattggcttacagaactcagggcactgcttacttacatttagtggtttactataaagaatattaccaaggatacagatgaagagatgcatagggctaggtataggggagggggcaccaagtttccataccctgcctggatgcaccaccctactggaaacttcgtgcgttcagcttccagaagctttctgaatccaatcattttgggtttttatggaggcttcattatgtaggaatgattgattacatcattgaccgttggtaatcaacttaatattcagcccctttcccttactggggtgggatgggggtagggctgtgggactgaaaggtccagccttctaatcacagggttggttcccttggcaaccagctcccatcctgaggctatccaggagacgcagctatcagtcaactcaatagcataaagacacttatcactttggagattccaaggattttaggagttatatcccaggaagtgggaacaaagagcaaatatatatgtcacagtatcacagatgttaaatctgggagtgatgtaatcaaactgtgtttaggattcatcactttaaaggaagatgactaactgggataaaattggaagtagggaagccttgggagttaagtaagcaatgatgggagcctgagtatagatgtatggatattttttgtttgtttcctttttttaattgactaaatttatgacacattctgttagtagggatatagttttaaagatgaagaaagggcagatttgagaactttatagtaggtaaaattggcaaaatttggtcattgattggatttagaataaaacatggatgagggtttttgcttggataactgggcagatgaaggtgccaatacttgagatagagaatacagagcaagaatctgggggtcttgtgcctttaaaacaaatgtattgtaaaaatttacaaacattcagaaaagtactaaaaataatctagcacatgcccatgtacccatcacccagcttcaataattatgaacattttgccaattttgttttatctgtcctcctccttttcttgctgtagtataacaagtcctaaacataattcatctgtaagtctttaaggatgcttccctaatgacaagggcttttttaaaaaaacaaataaccaccaggctattatgacacctaacaagattttattaccttttgttaaaattttttgagacagggtttcactcccattgcccaagctggagtgaagaggcatgatgtcggctcactgaaacctctgcctcccggactcaagcagttctcctgcctcagcctcccaagtagctgggactgcaggcacacatcgtcccacctggccaatttttgtattttgggtagagatggggtttcaccatgttacccaggctggtctcgaactcctgggctcaagcgatctggctgcctttggcctcccaaagtactgggattacaggcgagagccactgttcccagcctaactcctaacaagattaacaataattttttaatatatatctaataaccagagagagaataggtttttaaggaatttaaaatataatattttaatatgtaaatatatgtatatttaatatagaattatatgtaaatgtgtatatatattttttgagatagggtcttgctctgtggcctaggctggagtgcagtggcacaaccatggctcactgcagcctcaacctcccaggctcaagtgatccttccacctcagcctcctgagtagctgggacttacaggcataccccagcatgcctggctaatttaaaatttttgttttgtaaaggtgaagtctcactatgttgtacagactggtcttgaactcctgggctcaagtgatcctcccaccttggcttcccaaagtgctggaattacaggtctgagccaccatacctggccaggagatactttgaatgagagggggtgagattacctaaagaggtgacaagagaaaagggctcaggagtgaactctagagagtaccagcacttaaaatgagcccaagaaggaagtcggaagtggtagaaatacacagaaactggtgtagtagagttttagaaggatagaggtgatcagtactgttaaatgcatagaggtatgctgaaaagcatctgtaggatttaggaagtaagatggcattggtaatcttagcaagaacagtgtaagtacagtgttggagacaaatcagagtggagttgataaaagaatgaatgacagatgagaaaaaggagatgactagtgtaagctattctttaaaagaggttggatgaataaggaaggagaggtaatagctagaagacatgagctaagggtaggaaggtaatggaggtgggaagacttgagcatgtttatagctgttggggtgcaaactgttgagggaaaaatacaagtgtttatgagataactgaaataatgtggcttatgagcaaatggctggacatagtatcaaggccataaggaaagtcctagacaggaagaactagtgggtatcaaggtaagaaaacatgttgagaaatttgtagcaggaatggaatcttacaattgaggggagtcaaacccactggcctcagatttctaggtgaaggagagatgatctcttaataatgaggaggtagaaatgggcattgagtaaaagggcttaaggaaactggtaaaggtttggaatactgaggggaaaggaaagagatggtggaagaccacggaagcatgagtcagtagtactgagcactcaatggtgcttggaaaccacaactatagtggtaacagtctgtatttttttatccagcaatactcagctccctgtgtgtagaagcagagaaggtagattgcagttatttttccaaggctggcattttactgggtagatactgctgaaggaaatacagggtgcagatagttcagctggtcaataatccatgattcaggttggatagggaaagaaggggggttaggagggaatgcctaggtaggtcaaaatgtaggaatcacaggactggagaagtcagaagtagaaaagcagattgctaggagagacaggatgacagattttggtcagaaaatgggatattggagtttaaagtatcaaatacagaatagttccagatgttcagagatccagcatgggattaggtactgaaatggattagaactaaaagtcactagaatttagaaattgagaaccatgagagtggatgcaatgacttgttgcttgattgaaaaataaattaataataataaaggaccatgagactagcctgttataggggttatctccatgaacattgaattttcccaggatcatagcaggaattgggtagagaaaaagattatgagaaggtgccagagtcttcagtgaatgtcaggaaattaccaggaagtcagcatatgacagagaaaaggacagtatgttatctgcatcaaaggaaaatgtgcttttgttgaaaagtacagaaaaagccaatactacaatactgtgctaagcccctacctgtactcctctacccaacagctgcattccaggccctgtggtataaaaggtgtgagaatgagcatctcccaccagaaatcagacaggtttagttaaagcagtgaggcagaacaagcatcctatgaagagactgaggatgtaggtgagtggttctaaaatctcagtagaaggaacattgcaagtagaaagagccagcagtaaggatgcacgtagcagtctagaagtagaggtgagaccagcttggagatgaaatgaggagatgtcttctgttctgtgctggagaagtactggtaagtgtggtgtggttgggattcacaggcctcagccatcctcactttggtacaagttattttggtacagaactactagaatgtcccaaaggctgtagtacaggaacatttctgaaaggacaaaagctgccatgaatattgagaaattgtatggtgccaggtacagcctggatctgagcaagactgctggatggtgtgtggatagatagtgaaggcccagatttgggaacagattggatctcagatatccagagcagcactgtagaatctagttgcatataataatgttttaaaaagggtatcttaggctgggcacggtagctcccgcttgtaggcccaggcctttgggaggccaaggtgggcagatcacttaagcccaggagttcaagaccagcctgggctgcatggcgaaaccccatctctataaaaaataaaaaaaataaaaaaaaaatagcgggcatggtggcatgtaccagtagtcctagctactcaggagactgaggagggtggattgcttgagcctggggaagtcaaggctgcagtaagccatgatcatgccactacactccagcctgagtgacagagtgagaccttgtcgccaaaaaaaaaaaaaaaaaaaacagggctaccttactctggaaaaaacacatgtagcattggctgaataaagaaatggagcttcatgattaaggacatttggaatcagagtgcaataaactttttgtcttgtagctataaccagaatgcatggctttgaaaatcactgcagcagtatatatttagcatctggtcgctgaatagcagtctcttgtgactgaggatgattttccatggttcctttttgtattctgaaatgactaatggaaccatctgggatcagcagattttaagtccctgaaggctggaaaagacttatacttggctttataattccccacaaagtcaggcccagcaccttgcacttaagtgtttattgaataaaagagtgacttgtgtggaagttattcattctgctttagctgtttttgtcattcattcccttttaactcttgtagtttgttgtgactttaactttcttacgctttttttgtggagctgctcgataaatatttgacataggtattatgtcattttatggctcatccagtgtcacacaagtagtaaatggtagagccaaaactcaaaatcaatgtcagtggattctgaaggtaggtgctttctggtacgctagaattagtaccagtataagaggcataggagtgatcttgtttcctgagcggaaagctttatttagccctgtggtcctacccactcatgcaaggatgcttctctttctcgtctcacatgagaaccctgatgactgagagatcaacagtgtttcctcaggcccagctgccctgcccagcgttcctgcatcccactctctacaggcacaatgttagtggagcattgttcctagagtattcttcatcttagttgctttacccttgcttcatatatttgtatgtctcacgtttcagattgctctcaaatatccctgaagcacttttttaaaaaaaattgtggtgaaatatacataaaattcatcattttaaactttttaaactatgattctgaattaatttagaatacttctgatgtataaaatgctatgtaaaatacgattttgctgttggcttctgtattagtttttcattgctgtataacaaattcctgcaaacttagcagtttaaaacagcatacctttgttatctcacagtttctatggatcaggagtccagccacagcttaattgggtcctctgctcagggtctcattgggctacaggccagttgttgactgggtctgtagtcttatcagaagcttaactggggaaagatccactttcaggtttcctccgctggcagaattcatttcctctaagctgtaggactgaggtccccattttcttgctggctgtcagccagggaccacatttagcttctaggagctgcctgtagttggtcccttgccatgtagttctgtccatgagccttctcataacatggcagcttagttctttaaagccagcaagggagagagtcagagagcaaagtttctgactctcagggaaggcctggaccccctttaaaaatatacctgattaagttagggccacccaactcaaaatctactgatttgggaccttaattacatctgcaaaaaccccttcacttttgtcatataatctaatcatgggagtgacatcttggcgcattctgttggttgaaagcaagtctcataggtcccactcacgctcaaagggagtgattacacctccccttggtgagaatgtggagtttgaatacacggggtggggggcattttagagtctgtgtgctatggtttccttttttatccatttcatagggttttttatcagcaattggacaccctttccccaaaatgatttttaatcatggaaggaaaaagagaacttggaattaccttgaatttgaagaagaagaaaataaacagttagcagactcaatggcttctctggcatatctagtatttgtacagggcatccatattgatcagcttccaatggtcttaaggtaagagttagtgtttggtttattcatgtattctaaaaggaatttcataaaattctcatttatctaatgtccaatatatgcatattaacacactaatacattttaaataaatagtaaaggctatttttaataagaatgatcccagctataatctgttaaagatagcagtagacaagtaatgaaagtggggagtgttgaaataggtgtaagggaatggtggggacaagaatcagaagatgataaacagggcttggttttgaagcttttgagaccaccctggaactagccaggtacccaggggtatcatcatcttttcactggattactgctgtaatcctgagtggatttatatatctacttttacttccttttaatttaacacattctcaacataccagaaagcgaagccttaaaagaagtcccttactgaaaaccctccagtggctttttattgctttaagaataaagtcttaatgcctttgcataacttctgagacaaacttgtgcctggtctggtccctgcttaattgacctgattcatctcctaccacctttcctcttgtttactatgctccagtgacacagaccttcttttgtttctagtttaaatgttatgaattttcctatttggcctttgtatatgcttaaaattctctttatccttaaatgtcactttctgaagaaagccttcactcaccacccaatttaggttgaatccttctattataattaccttgaccttgtcttcttttcccacaatgtttattaaaattatttttaaaatatataattttataatgtaatatcttctggactttgagttctatgataataaggattgtgtatttgtcttataggcattgggtatttgtgtgagtttgtgcatttatatatgaatatagctaggagtacattcgtatgtaaatgttgaaatactggctatcatttgcatgttcaccatgtatgaaacattatgctaataactttatatgcattatctcatccttataataagcctgtgaaatagagcattctctcattttacagatgaaaataacaggcttagacaagttaatataccactgaagatctaactactttgtggcataggtgggatgcagatagctctgtctgaccccagagcctatactcttaagcatcacattctatcaccaaaataacttatacagcatatgtatattaacttgctagggctcctgtaaaaaagtgctaccaactggatggttgaaataacagaaatagtttgtctcatagttctggatgctccttctgagggttgtgaaggagaatcttctccatgcctctctcctggcttctggtgatttgctcacaatctttgatggtctttggcttgtagatgcattatcctgttctctgccttcatgttcgtatgctgttctccctgtgtgcttgtgtctgtctccaaactttccttttacataaggacaacagtcatattggattagggcccaccctaataatctcattttaaattgattacctccataaccctatctccaaataaggtcaaattctgaggtactagaggttaggactccaacatatcttttttgggggagatacaattcaacccataacaatatgtatgtgtgtacatatctctgtgtgtgtgtataatatatatatttgttttgtttctattttagcccattgtaccttttgcagtttaatatggggcacattgaagtctttttgcaaaggtaagatcgtttagatggtatctcaaaatgaaatagtagtgttaaaatagtccttgttaagatcagcggagactgccttttctttgctaagctctaattaattaattggttattttataaaacagcgaggcaaataattcacgagagagacagaaatgagtcaaggaggttttacaccaaagtctgttttattttaaacttaagacagtattaagattttgtcttaagggcttttacagtcatctgtttctaaggtttcttctcttactccaaaagttggtaaattaaaacacctctaccccactgcatcctcctccatcttaaggaagggcagtcaataaaagaagttcttccgtatttttccttcatggacacagtctgtgaattgcatcaaaaggaaggaggtgtcttgacttccaccttttataatttagattattgacagtgatgtcattcaattacaacttttctcatttgaggtgctaagcagcaggactttctatttaaaaaaaaaaaaaaaaagccaggcacggtggctcacgcctataatcccagcactttgggagaccaaggcgagaggattgcttgaccccaggagttcgaaaccagtctctctctctacaaaaaatagaaaaaattagccaggagtggtggcgcctgcccgttgtcccagctacttgggaggttgaggtgaaagaatcacctgtgcctgggaggtctgggctgcagtgagcagagatcatgccactgcagtccagcctgggcaacagagtaagaccctgtcgcaaaagaaaaaaaaaaaaaaaaggaaattacagagtaacaggtatacataatttctagacagaaattaaagaatttcacagaactatatgctttgttttctttcactataacatgtaacatgtttaaattatcccctgagatcagttagggctttgcaattatcctctatgaacactagtgacagtttatcagtcccatctcttaccaggtgaaggaagatttgtaacatggcaatgtccaaagcttcagcatacaaggcaggaatttccaagggtctcctggcacaagtagttactaattctgtaaatttgctgtattatgtatgttttaatgattttatattcattacatttagtttctgttattcatacagtgataatatgtattgttttgaatctaagtcctaaattcttgagatttccaaactgcagagtcattgagtctttttttgaataaaaagaattggaaagattttacagaataatcaactggaatatatagcattggttatatcaggtttagttagtttcttagcacttgctgttgaagatctattgttttgaagttaggaaataatccctgagtagatttattttggtcagatttagtggccttagccaaaccgaaagacagatcaaagatggattaaaacttttgatcaagttcttcaacagaatttctccttaatgatatgcattttaaaagtgttaaaatttcagtttttgctgtatttttcataagatgaagtatcattctaaaatagtttacaaattcatgataaattttaatattatttttcagaacagaagagtctgttatctccaaaggattggtaagatgtttgttcccattataacttaaatacatagttatgtcaacaaataacagctgttgacttcactatatatgtatctgcatatattttaatctgtaggagctgctggagaatagtttattgagaatagaagacaatagtctactttaccagtacttagaaatcaagagttttcttactgtacctcaggtaaataaaatatgtattctaatattgaaaatagccctttgcctgttctgaacttaaagtaaggtcttttctgattcctttcccactcttttctctgcaacctttgaaaactctggtgtaatgctgtccagtagaactttgacaatatgaaagccactagccaaactgaacacttgaaatgtgactaaggaactattttttttttttttgaggtgtagtcttgctgtgtcgcccaggttggagtgcagtggtgctatctcagctcactgcaagctccacctcctgggttcattccattctcctgcctcagcctcccgagtagctgggactacaggcgcccgccaccacacccagctaatatttttgtatttatagtagagacggagtttcactgtgttagccaggatggtctcgatctcctgacttcgtgatcagcctgcctcagccccccaaagtgctgggattacaggtgtgagccaccacacccagccggaactaagtttcaaatttaaattttaatttatttaaacacgaatagctattagaggccaccattattgatagcacagcatccagtagaaaagcataactttcttcttttaacactttatttctgtagggatcttggaaaatgaagcttctttatgtttctcataactcaagttctcaggactccatctaaggcatccactgactcattaccagaaagactaatacacattgtgtttttccctcctatggtttattttgcccaatcctctttgttagttatgatatccaaggaaatccttagatttcagtgtgggaactggttttcctaatatttaaatagaaaaacatggtttttgttaacatattgtttgattgtttttaattaataaattatatttctgtagatttgatttcattttcttgccactgtagacataattgaaaattatcgtttgcttttaaaagtacactgtgtgacactctactcaatatcacttaaaaaatcaattgtagttagctttctggaatggaaggcttagggaaaaattaatttacttcacttttaaatctcctaccctcacttctctgaatttttagtatcctattgatgtattatagttgtttgtttgcagtcagtataatctgtttacatctgaattttacatttttttatttccagggcttagtgaaagtaatgacactttgccccattgagacactggtatgtaaatatttggtgactaaagaataatgagttacagtgagaaaatttgacaaataatttaattttctttttaaaaattttaatttgtgaaatttttatttaggaggtacaagtgtggatgtattacatgcataaaatggatagtgatgaagtctgggtaagctttattcattttatataataatattgtttgttccattttagaggaaaaagagtttagctatgcttcagctgtatattaacaagttggattcacaaggcaaatatacattatttaggtatgtatcaagcatggctaattgctaagtgtgtggttgattaaaagtcatgttaatgccatgtaattgttttagggcatagtatgtcggtatgttttacatgtaattcaactctggttggaacccatattataaattctcagtgatggctag

SEQ ID NO: 22 - DNA, 32744 bp, Homo sapiens
  source 1..32744: mol_type = other DNA
cggcgtcttagcccgctcttctggccccgccccgcgctacgcgtagggaggcggggcctcggggcgagacgccggagcgtgtccccgtccggcagactactctcccccatggcggacttcgctgggccgtcttctgccggccgcaaggccggggctccccgctgctctcgaaaagccgcaggtaggagcaaggatctcttcccacttttggaccctgaaagctgggccccgatctcgagttatagaccgcagcgcgcgggcgctcctgaaaggctgcttcaggggaggggttctcccaggtagagtaggccgaaagcttcccaccgccgtccgcacctcctgggaaagatttcctggccgcccctcacccctttacgccagtgttccaagatttccctcacgcggactgtggccccagcctctgagacaaaggacagtggaggccccgggaacccaggcctggggtccccgggtttcggggcaagtgactagggcagcgttggcagctggccttgaacctaggaccggtcctcctttccagattgcttgggtgcccagttctttaaggtgccggactcccctcttcccccagagaggacgtttggcagacggagagaggtttcccctaaaagtacccagatctcagattttcaggagtggttaattaagcaactatgatacagaagaaaattcaatccccaaagagatacattttaaccaagaaaaattagacagtaatcaatttgcaaaaacaaattgctctcccttcctatttcattttgatttacacacgattggacataaaatatgtggaaaagaagaaaaggtggtctacagtttgttatttgtgtaggaatctatcttgtacctaatgtgtttgtgtagacctgacctactgccaccatgtgtagcttaactgcggggatgcattttgagaaataagttgttagtcgatttcatccttgtgtgaccatcatcgagtgcacttacacaaacctagatggtacagcctacttacacactaggctatatggtacagcctattgctcccaggctacaaacctgcacagcatgttactgtactaagtactgtaggcaactgtatatctaaacatagaaaaggtacagtaaaaatacagtattttaatcttatgagaccgctgtctgtatgctgtccgtcgtttacggaaatgtcattatgtagcacatgactgtatttttattgtaggtactaaacagacaagtactttgaaacaagaagatgcttctaaaaggtatgacagctacatggacaactacattggcatatctacttatcttgtattacttgtaccaattttaaaacaataatggttacctttttttttttagagaaaattatcatgagagggaagggaaagatctgggaaggcctataaattctcacatagactgttacattcctctactccaggctttaagaaaaccaaactaagcactcagactgctagtgaaggaatgagtgtctgtagaaggtgtttgtttttcaccgcttcaggtacactctccttttattgctttatatgccagagactcactctccaagtttcgctgtcactccaagaaaccttttctgttctttgttacatcaagtccagattttcattaaaaagctgtcttgtactagttctggttctaaaaaggcaagatattaccacatatcacacagagtttctagaagaggagtagaatgtgaaggggattaaaagcatatgtagctatgatttttattttgtgaagactcactaatcttatattggctttggtcttaatttactcattctttcaaaaattatttattgagtataagatatgtcggacctgtgttaggctctgaagatatggtgaacagaatagacacagttcttgcctagtggaacagaggaataaataataataaattaattagttaattaacataaacaaatacataattacaaattgtgataagcactatgaaggaaaagactgtgatgttacgagaaggaataacgaagtctaatttagttggaggtgggtggcagggaggttggctgtgagttttcagcgaaagccttatgctgagacctgcgtgctaagtagacattaaccatacaaagagtatataaagacttatgtatgtgcagtgcaaaaagtagcttgtttcctttttgaaaagtattggatcaaaagtaacagcattagaaaacagaaatttggccggatgtggtggcttatgccggtgatcccagcactttgggaggctgaggtgggagtgttgcttgaggccaggagctcgagaccagtttgagcaacatagtgagaccttgtctctacaattaaaaagaaataaatatttttattcaaaaaattttttaaatatatttaaatttaagtggcaaaatagtgagttaggttagtattgtattttaaaacatggaatgttggacatgaagcttttaagtagattaagtttctctttcaaattttaggaaagctgaactagaagcagctgtgagaaagaagattgaatttgagagaaaagctctacatattgttgaacagcttttagaggagaatattacagaagagttcctaatggagtgtgtatgtgttaagttgacaaattattagttttgtagtataacatctttaaatctgtgcagcatgaaacttctttgcattattagaatctttgaatttgttctgagtcattagatgcagataacaatccatataattcatgcatttaaaaataaacaactatcatgcattccttgtataatgactttaaaatgcactaatgaaaaataagtacgtaacaaggtgatgacacgtaatgtatatttcaaaattaataagagtggatttcaaatgttctcaccacaaagaaatgataaatatgtgaggtgatagatatgttaattagcctgatttgctcaatgtatacatgtgttaaaacatcacatactaccccacaaatatatacaattattattgtcaattaaaaagcaaaagaggccaggcacaatggctcatgtaatcccagcactttgggaggctaaggcaggcggatcacttgaggtcaggagttcgagaccagcctggccaacatggtgaaacctcgtttctactaaaaatacaaaattagccaggtgtggctcatgcctgtaatcccagctgctcaggaggctgaggcatgagaatcacttgaactcaggaggcagacgttgcagtgagctgagatcacaccactgcactccagtctgggcaacaagagtgagactctgtctcaaaataagtatataaataataaatgggaaaaaagaaaaatgaggatgggggagaaaaaaaaaaaaagaaaaagcaaatatattttacccttagtcatagttcttttaaccagtctgctaatatcacttgattttcttcaatttgttctaatgattgcaattccagttttctatattctgtgttgtgttattttaagtaacagaagaatattatttttgtcaatgtaatttcatcaattttcttatttcaaaaacctgaaatacagctcatttatgactcaacataaaacgggagaattaaattccgcattaaatttttttttttttttttttttttttttttgagacggagcctcactctgtcgcccaggctggagtgcagtggcgggatctctgctcactgcaagctccgcctcccgtgttcacgccattctcctgcctcagcctcccgagtagctgggactgggcgcccaccattacgcccggctaatttttttgtatttttagtagagatgggatttcactgtgttagccaggatggtctcgatttcctaacctcgtgatccgcccgcgtcggcctcccaaagtgctgggattacaggcatgagccactgctctcggcccgcattaatttttttttggccaggcacgatggctcatacctgtaatcccagcactttgggaagccaaggcggtaggatcgcttgagcccaggagtttgagaccagtctggacaacacagcgagaccctgtctaaataaaaatttgagaataaaaaaattttgaaacagctttactacattaaaattttgaatggaaatttctctttatatttttgtaatccttaagagggcaaattaaaactcaaagcttctattacaaaaacacttcttagtgtagttgatagatctttttctaaacaggaatatgaacatgacaattcatatttttattgacacaggtaactgcatcagaatctgcatatttgatgacaccagaaaagacaaaggcaaatatgcttcatttgaaacataaaacttacatcactctcaataaaaagtatttctgtctctgtgaaaacagaaaaacttgttaaaagatctcaaagttatgaacaagaatcaaaattatttgatcatgaagatgtcaaaggaaaatatttgatgttagcttataaccatcacctcaccactctgtacagatttttcagaagtaggaaaattttgcacaaactgtgttctgcagtaacaatgacacttttgaaatactttgtttttaaagattatgctttaaaaaataggtaaaattatattttattattttgtgatttagttaattttttaaataatactttttcaaaaataaaagatactgttgtcatttagcttgtgtatagctatagcatcacttcttcctcatgcctcagaattatttcatttaactatataatctacaaagatgcagagactactgtggcagaaatttttttaataataactttttttttgaatgctcactatatgttgagcacttctctaagtgattttgctttattttctcctctaattctaacctctaacttatgaggaaggtactattgctatccctgtgttttcagataagattgatgaggcttagagagctgataaatgaacttttctattaaactaggaggaaataaccctctcatttcattttaggggaggttcattacacctgctcactacagtgatgtcgtggatgaacgttctattgtcaaactctgtggttatcctttatgtcagaagaagctgggaattgtaagtaactcattttttttaaaatataggcttttattattttcatttagcaaaatactttgttgtaagaataagaaataaaacctaaggtcatgaactaaaggcatggattggccaatgatatgatatgtagatgacttaatcttgtaacataacgttcatgtttattatttggattcttttgtaagctgtactttcttttctttaggtaccaaaacagaaatataaaatttctaccaaaaccaataaagtctatgatattactgaaagaaaggtgagtttaaaggctttcattgtggcaattaattttttttctttactaaccactatcctaacaaggcatggcaattaatttttaatgatattaaataggattctaaaagaaactttaaaatcttactggttagaaaatagtgatgttaaaagtttgattttatttgtaaatatttcaatcaaggtattaaaaatttttttgcttaagcttcaattaagacttgaacatttaaaagtgcatattggcacaaatctgggcaaataaatcatggaacagaatagagagtcagcagcagactaaccacatatgtagacacttgatatatgacagcgggagtattgtagatcagtagagaaaggatggatttttcaataaattatactggcacaattagttatgcaaatggaaaaaattaaaattgatgcctatctcagtctctatacatagatcaattttaggtagattaaagacataaatgtaaaaggtagaagacactatgggagatgctggtcgtggtggctcacacctgtaatcctagcactttgggaggccaaggggggcggattacctgagctcaaggagttggaggccagcctgggcaacggcaaaaccctgtctctacaaaaagtacaaaaatcagccaaaggtggtggtacgcacctgtagtcccagctactcagaaagctgaggcacatgcatcgcatgaacctgggaggcagaggttacagtgagccgagatcatgccactgcactccagcctgggcaacagagcaagacactgtcttcaaaaaaaagacaatagaccgggcgccctggctcaagcctgtaatcccagcactttgggaggccgaggcgggcagatcacgaggtcaggaaatcgagaccatcctggctaacacagtgaaatcccatctctactaaaaatacaaaaaaattagccaaacgtgatggcgggcgcctgtagtcccagctactcgggaggctgaggcaggagaatggcgtgaacccgggaggcggagcttgcagtgagccgagatcgcaccactgcattccagccggggcaacagagtgaggctccgtctcaaaaaaaaaaaaaaaaaaagacaatatgggaagatataaacttggggtagagagacttcataaaataagatggaaaattataggccaaagaggagaaactgataaacatttctatattaaaatgtaaaacttttgttcatcagaagtttcaaaaaaaaaatgaaaagagaagccacaaagcagaatgttaactgaccatagaatcatatctagaatatatgatctataagaaaaagacagacaaactaatagaaaaatttacacaaggaacttgaatggctaataaacatatgaaaagatgctaaatattatcagtaatcagagaaatagcaaataaaaacacactgagttttgttttcacagcccacaaaattgcgaatgttaggaaatctttttgcaactagtgggaatgaaaattggtacagcctttttgagaaatggcttggcatttgtctggtgaagtctttgcacattctctataattaagcctttctattccttggtataaaccctaaaaaaattcttacacatgtacaccagcatgtatgtataaaaatgtttatagctggataaacaatgtcgtatatacacacaatggaatattagcctttaaaaaaaggaaggaaattctgacacatgctacaaggtggatgaaccttgaagataatatgctaagtgaaataagccagcacaaaaggacaaatactgtatgctttcacttatatgaggtacctagagaagtcagattaacagagacagaaagtagaatgatcatcaagagaggtgggaatgggaagttagtgtatagggtttcagttctgtaagataaaaagagttctaaagatgaatggtggtaatagttgcacaacagtgtgaaggtacttaataccactgtgctatatacttaaaaatgcttatgatgataaattttagattatgtatattttaccacaattgtgaacattttttaattgtaaaaaaaagtttatagtaacattgtagtgatagcaaaaaaattagaaacaactcaattgtctataaatggtaaagtgtaatactctaacaatggaatgtagtacacagtgaaaattaataagctacaactacttgaatgaatcttaaaaacataattttaaacaaaagaagtggctaggtacggtggctcacacctataattccagcactttgggaggccagggagagaagatagagaccagcctgggcaacaaatagagaccccatctctacaaaaaaataaaatagccaggtgtggtggcacgcctgtagtccaagctactcaggaggctgaaaccagaggattacttgagcccaggagtttgaggctacagtgagtgagaccctgtccctaaaaaaaataaaatttaataagtgaatgaagtaagataagaatgtataacaatattattccattcaaaaaaatgtttaaaaataggcaaaactgaatattttttaatagggatatgtacacaggtgctaaaactgaaaggaaatgagggaatgattaacaccaaatttatggtagtggttacttctggggaatgcggagggtgatgcagttgggaaggggcacatagaggccttcaaaggttcagtatcttatttcttaccttgggtggtagatctgtaggtttccattttattctttgaacgatacatttatgttttatactctcaactgtatgtaggtaatgtttcatgataagaaaaaaactagatttataatgttcttttcagtctttttgcagcaatttttgttatcaagcatctaagttttttgaagcacaaattcccaaaactccagtatgggttcgagaagaagagaggtaatttaagtcattgtgtatatacatttgttcatatattctaataatttgtttctgctttttgagattagctgagagtaagtctagttttctgtaaaaagttaccattttatatactttatggggaaatggttatattttaagcatagctattaaggattttacacttaaaatcagaaaatgcatacatacaaatgttatttgtttgttgttttagctttaattgcaaaatcagaactttaactccagtgtcctgtgatgctagttatgtctgtgaatcctgttaatataataatcctggaggaagaatgttaaattttttcagaagttactgggtcttaggatccaggtgaactctgctatgagaaaggttagaaagttcaggttcatttaatctttataaaaatcagtacactattttatcaatttaaagacacaattaaaaagtaatttttttttttgtaaaaagagtttatgggcaatgctggagtttagcctcttgggaaatgatttaaatactggcaatgttttactagatgctaaagtcaagaaaattttattattgagggtgaaatggcatgataatataaaggtaacaagttatccttatggtaattaaactgtattgcctagaaattccaatgaaatgcttaatgagataatgcccaaaataaattcatgtttgaaagagtgtattatagcaacacaaggcagtgttacttgtggtaaggtaggacctatgctaaataaactaatgacctaaacataatgagatgcaggttagctaaaaagctctggctcaaaaaaaaaaaagcaaaccttgaagtcttttctgatgcgtaaggcgatgtaacaccactctcaattcaaataacatcaattatgctgacaacagcacctgtgatggcagacacctctgcctgccgatccaatcctgtgtggtttaggatatggaaaacttaacactgtgtggcccttgataattgagttaaacataattaagactaaattgttcatcatttcaccaccagtctgccagcttccttgttgggaaaataaaagactctggcattgttcgacatgactgggaagctaagagtacttttttacttatcctttttctcctttcttaatatttctgtcactagagctgcccagtacttccccagtcctctgagagcaacatgttttattccccactgaaaccagtgtttcctcaagttatccttaactttgcttccaaagatattttctctacatcttaaatttaaccctttgtgccaccctcatatctacctcaactgcttcaaaaccatttaccaaattacctttcctgccatctctgttttcttcaagcataggtattggtccttcctttagctaatttaaaacaaatcttccagcctggtgtagtggctcatgcctataatcccaacactttgagaagccaaggtgggtggatcacttgagtttaggaatttgagaccagcttagccaatatggtgataccctgtctctactaaaaatacaaaaattaattgggtatggtggcgggcacctgtaatcccagctactcaggaggctgaggcaggagaatcacttgaacctgggaggcggaggttgcagtgagccaagatcgtgctgctgaactctagcctgggccacagagtgagattctgtctcaaaaattaaataaataaataaaatgaagtaaaacaggtcttcctgtaaccttttcctaaaatctcaccatcctctattcagaatgctcactgtttcccaaaacttgaagcccttttactttatatttgcagttcttgaaattctaccttagctatatacccttcactacctcactaaaaaagaaagatgaaaatgtcctttgtgccgggcgtggtggcttacacctgtaatcccagcactttgggaggccgaggggggcagatcacaaggtcaagagatcgagaccatcctggccaacatggtgaaaccctgtctctactaaaaatacaaaaattagctggacgtggtgacacatgcctgtagtctcagctactcaggaggctgaggtaggagaattgcttgaacctgggaggcggaggttgcagtgagctgagatcgtgccactgcactccagcctggtgacagagcaagactccatctcaaaaaaaaaaaaatggactttgtttctctaatctaaatgaatcaacttaatttacatttaaattgtgcagtaagtgcttagtacctggcaggctacacacatacacatacacatacacatacacatacacatatacatatacatacacatacacatacacatacacatacacatacacatacacatatacaagtataaaacccaacctgtgaatttaacaatcactggatgccagaacatgaattaaacaagtttgtgttgactttaatggggacctgtcctataaattagcaaggttaggacattgcataatgagaaactgtgagcaaaagtgagaaaataaacttgtgggaatgggttgggatattgaacattggcccacttgaaatttgggaaacgagaagataacaataggtaaataacaaagggccaggctgagtgtggtaaaccctcaagtattggggagccatcaaatgtttttgagcagaatttattctgatattggtgtacaaaatgaattaaagaagaatcataattaaaagagctaaaagggtccttagagagatttaatccaaccccttcattaagtgtatttcttaaactagtgatccgtatgagaccaggattctatttattatattccacttgattagaaggaaacagtgaataatctatatatatgcatctgcctcattgtatagcataactgtagcccttaattatatataacacttgtcagtgtataaccatatcagtatcttttatatctggatgcatttgtgttaccttaatttccaaattcttaggggcagggattatgtccatgctatttaatgaatccactagaggtcactgttttttcagacatctttttacctgtgccaaggatcagaattctagaattttgtatttttaaaagcttgtctagctattgcacatttaagctctacagaaatgtgatattttaaagaatgtctgtttacatatggcatgggatacaatatcctgagtcagtcttcctttagggaggaaaaaattgcttcttttaaatggtggcatgtagtatttaatgcagagatatttttattagcttacaatgagtcatgataaagaataaattgcatcataatagtaattttaataatcataattttaaaataataataaatttttatggccaggtgtggtgactcacgcccgtaatcccagcatttgggaggccgagactggtggatcacctgaggtcaggagttcaagatcagcctggccaacatgacaaaaccctatctctactaaaaatataaaaattagccaggagtgctggaacatgcctgtagccccagctacttgggaggctgagtaagaagaaccgcttgaacctgggaggcagaggttgcagtgagccgagatcacaccattgcgctccagcctgggcaacagaacgagactaagaataaattgttaaatccacccaaaagattagatatcttattgaaatgacttccaaactttcgaccactataataagtgcattttacattatctcatatatgcatataactaaaactaaagcaaaacttctgtgaaacaatattattcttactacatgaaatgcctctgatattttctactctgttgcttttttaaaatgctggcagcaacctacttaattgattggtcctgatctgcagtttgaagagcgctgttttgttggatttagctcacgtttttggttgttttactgtaggaaacctgcttctcaacactaagtctcagtttcctcatttgtaaaaggaaaaagttgcattcaacttccgagttccctttggttctaatgatttacagttctaagccaattgtgtcattagtcattgctactatagagaaagttttctacataaggaaatatttattaaaatgatgaaaattaaaattatctgcttaagactagagaaacttatactaccttgtagaaaggtctgtctcaataattttgaataaagttactgactttaataatttgatctctttagtctgtaaaagtgaaggctgataaaatgtagatcaaagcttttaaattatgaagaaaaaccaggcatgttttagagcatgtcctgaacaatttgaacttggcatcactgaggatgccatgaccttacacaccatttggaaacagaatattgaatttgacctaatttggtctttcttacattattgtgaaagccagtaagtacaggcatatcttggagatattgcaggtttggttccagaccaccactatactaaagcaataaagcaatcatggattttgtttcccagtgtatgcaaaagttatgtttccactatactgtagtcttttaaatgtgcagtagcgttatatctttaaaaaataatgtacataccttaattttaaaatattttattgcttaaagatgctactgatcatctgagccttcagcaagtattaatctttttgctggtgaagggtcctgttttgatgtggatggctgctaactgatcagggtggtggtgtctataggttgggatggctgtggtaatttgttgaaataagacaaccccaggtttgctgcactgatcgacttcctttcactaaagatttctctgtagcattagatgctgtttgatagcattttacccacagcagaacatctttcaaaattggagtccggccaggagcagtgacttatgcctgtaatcccagcattgttgcggggcaaggcaggaggatcacttaaacaagacatttgagaccagcctgggcaacatagagggacccatctctacaaagtatttaaaaaataaaaaattagctgggtgtggtggcacacaactgtagtccttgtagctacttgggatgctgagactagaagatcacttgagcataggagttcatggttgcagtgagttagatcacaccactgcactccagccttggcaacagagcaagaccgtgtctcaaaaaaaaaaaaaaattgaagtcagtcctctcaaacttcattgctgcttatcagctaagtttatggaatattctaaatcttgtgttaccatttcaacgatgttgacagcaccttcatcaggagtagattccatctcaagaaaccagtttctttgcctatccataagaagcagctgtatatccgttcaagttggattatgagattgatgcaattcagtcacatcttcaagctccacttctaattcttatcttgctatttccaccatatccatagtgactacctctacggaagtcttgaacccctcaaagtcatccattagggttacaatcaacttcttccaagcacttgttaatgttgatattttggcctcctcccatgaatcccaaatgttctttttttttttttccttttttctttttttcagacagagtctcactctgtcacccaggctggagtgcagtggcgcgatcttggctcactacaacctctgcctcctcagttcagtggcgaaatctcagctcactgcaacctctacctcccaggctcaagcgattctcatgcctcagcctcccaagtagctgggaccacaggcatgcgccaccacacccggcttatttttgtatttttagtagagatgggggttttgccatgttggccaggctggtctcgaactcctggccccaagtaatccacgcaccttggcttcccaaagtgttgggattacaggcatgagccactgtgcccactcccaaatgttcttaatgacatctagaatggtgaatcctttcgtgaaggatttctatttactttgcccaaatccatcagaggaatcactctatggcaactatacctttaggaaatgtatgtcttaagacttgaaagttgaaattactccttgacccatgggctgcagaatggatattgtgttagcaggcatgaaaacaacactaatcttgtacatttgcatcagagttcttgggtggctaggtacattgttaataatcagtaatatttggaaaggaatcttttttttttttttgagcagtaggtttcaacagttggcttaaaatattcagtaagccatgctgtaaacagatgtgcagtcgtttaggctttgctgttccatttatggaacacaagcagagtagatttagcataattcttaggggccctaggattttcagaataataaataagcattggcttcaacttaaagttaccagctacgttagcccctaacaagagagtcatcctgtcctttgaagctttgatgccacatatttacttctcctctatagctatgaaatccctagatggcatcttcctccaatataaggctgatttgtctacattgaaaatttgtttagtgtagctatcttaatcagtgctcctagctagatctgttggataacttgctgtaccttctacatcagcacttgtggcttcaccttgcacttttatgttgtggagatggcttctttccttgaatctcatgaaccaaactttgctatcttctacctattcttctgcagcttcctcacctctctcagtcttcacagaattgaggagagttagaaccttgctctggattaggcttaagggaatgttgtagctggtttaacctatccagaccactaaaactttctctataccagcaataaggctgttttgcttttttgtgttcactggactagcattttaaatttcctttaagaacttttcttttgcattcacaacttgcgtactggcaaaataggcctagcttttggccagtctcagcttttgacatgccttcctcactaagcttaatcatttctagcttttgatttaaagtgaaagaaagtgtgactcttccttttacttgaacactcagaggccattgtaagggtttttttgttgttgttgctgttgctgttgttttttggtttttgggtttttttttttttgcatttagtagtgcattttatttattctaagttgcatacatttttacatttttaacatctgtgcaattgaaatggatctcacaactgatagactcttagattacagctggacacagaggctaacaccagtaatccagcactttgggaggccaaggccggtggatcacttgaggtcaggagttcaagaccagcctggccaacagggtgaaaccccatctctactaaaaatacaaaaataggtggtggcatgcacctgtaatcccagctacttgggaggctaaggcaggagaatcacttgaacccaggaggcagaggttgcagtgagctgagatggtgccactgcactacagcctgggcaacagagtgagactccatctcaataaattaaaaaaaaaaaaggctgggtgtggtggctcacacctgtaatcccagcactttgggaggccaaggcaggtggatcacctgaggtcaggagtttgagaccagcctggccaacatggcaaaaccccgtctctactaaaaatacaaaaattaaccgggcatggtggctcacgcctgtaatcccagctactcgggaggctgaggtgcgagaatctcttgaacccgagaggcagaggttgcagtgaaccgagatagtgccactgcactccagcctgggtgaagagcgagactctgtctcaaaatcataaataaataaatagaaattagcttttcagagagacagaggtcttgtcttgttgcagtctcaaaaaaaaaaaaaatttaaaggaaaagcagtattcaatgtcagtgagtcttccattgtaaagttactaattggcctaatttcaatattgttgtgtctcaaggaatagggaggcctgagaagaggaagcgagatgggtgaacagctggttggtggatcagtcagaacacacacatttatcaattaagtttgacattttatgtgggcttggttcatggtaccccaaagcaattacaacagtaacatcaaaaattaccacatattactataacagataataatgaagtttgaaatatgataattaccaaactgtgacacagagaacacattttgttggaaaaatggtgctgacagactggcagacacagttaccacaaacattcaatttgtaaaaaatgcagtatttgcaaagcgcagtaaaggaaagcacagttaaacaaggtatgcttgtgtaaatttatttaccagattttataataccaaaaccaaacaatatcccttagaatttataagagtaatatctttatatcacagtaagctcactacctcattggtatagatgtttaaataaatttaagatttagacaaattcataaattctacctccatacttttataaggttttggagtcagaaagggccttggaggttttctagctcctcatctttaaggtatgtaaaatatctggagtagatccgtaatgtcatggagactaacagtggttctcacaaaatgtctcctgataccctgttagagacaaaacattgacctagaatggtctgggtcgtgacgcactgtgatgcttctcatcttgtgagttagaaatttttcacccacttggtggccagaaacagaccacatagagttttgatgctctgagacagtgtgctcacataggtaattatatagttgcagttataaatcctgtttggctaaatgtaggctctgacaagcctttgaaggtgggaagtctcctgcattgtaatctaaaatcttaaatctaagaaggacaaatgtggaaaatcaaattatgattttaaagatgaaattggggtgaatggttaatgctgacagagctaaaagcgccatcatctggtccagagtaggggatttcacacgttgcttcttggcagtaaacagtagaatctcagaggtgcggaagccaaaaacctctgcagaacaactataacctcttcctgaacagccacctctgttgcttggtatgcagaataaaagctttctgaaacagggtttgacatgtctcaaaatagatttgaaaagttctcaccatacctgctgcttctgttggtttacatataacatacatattccaagtgatatatatgcacatatatataaatatgtacatatatccactaagttctttggcataagttatttctagttttagatttactttgctaaaatgaaaaccaatcatctaatttataccttagtgaaagtaagatgaaaatgtttataaagaaacagcttacaagcattctttaactaggatggttacatatttttgttttgtaaactgagctttcacaactatcttcaggacaacaaaaattgtgggaagataatagaaaatacttagctggaagagaaatggcactttctcttcaaacgaaagaaatttggatttcatctaagaaaggacagaaaagaaagagcaatgtaacttggtgcttcattctttctaaaacagcacctagcaaaaacaaactggaattttatatcgaatcttgaatctagtttatttcagtgtcaggtaccattctttatagattggggatgagggaaggtatttaaggttcctttaagatagttaagatctagaaacaatgttgagtttagttcttagaaaaattacacaaaggagaagaaaatagtttgtaaagtatattgagttcctgtgaaagggattaagcaaaggtggtatccttgcaacttttttgggtctttttctaacactaaatagaggcaacaggatatagaaagggcttggcctaattcgaatcctagatttactacttgttagctatgtgatcttaggaagtcatttaacctctcaaaacttcggtttcctcatctataaaaatagagttgaaggctcggtgcggtggctcacaactgtaatcccagcattttgggaggccgaggcgggtgaatcatgaggtcaggaattcgagaccagcctggccaacatggtgaaaccccatctctactaaaaatacaaaaaatgagctgggcgtagtggcgggtgcctgtaatcccagctactcaggaggctgaggcaggacaatcgcttcaacctgggaggcggaggttgcagtgagccgagattgtgccactgcactccagcctaggcaacagtgagactctgtctcaaaaaaaataaaaataaaaatagagttgtaaattgtgtgaggattaaatgaaataatgtgtaaaaccatctagcagacaatttgggaagatgaaaaagtgctggagatgcatggtggcgatagttgcacaacagtgtaaatatacttcatgctactgaactatatacctaaaaatgtattaaacggtaaattttaccacaatttaaaaaatccacctagcatatggtaggtgatgcctaccttatgctttttcccttgccttctttaaagatacaattttcttttaattctcaaaaaataacaagttgtatagcaggagatgttgcataaagctgtcttaaattgcattcataatttacagtaatgtttatatattttgattaccatttgattgagctacacttggacctcattcttgtttggaactattctgccttcaagatcttgaaataagagcttcccgtctctgaccacaacctctatctcaatctgcagctatcactcctgagtctgctttgtgacctcattttgacctcctatctctagcctagctctattcttctgagttggcagaccctcttacttttgttttcttgagctctacagtcagcgattacagtgtcctcttaaacaattgtagattctttctcccttaaccttctggcatgtccaccttcccaacctccagtcatactttttttctatttagcttgctgaacattttggggaaagttctcaaataagaccattagcgctttagataagctatctcatttaattcagtcctcttagcatccctggggaaatattatgttactcactttatggatggtggaactgaggctcagagtggtatggtgactcacccaaggacacttagttacatatagatttgggatttaaacccaggtctgtctgatatccaagcctacattcattgtatccctttggccctgttctctctactatgtttttcccaccttttttttctttcttactgactatagaatagaccttttctactctcaaactttgaatcgaccaccaaccatagtagatagtttaacccactttactgaaccaattggaggcatccagcagaaactccttcaacattattttcttcatatgggctctcatttctctgcctcattgctgataaagtaccctcctttatcttactgattccactttctctcctgggccttgctttatgatttatttgtattctgcctcctttgagatatcctttcatattgattattttccctctaccttaaaaaaacctgaaaaatatctatgagcagtcttatagtaattggtgatctcagtgagagccatttcaggagagaaatgagtacagattccagaaggcagaaagctgataactgagtaggaaatatggaagttgaaaatgatgagggcagacttctttaataaaggcttacgatgaaatgagtaggggctgtatgatcaaaggattgtttgtttgttttttttaagagattgggtagatttaaacacgattacatgctttaaaaaagagaaaaaagggagaggtttgtagagtaaataccccagagtggagattcaagggattagcctcaaatgcctttatatacagactgtatccatctttataagcccagctgaaatgacacctctctgaaactccttttgattggctcagaagcaagtttttctctgatttcctgtagcagcttatacatctctcatggcatttaacacatattgtcttgaataacagtgtagttattatgagctttactgtctgggtttgattcctggcttcaccacctactagctgtgtgattttgggcaaattgcttattctctctgtactcagtttccttatctataacatggggataatattagtagctacatcgttgttatgaggatcaatatctgtaaagctcttagaacatgcatttttcttctactaaattttaaggtctggcaggcgcggtggctcacacctggtaatcccagcactgtggaaggctgaggtgggggcagtggggagcgaggggttgttactactccaatgtaactgctttctcagaaattaaggcaaaaagtcttactgaccatgtaaaggaaatccaacaattataaacagtctctgcctttaaggagcttatagtctagttaagaaaccagacttaaacatatgaaaagttaaacattggccaggcacagtggctcatgcctataatcccagcactttgggaggccaaggcaggaggatcacctgaagtcaggagttcaagaccagcctgaccaacatggagaaaccccatctctactaaaaatacaaaactagttgggcatggtggcacatgcctgtaatcccaactacttgagaggctgaggcaggagaatcacttgaacccgggaggcagaggttatggtgagctgtgatcacaccattgcactccagcctgggcaacaagagcaaaactccatctcaaaaaaaaaaaaaagaaaaagaaaaagttaaacatttaggtaatggttctagtagtaggccataaaggagttcatgattaattatgttaattgtacagacaatgatgactctggaatttagggaagggatttactttagtccaagttagtcaaggaaaactttattgggctggtggaatttgaacttaaccctgaaaagtgagtatagtttgggtaagagagagactaatccagatttcttgttgatgaatttcagagtactttgtcctttaatttttttctttttttttcttaagatggagtctcgctctgtcgccaggctggagtgcagtggcgcaatctcggctcactgcaacctctgtctccctggttcaagcgattctcctgcctcagcctcctgagtagctgggactacaggcgcgcaccgccatgtccagctaatttttgtatttttagtagagatggggtttcaccatgttggccaggatggtctcaatctcctgacctcgagatccgcctgcccagcctccgaaagtgctggggttacaggcatgagccaccgcacccggcctaatttttatttctgtgttcttattacaggcatcctgattttcaactgctaaaggaagaacaaaggtatggttgaatcagtatcatttaccatttatatatttatgttaatagaaacattaggagtgaaccaggtgatatgagctcttggacttcctgtgctgatgcattatgtaagtgtcccattctagcccacacaaagaaatatttgacctgttcagctttttcttttgtgatggtaagatgatgtgtttgatctgtatgatttattgtacagctgttcctcccgaggaaatctaatttaacctgttgaaatatgacataaacacagcctccatctcagataccatgcttctttgtcaactagattgtgcctattacatttgttgaaaggtttttacagtcctataggatttcaaaaccagtaatgtaccagttacttaattatttgaaagagcatctaaagcattaatataaattccaagttgtgattttctttctaaactttcctcatggtattgtttgcctgaccatggccatctctcaaaacacatcccttaactctcagaataaatgttcctagttaatagtcactaccttagtcacatggcgttgagcacaaataagagatatttatttattgatgtatatctttatagcttcagagtagtataaaaacataattgccttaaaactccaagagaaagtatgaaatacatgaaagttaaattgttctaatttttttgagcttacacctatttttacttttcttctgatgcaagagacagccccatggctatataggctagattctaactaaaagatggtatctaagactaaactaacttttcatcttttttcttcattcccatccatgaccttgctttcaacttttatatatatatatatttttttctttacatttccccacagcttgcttcttgacccagagtctttttcatcctgatcttttaaagttttgatagtgtctgtgctttagagcatccttgtttgtttcaagtttgtattggcaaagctactgttgccttccctttttcgtaattcttcatcttattcaaatctaatctgaaaattgaagaacattgtcagggaaaacttttgtcttttattgttagcatattgttgtaactctggattttcaaatttaaatatcttttattgaaaaatgttgatttgctaacttgttctgctatgactttcctgtgattttcattctgtagaattttctgtacaacaatcaaccagaattagaaaatgtttacccatttatttttatcattttatcttttcaaatctaaacacaattcctgtaatttttttttttatttaagaaaccgataatgaaattttctttcttttttttttttttttttcaagacagagtctcactctatcacccaggctagaatgcagtggcgcgatctcggctcactgcaacctctgccacctgggttcaagcagttctcctgcctcagcctcctgagtaactgggactacaggcatgcgccaccactcctggctaatttttgtatttttagtagagacagggtttcactatgttggccaggctggtcttgaactcctgacctcaggtgacccacctgccttggcctcccaaggtgctgggattacagatgtgagtcaccacactcagccaaagttttcaaaagaaaaactttttttaaaaaggtcagccagtaatcccagcagtttgggaggccaagacaggtggatcacttgaggtcgggagtttgagaccagcctggccaacatgatgaaaccccatctctactaaaatacaaaaattagctgggcatggtggtgtgcacctgtaatcccagctacttgggaggctgaggcaggagaatcacttgaacctgggaagcagaggttgcagtgaaccgagatcttgccactgcgctccagcctgggtgacagagcaagactccatctcaaatgaataaaaataaaataaaatacaaaaaataaaaaataaaaagctcagccgggcacggtggctcacccctgtaattccagcactttgggaggccaaggtgggcaaatcacttgaggccaagaatttgtgaccagcctggccaacatggcaaaactccatctctactaaaaaaatacaaaaattagccaggcgtggtggtgcccacgtgtaatcccagctacttgggaggccgaggtgggagaatcgcttgaacctagggggcagaggttgcagtgagctgagttcacaccattgcactccagcctgggcaacacagactttgtcttaaaaatatatatttatttttatattatttttcatattatatattttttaaactacatatatactttatatattatatataatatacattatatatgtacaagtatatattatatatgtaaatatgtgtacatataaatatatactttatatttttatatatttatatatctttatatttatatatatactttatatatatatttatatatatatatatatttgcaacaacaggcaaatccaaatagtgcagtaggatagcattatcaagttttttaaaaagttttgctgtactcctgtaacaattttaaaataattgggggaaaaagatgaaggaagaatacagaaggagaactatatcaaaaaatatattattaacagatgtactgaaattataggcttcttctgaaatttatatatcagaacctagaaataaggttttgtctggggaataaaaatttctaccttgaaagttacaatgtataaatactatggggtactttacttttctattgttttcgggttttatttgctattttttatttagttattttatttctctttcattctacagtggccattctggagaagaagtacagttatgcagtaaagccattaaaacatcagatatcgacaatcctagccactttgaaaagcaatatgaatctagttcttctagcactcacagtgatagtagcagtgacaatgagcaagactttgtttcctccattctaccaggaaacagaccaaattcaacaaatattagaccacagctgcaccaaaaaagcataatgaaaaagaaagctggtcacaaagctaactccaaacacaaagacaaagaacagacagtagtagatgtcactgagcagttaggcgattgcaaattagatagtcaggagaaagatgctacatgtgaacttcctttacagaaagtaaatactcagagttcttcaaatagcactttgcctgaaagattaaaagcgtcagaaaattctgaaagtgaatacagtaggtcagaaataactctagtaggcataagtaagaaaagtgcagagcattttaagagaaaatttgccaaatcaaaccaagtgtctaggtcagtgtctagttcagtgcaggtgtgtcctgaagttggaaagagaaacttacttaaagttttgaaggagactttgattgagtggaagacagaagaaacattgaggtttttgtatggccagaattatgcttctgtgtgtctgaaacccgaagcctctctggttaaagaagaacttgatgaagatgacataatctcagatccagatagtcatttccctgcctggagggaatctcagaacagcttggatgagtctttaccttttaggggctcaggtacagccattaaaccactgccaagttacgagaatttgaaaaaagaaactgaaaagttaaatctgaggatcagggagttttacagaggacggtatgttttgggtgaagaaaccaccaaatcacaagactcagaagaggtatgtcttacagacattgagtttttccagatcgttaacatttggaaaactcaccacagcaaatcttggagcaggaaggatattgaagagttaattgttaaattttcaaatagtttctttagtcattctgccttttggtttacagtgccatctccactgttggcattactattttacaaataagttgacgtttacccctagcaaattttcatcagtgtgcaatatttttttctaatgtaaaaatagcctaaaatggtgggacaaagttttccctaattcttcatacaataaatgaagcctctgaagaggcttgctttttcttcttcggtattctttcagatttttacatggggtctgtgtgtgtgtgtttaatggaagtatatgccatggaatagacttggtagttacattggaaaatatttagcaagcatgtccattgaaaacattacagatcaaaatagtttgtaaaagagacttattgggaaataatggacaaagagaatggaaagcacattcagatagacctagatttgaacatctgttgtgtcatttactagctgtatgaaaaattagtttcttggtctgtttgctcatctgtaaatggaactattaatagcttctcttgctcaattgttatttgttttaaagataatgtgtataaagcatttatcacagtacatgacatataattggtactcagtaaatagtacccatatgtagagattgaaaatgtgccactgagatttagagagcatcttttagtatttctactacccatctttgattgatgtatactccctggaaaatgaagtcatttaacatgaagaggaatgggtaataaccttgtttttaccacaaaactttgttctcaaatattcctaagtaaatgtggctctaaatttaaaagcacattggagatttggaaagagggtagaagtagaaatgtagtaaaaaatttagaaatatatttctatagagtgttgcttggcccagcaccctacttcaaatcatttcaagtatcttattagacatcatccaaaacttatattaagctaggagaaacattgatctctgtcactgagctgcataaacctaccatagaacatcacttattttatcattttgtcctttttagccttaaaaaggaaaaaataatccctgaaatttgacttttaaaaatttataacattttccaaaaatgttacataacatgttaaaacatttccattgaagtacaacacaaatagtaattatatgatttcttgagtattcacatatgaatgtcctgatgtaatcactacccaagccaagaaataggtcattacaagtaaactagaagccccatatatatcccctcctaatcagcacctctttccaaaattaatattatattagcacagattagttctgtcattttttttccagtatatattcttggtgtccagtttatttcatgcaatattatacttttgagtcatttgtgttgttgcatatagctgtagttcattcttttattgctgtatagtattccattatataaatataccatttatttatgctaatggacatttagactatttccaatttggggctattatgaacaatattcttaggaactttctcgtatttatctctctgctaatatgcgtatgtatttctgaagtatctaggactgggaatggtgggttatcgtatatgcatatatgcaactatactagataatgccaaacagttttccaaagtggttgtaccggtttacagttccactactactatatgggagtttccttgattccatgtcctccctggtacttgatatagttagttttagccattctggtagtattggtttatgattataatacattactgtgatgatgaataaattcagcactattttatttgcttattgaccacttggataatctcttaggtcaggtctgcagatctctcagccatggataccagcacctgctctggtggagatggcaggggggtgaaatggattctgtgaggatccttgcttttggttgtttaatgtactatttttgtgctggttagcctcctgccagaaggtggcactttcaagagagcatcagttgtggtagtatagggaggatcaggctgtgggtagggccgtagaactcccaagaatatatgccctttgtcttcagctaccggagtgggtagggaaggaccgtcatgggggcagggctatgtgcgtctgaactcaagactccttgggcagggcttgctgtggctgttgtgggggatgggagtgtggttcccaggtcagtggagctattccaggaagattatggctgcctctgctgtgtcatgcaggttgtcagggaagtgggggaaagctggtggcaggcctcacccagctcccatgcaacccaaaagaccagtttcactcccaccatgtcccttcaaacagcaccaagtttgtttacaggcagtgggcaggaagggctgagaacttgccccaggctaccagcctctcacctgtgagaacaagtagggctttcacatctcccagcctgtggagtctgcacaccagattcacaccctcccttgagttctggccaggagacttcctgttcatttggaattgttacaaagttcagctggcctatcatatggtctatctcggagactgttccatgtgctgatgaatagaatgtatatcctgctgttgttgggtagaatgttctgtaaatatctgttaaatccatttgttctagggtataatcaaaattatatcaaatattctctcagaccacagtggaattttttaatttctacttagatttcattgttgacctagtgatcattcaggaacaggtcttgatgacctgtctagtgctgtcagtggagtactgaagtcccccactattattgtgttgctttctatctcatttcctaggtctcgtagtaactgttttataaatttgggagctccaggtttagatgcatatttatttaggattgtcatattttcctattggactagtccttttatcattgtataatgtccctctttgtctttttaaactgctgttgctttaaagtttgttttgtctgatataagaatagctacttctcacttttggtgtccatttgcatggaatatgtttttccaccctttaccttaagtttatgtgaatccttatgtgtcaggtgagtcccttgaaaagcagatacttggttggtgaattcgtattaattttgccattctgtattttttaagtggagcatttaggccatttacattcaatgttagtattgagatgtgaggtactattctattcatcgtgctatttgttgcctgaacagctttttttttttcattgtcttattgttttataggtcctgtgagatttatgctttaaagagattctattttggtattatttccaggatttgtttcaagatttatcgctcctttagcagttcttgtagtgctgacttggtagtggtgaattctctcagaatttgtttgtctgaaaaagactatctttccttcatttatgaaccttagtttcgctggatacaaaattcttggctgacagttgttttgtttaaggaggctaaagataggactccaatgtcttctagcttatagggtttctgctgagaaatctgctgttaatctgataggctttcctttataagttatctgatgcttttgcctcactgctcttaagattctttccttcatcttgactttcgataacctgatgactatgtgccggggcaatgatctttttatgatgagtttcccaggtgttctttgagcttcttgtatttggatgtgtaggtctctagcaaggctggagaagttttccttgattattccctcaaatatgttttccaaacttttagatttctcttctttctcaggaacaccaattattcttaggtttgtttgtttgacataatcccaaacttcttggagcctttgttcattttttaaattcttttttctttgttggactgggttaattcaaaagccttgtcttgaagctctgaagttcttctacttgctcaattttattgctgagactttccagtgcatttgcatttctctaagtatgtccttcatttcccaaagttgtgatagttttttatttatgctatctatttcactggagatttttccattcatatcctgtatgatttgtttgatttctttaagttgggcctcacctttctctggtgcctccttgattagcttaataattgaccttctgaatcctttttctggcaattctgagattttgtcttggtttggatccattgctggtgagctagtatgatgttttgggttgttaaagatccttgttttgtcatattactagaattgtttttctggttccttctcatttgggtagactgtgagaaggaagatctgggactcaagggctgctgtttagattcttttgtcccacagggtgctcccttgatttggtgctctcctccttcccctagggatggggcttcctgagagccaaactgcagtgattgttattgttcttgtggatctagccacccagcagagctaccaggcttctggcgggtactagggagtgtctgcaaagggtcctgtgatgtgatccgtcttcagctgtggataccagcacctgctccagtggaggtacaggggagtgaagtggactctgtgagggtccttaattgtattttttttaagtgcgctggttttgtgttggttggccttcagccaggaggtggtgctttcaagagtgcatcagctgcagtaggatagggaggatacaagcttgctctggggtcaggcagtgggtagggccatagagctcccaagagattaagtcctttgtcttcggctaccagggccagtagagaaagaccatcaggtgggggtaccattgtgtgattcccaggccaatggagttatgttcccaggtggattatggctgactctgctgcatcacacaggtcactagggaagtgggggaaagctggcaaccacaggcctcacccagcttccacacagcctgcagcctaaaaggccagactcactcccaccgtgcccccacaacagcaccaagtttatttccaggcagctgatgagcagggctgagaacttgccccaggctacaggcctcccagctgagaaagcaagctgactcacagttccttgccttttctggtatgtttctgcggtagttcttggagcaaaagttcatgatgggagtctccacatgccgctctgtctgaccaagtgggaactgcaagttagtcctgcctcctatctgctattttttcccagacctaacatttatttttaatattaaaccaactttgcattcttataataaactcaacttgattgagctataatagcctttttatataatactggatttggtcctcctaatatttgccttagaatttttgcacatattttcagaatgagtgacattagcgtatgaattggtcatggtctcatcataaatcacatggtacaaattaagtaatctgaggaaagtttaattataggactgttttccaaagcgtgaaaatgtggtcagaatgaaggaaaccaaaggaatgatacactaatcatagtttgagagccctcaccacccctagacctcaaggaaaaaggtaggagtggaccacaaggtcttgtaccaaggaagtgctgcttgtagtggaccaagtgggaatgactcttctgcaccgtccagtttcttattcttcattggcaaaactgagataaaagccagagagcaaggaagcccattgatgcagcccatacagatcagccttctgaagtacaaagacaggtggaaaagggtgaaaattgttcagaatgaagataccttgcactgcctataattttcctttcttgtaatatcgttatcaggttttggttgtaatcatttggtaaaacaagttgggaaatgttccctccatttctggaagaatgtgtctaaaattaatgttagttctttaaatgtttagaagatcactcattgaactatcttttcctctgattttctttgtgggttgtcaatttttttttttttttttttttttttttgagatggaatcttctctgttgcccagtctggagtgcaatggtgccatcttggctcactgcaaactccacctcctgggttcgagcgattttcctgcctcagcctcccaagtagctgggattacaggcacccgtgccatgcctgcctaacttttgtatttttagtagaaacacagtttcaccatgttggccaggccaggttggtctcgaactcgtgagctcaagtgatctgcctgcctcagcctcccaaagtgctgggattataggtgtgaaccaccacgcctggcctgtgggtagtcaatttttaaaaactttttgttatggaaattttcagaaacacacaaagatagactaatacagtgcttactatacaatgtgtggtccatggaaccagcagcgtcaacatcatctagaagcctgttagaaatgcagactcttatccccaccccatatttactgaatgagaattactttttaacaagatccccagaagatgagcatgcacattaacatttgagaagcactgttggggtgtggtggtttgggtttgggttttggtctgctcattccatcagtcactgagaaagatgagttaaaaatctctcaccttaattgtggattgattatttctacttttatttctgcaaattttactttttgagaccatgttattgggtataaatgtaaaattgttatgtcttcctggtgaattgaaactcatatcactatggagcaacctttctatttgctttttttctttacagtctactttgctgacattaacattcttgtattaatgtggtcaaggacaatctgtctagattgataatctttgtcctttatatggagaatttaatctatttgcatttcatgtcacaattggtatacagtatttgggtttaaatctaccatctcactcctctttctatgtgtcccacttattctgtcttccttttctctcttgctttcttttgcattgaatcattattccattttttagcctctgttaaattgtttttatatactcttttactgatcattaaatggttaccctaagtgttaaaacctgaatctttgtcttattaaagtctaatgtaagttaatacttttattgcttcctggacaattagcaccttagcatgatttaactccatctatccctcttgacttatgttctgttattggatatttttattttctctaaatttcaaatatattgcaagattatttatagccaatactcagc

SEQ ID NO: 23 - DNA, 32744 bp, Homo sapiens
  source 1..32744: mol_type = other DNA
ccgcggcggttcgaattctgtgctgccggggttcgctggttctccgagttgtgtccgaggcttccacgcgcaggggcccgggaaagggtcagaggcttcctaacgcagactcgagtgcgaagcgcgcagtcgccgggtgggtctctccccagcgacgatttgggtggtgagcgactgcgccttggcgtggggaaaccggcttacctgggggagttctgttcctttccctcccggcaccttggatgcgctgggactggtcctcgtggttgctgagcatgctgctctgaacggttgtattttatttgatgaaaaataggaggccgggcgcagtggcttacgcctgttacctcagcactttgggatgtcgaggcggaaggattgcttgagcccaggagttcgaggccagccttggcaatatggcgagccactgtctctataaaattaaaaaaaaaaaaaaaaagaggaaactgtcacttccgtcccccacccccgcccccgcttctttcagacggatgtaagattagctgtgtcaagcgatcttgagacaggagactactacataaagttatgacttctttccaaaatgaggaatctttttcgactacagcccattgtatcacatacatagggtataaaagaacacttgtccttcgtttgatgggtgtgcgtgtgcaaacctacaaacacattgttaattagggccgaaagatgatgttgttaaggtcggtgagtaggatgatgtgcttttctaggtatgcatagtcagtgaagatagccttttttgggtaactactgtaaattgaagttaaggacattcatttgacagtaaatgtcccactaggaaaatgaaaacattttagtatcaaatatattcattgctactgcagaagagttagggagttctttcttttttttttgagaccgagtctcactctgtcgcccaggctggagtgcagtggcgcgatctcggctcactgcaacctccgcctcccaggttcaagcaattctctgcctcagcctcccgagtagctgagattacaggcgctcgccaccacccccggctaatttttttgtatttttagtagatacggggtttcaccatcttggccaggttggtctttaacttttgacctcgtgatccacccgccttgacctcccaaagtgctgggattaccggcgtgagccaccgcgcccggactgggagttatttcttgcatggcaatacacagatgttgaactaaaacctgatttaagatgaaatatatagtaccaaatggtattatagaatttgcccaattttctctacccttttctccttcaccatcctacagagagctagagatgttgaataggtaaagcaggatggggacctgatttattgacttgtctgcgagagtcttgtcacttaagcagaagcaaatttgtggaaacaaaaaagggaaagaggatagaaccagtttgtctattaagattacatagtatctcatttaatttcctgccactttctttccataaggtgggagttttctttttaatcttcctccctacatctgagaatttttgagtggggaataaatgtaacataccattctaactggatgagggaaggaaggacagtttagtattcgttaattcattcaaaatattgagcttctctaagtacattgcggtcctgaacgtaatgcacaggacttttaaccttttggaacttgggatgggatcagaatgctaagaagggcgttgaaggagatgctacagtgaaaaaggtaaatgggatctgaaagaggaatgtaattttaagattgcgcagaaagctctgtagtagtggagattataaagctttagttttttattgtattaattacaataataaaatgtgatgctttattgtgatttttatatgcaaagaaatttagtagtttcacaaccctagagatactcatccactgaagaaacaaaagcttttcttcatttctatgagttgacctgccaaatgttattttgatccctgtggttgtgacttgtaaatgtgtctttttaaaattttataactattgggcgtaggaggaggagacagcttttatctggtaataaattcccttctaacaaaatatgaatgtaatgataccatttaatcagatgtccagtacttgtaatgtaattatgaaagttcaaacacctcatattgaaattgatatgtaatatgtaataaagctacaatgcgacataatttaatggtctttgcatcctaatgacttggattcaaatcttgatttcaccatttacagtttgtgtgactttgagcaagttatttaatgtctgattcttagtttccttaacatgtaatgaaaataattaacaattgttaggaagatcaggtatgcttacaaaagagaactataataactagaccctggctaaaatgaaaaattcattcattgaaattgtattgaattcctttatggctttacactacagataaattcattattattgattttttgttttgttttaaaccaccatgaaagatttcacaacatttaaaatagaaaactaatgagttaaattctattcatgtgagtattttgactgaaactacagaatctttcagacaaggtacaagaaattcattttttttttaagaaatggaatctagttcatcagactactataataaagacaatgaagaggaaagtttgcttgcaaatgttgcttccttaagacatgaactgaagataacagaatggagtttgcagagtttaggggaagagttatccaggtaagtaagtaaaatcacatatagaattcactgtgccttaaatacatcaatgtaaaatgtgtggatttcattatgatgtattgtttctaacctgcctctggaataagaaataattttcttatactttttaatgtaactttcagtttagggaaaaataaggaatattagagaagcctctttgcatattaaaaacactttcagtgtattagaactcagtataaaatatatattttgggctttactaattttttatgatttttttgaatcttaagtaatcttagcgtagaggctttagaaatacagtttgctagtttaaaagtaattatgatttatttaaaatttagtggaaacattgccttatgttcataactgtgaatctgcttagcagcatttcaggttttctattttcttatttaatgtatagcaatttgtagtgaataaactatccaagaactgaaatatgttttttcttttttctctagtgttagtccaagtgaaaattctgattatgcccctaatccttcaaggtctgaaaagctaattttggatgttcagcctagccaccctggacttttgaattattcaccttatgaaaacgtctgtaaaatatctggtagcagcactgattttcaaaaaaagccaagagataaggttattgtttttagacctatctagttaaaagaagttttggttttaggcctgtctacttaaaaaaaattttttttaattttaaaattaaattaaagaaaaaaattttttctttaaataccttattcatggtttccataatcttttactatggtactcaagaatttaaatataattgttctttttatgttctaacaagaaagtagttatcttggtgtattactctacttttaaacttacatatttattacctttttgcagttaaatgtcttcttaagtaaattataatccccttgattttaacactacatcttatacataataggtaatcaattgtttattaagtagttaaggtatacccaccatttaaagcctggatcaagtactttggatagtatggcactgttctcttttcattatctattttgtcaatgatgttagagatctttgcttggtctgaaactctcttcctttttcttattctatcacatatttatctccctgcatttatccctcttcctcactcaactcttttatctccttttacactctcttcctattctttgttcccccgactccctacatgtatatacacagatatggttgcacataatctttttggatatgtatttgctctttccacttcggaaagccaaccattaagagctttcctttttgtaacgaatctgcttaatgaagctgtctgaatctactttttagaaacaaattcaaattccatgtttacatggtatgtaattctaagaaatttgatctctatcctcattcaaattgctgatcattcttattgtatatgtgccttaattgggaaaacaataatgataatgccgatcaaagacaaaaggctaatctagtgtgtaaagatctcctagaaattgagaacaaaaatatcagtaacccaatgggcaaaagacatgaacggaaaaagaaataaaagtgatatccaaactaatgaaaaggtgtccaatttcactcataataagataaattcaaagtgaaactatacctaagtaccttacctagttcttacctatagaattattaaacattcaaatgtttgaggtgttattttattggtgatattgggtacgggtacattgcctagtgggaatgcacagtgatataaccccaactgagatgcatttggcaatatttaccaaaattacaaatacatttaccttgacttggaactcccacttctggaaaaacgatactgtagacaccctgcaggatatgaaattaggcattgtttatcatatcaaaagattagaaatagttcaagtatccagtaatagggggttagttgaataaactaatggtttattcatacaatggaaactatgcagttgagaagaaaaaaggagtttgtcaatgtatttattatggagagattgccagtgtatattgttcaagtaaaaaaaaaatgcaaggtgcagaatgttatatttaatgtgctagtttttgcataaggagaggagggaagtgggtaatttatattgcttatgtatgcatgtggaattaccagaagactaaacaagaaacttataaaagtggttacccacctattaaagatgggaagagacttctgtgtatactttttcttttatatagtttcaagttttgaattgcataaataaatcactcaaaataaagttaattaaaagaaatgttttgaaaatcacaatcctcatgaaaattaaatgtattgtaaaatatatataaaaagaatataataaaaatatttatacagatgaaataatattttacctattatccattttgttggtggtggacatttgggttcttcctatttactatctctggacaatgtagctatgaatagttttatatctgcacgtgaaaaagtacaaaagtttttatcaggtttatgtctagggatgatattattggttcttagcatattcaactttgctggataataccagccagtttcccaaagtgcaccactgttttccaggttatacttgtatgtacttccaccagcagtggaagagagagtattgattgttccacatatccttgtcaatactcactaagtattttaactcattttctgagctgcttcgtcattttgttaataattgctcataattttccattaattacatgtaacccttaattgaaataattgaaaatatatttgttctttttcattctttcagatgttttcatcttctgcccctgtggatcaggagattaaaagccttcgagagaaactaaataaacttaggcaacagaatgcttgtttggtcacacagaatcattccttaatgactaaatttgaatctattcactttgaattaacacagtcaagagcaaaagtatgtatcttgaaataagtttgccaacagaaaatagttgttattttaagatttataattggaaaaatattccttgtattgccacattgccttaatgtgttatgggaagtaattttcattataatactatagtatcaacatgttgtaaaatcaatattgtatgaattatatctgaaaatgattgaagggaactttacagtttttgcatttagataagtcagcttcttaaggtgttaagattaccaatttgtgtggttttattttttatacaaaggaagtataacttacttatcttcccttttaaaataacacattgtcattgttgaaaattttaaaagtagcaaaaagaggaagaaagatcacccagagtttccacctagaaaccactttaccagtttaatacgtagttgaatccagactgttttaaatagttttggtgttttctgttttttactttatatatagtctgtgcattttctgatgcatttacatagcttttccattgaacattttttatggtagcattatatttcatgtgattatatcataatttagttaataattcctgtatttcagtggtttcctatttttttactaaatgattggtattacacaaaaaattagaagaaaccaaaatgtccagtaatggagacatagtaaattatggtatacccataagatagattgcaacaaaacctttttttaaaaaaatgaggcaaatatactagtactaagatgcaaagttgtttgacttgtatggagcattataaggtttaaatgatataatatatgtagtcacttaaaacagtgtctatgtgtagtcagcactcaaaaacaattacctaatatatttagtggcagaaaaacattacagagcagtacacacatgtataatactcttagttttcctctttataagaagtgtgcatgtgtctgtgtgtgtgtgtttgtatgtaaatatatatacatgtgatatattaaggttagaaactatgcttcacactgttgataatttcgagagagactggaaggttggagtgaggctttcactatttacttttataaacattgtatacatacattatatgtagttttaaatagaggagttatgggaagactttatttttcttttctgttttttcaaacaaaacaaaatgctattagggattatttcagcacaggaaaaacaaaatgcagcaatgaacataaaacttctttggtgtttgagattatttctagggtagacttacagaggcagaatgaccaaattttagggaaataatgtttttcaagcatttacatttggttcctcatcttttcttggtcactttgagggaaaaatgctgtttttcttgatttcttacaaaatgtaccttttcagtatttctttgccatttagatttctttgtgatttgtctgttcattttttctgcttatttttaaaatttttcttcaactgtagataatctctctttttaaagtcatgattgcttagtgatttaaagtaagaaaagagacataaagataatttaataactacgaactaatagcattttgaacctttctttttaggatataaacataccagtggttatgtgagaaagtaagatactagtattgtatttctcagctcagcattttcaaagttgttgaaatattttttagggaagccacctatttcaggccatgtatgagcttttgatgttacatatatgcccactattgagactgttttgcagaaatcaatcaatatattcataacttacgtctggcaatggttgtacttactcttctggagcctggcatcctgctctttctgagctttttgccctctacacctgctgtccaactgctaccctgggacttctctttggtgttgttctaggttggagctactgtttcctgaattctattttttgttatttcctagtttattctttctgtatttggagcatatcttccagttacttccttgcctgcctgaaaatgtcttaatttcttcttcactcgtgattaaattccagtttgaaaattatttaatgtcagaatttttagggcattactcccttctatcttccagtgccactttgaaaagtctgttgccattgtgaattactttttagcatgtaatctcttttttccccccatttgtttgtttttcactttatggtagatggtagttcttaggaccttcccattctggtgttttaaaactgcacaacaagttgtctttgaataggcctttattactcatattgggtatttgagagccctttcaggctggaaacttgtatcttttggttctggaaatttttctgtttcttaatttttatttttaatttttgtgggtacatagtaggcgtatatatttctggagtacattaggttttttgatacaatcatgcagcataataatcgcatcatggagaatggatatccatcccctcaggcatttatcgtttgtgttataaacaatccagttaaactcttagttatttttaaatgtacaattaagttattattgactatagtcaccctgttgtgctataaaatagtagttcttattcattctttctatttcttgtacccattaaccatccccacctctccccaccccaacaactgcccttcccggcctctggtaaccatccttttactctctgtgtccatgagttcaattgttttgatttttagatcccacaaataagtaagaacatgtgatatttgtctttctgtgcctgacttattttacttaacataatgatctttagttccatccatgttgttgcaaatgactgattcttattcttctttatggatgaatagtactccattgtgtaagtactacattttctttatccattcatctgtgatgaacacttaggttgcttctaaatcttggctattgaacagtgctgcaacaaacatggaagtgcagataccttttcaatatactgatttcctttcttttgggtatatgcccagcagtggaatttctggatcatatggtagctgtatttttagttttttgaggagcctccaaactgttctccatactggttgtactaatttccattcccaccaacagcgtatgaagattcccttttttccacattcatgcaaacatttgttattacctgtcttttgaatgtaagccttgtttttttgtttttttttgagacaaggtcttgctctgctgcccaggctgaagtgcaatggtgcaatcacagctcagtgcaaccttgacctcctgggcacaagtgatcctcccaccttaacctcccaagtagctgggactacaggcacgtgccaccatgcctggctagtttttgtattgtctttttgtagagatggagttttgccatgttgcccaggctgattttgaactcctggactcaagcgatccacccacctcccaaagtgctgggatgacaggattgagctaccgcgcctggccctgtgatttttatttaggaggtattctcaacattattttttgcacttctattaaatcttttattttggctgtcatacttttttcggtttctgaagtttttttttgttccgattgttttgtatttcataacatactaatgtagtattctctcttagcactctgaagatttaatgatttttttttcatgtttgctttactttcctttttcttttgtttaggcctctgacttttatgttagaagcttttgggccgggcacggcggctcacgcctgtaattccagaactttgggaatctgaggtgggcagatcacgaggttaagagatcgagaccatcctggccaacatggtgaaaccccgtctctactaaaaatacaaaaattagctgggcgtggtgatgtgtgcctgtagtcccaactactcgggaggctgaggcaggagaattgcttgaacccagaggcggaggttgcagtgagccgagatcgcgccactgcactccagcctggtgacagagtgagactccatctcaaaaaaaagaagattttttcaggtgttagtattttagctattcatatttaagagaaaggcatttaaatgcagattggtggtttgttgtccagtggactttatttctgggtgatggttagggaggtggttcttttgtagggaaacacctgccagcccccaaacagtatcagtatgagatgtttttctttccctttttttttttttaacataaactcaagattttattgtcttcataataaaacaaaagataacacttagaactgggtcacttggctctttctgctcttacctcctcccagttgagaaagcttgcatcttttaatactcagcattctcttagatctgcagttgggctcagtgcactcaagccttagcacaatcttctttgtagtttcagcctttttctggaaaatctacttagtctgcccaccataaccactctgcttcctgtcatatcgacactttccctgggcatacagagaatccttgcccttcttgtactgtgtcactttctagggttggtgcttgccacacttcttacagaaagtcctgcaggttttaggaatgttcaccatgtttgcgggagtgctatcagcaaggagattttttttttttttttggagcaattgagtttctccagcaaagaatcctttagtttctcacctgtgggataacccaaaatgaaattgagtagtaaggtggggctaaccgttttatattaattcccttgttacagctgtacttcattcctgctcattactcttagtgtctcacagtctcaagcttcttctgttcagtttcttctgataataaactttctgcctctttcctagtatgccaacaccttgctattggtgttctgggagtgggaaaaagaggatgactgttacttgcagatactttgaactgtatccctggtttttcattgggtcctcacttctgccctctacagtaccttgtgccttcatgttctaaacttctttttcagtgatagttatcttattgatactctcttctataccatttagattgtgggttcccaccctgctatagtagttgtactctctttattatacagattgtagggttattatgcttttctgtatttagattcttcctagtaagcatgtattctataattaggtttttaaatcataaaaattcaataaatattttcttttataattgtttatagtttgatattttatgtttaattttctaatttatgtaaaataaatcttgctagatgcttatcaatagagattctattttctcccctaaataactcttcagttataagttgaaggtaatgccaggagcttacatgccaaggctggcttataatgatgatatgcccatgtaaatgttgatcaaaggaatagatgggaagctttatatctgaccaatgatttgggagccctattgaacaccctcatctgacaggaaaaaaactaaggaccaagtaggttaatttattttctgaaagtactataaaagttgtttttatgttttaggtttctatgcttgagtctgctcaacagcaggcagccagtgtcccaatcttagaagaacagattataaatttggaagcagaggtttcagctcaagataaagttttgaggtaaatatactttttatagctctcaaagttttattttctacttatacattttattatatcttgttaaatcttgttccccacacccaataaatttacagtaacctaatggtgttcagctgtcttagaacttgttgaatctatttttagtcaatcataactcctcttggctgtaggttgcatgtagtatataggggctaaaaagactaaggtgagatgcctatttacatgcttttatcaaacatgaattagttcatttcttcacctacatagaagtatatactcagtgtttcaaagggagttcaagaaataaaatgtaaaggagtcagacacttttattatttttacagaaagggtctcactgcgtcacctaggctggagtgcagtggtacagtatggctcactgcagcctcagcctcctgggttcaagtgatcattctgcctcagcctcccaaggaggtgggactacaggcacgcacccactgtgcccagctaagctttttattttttattttgtagagacagggtctcactatgttggtcaggctggtctcaaactcctggcctcaagcagtcgtcctgcctcggcctcccaaagtgttgggattgcaggcatgagctgccatgccttgccatcaggcactttataatttattctcttctgctttgaataaaatgggaaatatatgcatattaaataacatattactctgagtgattccgaaagtatagttaaaggaccagcagtagtagcatcacctgggaacttgttagaaatgcaaattctcaggtcttatctctggcatactgaaccaagttgggaggggtttcacaagttctgcaaatgatgctgctgcacactgaagttgtcttttatgtccatcagagttttgtaattttctttgtaatacatatattattttaaatttgtaggtattttatatttttggcaattgtgaattgttcctactttgttcattgctagtgtatgggaaggttaccgacttttgtataatataattattttgtaattggtagctaatggtattatcagcaaataaaaaaaattttgtttctgagtcaaagagtaggaaaaagaaagaaagaaaaaaaattttgtctttccttttcagcatttatactacttattaccttttcatatttgctttttgcagtgggtagaactgtcagaaaagttgttggatgtgggggtgataacagtcatctttatttagtttctgaactatacaggaatgcttctggtatctgactataaaatacgatgtgagttattacttcagatatatttatcatctggtggaagtattcttttattctttaaaaaactcttaattaacaagtgatgaatatgcctttttctctatctctttttgtatattgtttctcttaactcattgatttaaacaaatataattcctaatattaaattattcttgcatacctgggataatctctttagtagtcttaaacaaagtatcctttattttatagagaggcagaaaataagctggaacagagccagaaaatggtaattgaaaaggaacagagtttgcaggagtccaaagaggaatgtataaaattaaaggtggacttacttgaacaaaccaaacaaggaaaaaggtatgtgtttttaaagcaaatacatgtttttgaaagggaataaaaggaaatattacctatttaaaattctagttaatttttgaagtgaaaaaatttcagagatttggcaataaattaacttaatgttcttttttatctattaatttttttaaattttccattaaaatgtttatatgtggaatttatgttattagcatcctggattgggcttaatttctacaaaactgataacgattatcagtttaatgatacttatttctgaaattaagttctatggcctatttgaaaccagtacactgagtttaaaatactaacagggaaaaagcctgtaaattaatattacctctaataaaactaaataaaatgttgaatgaactctttaaaagaaaattttgcctcatagagaaagaaactcaatgcctgtgaatgtgtgcttggatcttcctttagaaatatataaatagtacaaaaatatctattttgtataaattatatcttgagatcaagtcttttaagtagctctgtccaaggaaccattaactctgaatgccagttcacttttaaactgataaagatttaaattttttgagtttaaactaataagattttataataaaataggattatagcagttgttatacagtataaagtcataatctgtactaagcaattttgcaattttgcaattttgcaatttgcaatattgcttagtagaaaatgcgtaggttttggagttagaaaatttttagattttacctctcattggctttgttaccttggccaaatgatataaccttttgaaatctcaggtttttttcatctgttaaataaagatgatattatcttgatatggatagaaatgaagagtaaatgaaaaaaagaaatgtacctcttaaaaaatactaacaatttaactattttataaactttgtggttaaatactctagaattcacacttcacttactcagataagctttgcacgtggttagttaaaatagtgagataataatacatgaagaccacattcacaatatagctgccaagaaaaaataaagaggaagagctactagtttcctctatgcaacttagataagagatgacttttaggatagagtattgactttgttgttgttgttgttgtttgagatggagtcttactctgtctcgcaggctggagtgcagtggtgtgatcttggctcactgcatcctccgccccctgggttcaagcagttcttctttctcagcttcctgagtagctgagattacaggcatgcactaccacacccagctaattattgtatttttagtagagactgggtttcaccatgatggtcaggctggtctcaaactcctgacctcaagtgatccaccctccttggcctcccaaagtgctggaattacaggcgtgagccactgcgcctggctaaatattgactttggcttcacaaagtgagtaagtgggggacagacacattctgggcagcatgtgcaaaggtatagaagtataaaagggtattattgctgaagaactcttaagtaattttatgttcttataagtaaataggtgtagtgggagatgagacaagaaagacaggctggatccagactgtaaatggctttgtgtgttataccaaaggatttgtattttaacctggaaagcataaatagccaattgagatttttaggtagaggtatgacatgaagactcttggagctttttgaagaactaaaatgaatattgactttctgctatggtttgaatgtgtccccccaattttttgtattggaaacttaatcccaacgcaacactgttgggaggtggggcattttagaggtacttaggtcacaagggctctgctttcgtgaatggattaatgccattataagagggcttgacagagggagtttgttccttttttcctttctgtcatgtcagaataaagtgttcctcctccttggaggatgtagcatttaaggcaccatcttggaagcagagagattaggccctaccaaactgccagtaccttgatcttggacttcccagcctccggaactgtgagaaatacatttctgttttttataaactacccagactatgatatttattctagcagcacaaatagactaagacacattctgagattgaaagatcagaaccttttcaaggactattgggtggagaagattaatcataatggattaaaaagccagtgtaaagaaagggagagattgtttagctttatgctgtttgtaagagattacctaaaacataaggacacagaaaaattgaaagcagactggatgcggaggctaacacctgtaatcctagcactttgtggggccgagataggtggatcacttgagctcatgagttcaggaccagcccgggcaacatggtgaaaccccatctctacaaaaaatataaaaattagcctggtgtggtggcacacgcctggagtcccagctactcaggaggttaaggtgaaagggattgcttgagcctaggaggcagagattacagtgagccaagattgtgccattgcactccagcctgagtgacagaggaagattgtgtctcaaaaaagagaaaaaaagaatggaaagaaatgtttcagataaatactcaccaaagcaaagttgatattactatattaggatcacacagaatagacttcagtgcaacaagcattaccaacattaaaatgactcatataatgtttaacacttaaccaagaagatataaagactctaaaccagcaagatataaagactctaaacttatatgtatctaataatttagtcccaaaatacataagaaaaataacacaatttcaaggagaaaagaacaaatctgtagtcatatggggaaaattctttatacatttatcaggaattgttaagtaacaaaaaattaaggcttgaagtgttgaataagacaattaatattcttgatctaatggatgtgtatatggaaccatgtagtcaacagtttgaaattgacattctttcaagcagatgtaatctgttacctcactatgctagaaagcatgaatttgaacaaattccaaaagattgatgtcgtatgtattatcttctgcaaccacagttcagttaagttagaatataactccttgaaatcctgtatgtttggaaatgtaaaaccaggcttactggtgttcattgacctactggtgttcattgaccattgaataaattagaaaacctttagaactgagtgatataaaaaatgcacatcactgcatgtaggctgtacctaaagacactcttagaggaaaaaatttaaccttatatacatgtattatatcatgactgaaaattaatgaactgaaatagactattgtgtggtcaggaaaaggaggacatcagaagaaagaatgaacatcaaaagaaaatagaagtaaggaaataataaagataaggatgaaatggatgaatagaaaacagtgaaacaatataaaggattaccaaaacctaaatgtggttattttcacaatgaacaagaaaatgggcatcagacaagattaataaaggagaaaaggcacaagtgttgggattggcaagggactcccaaattacagatttagctataaatcggtaagcaataagaaatatataagaaataaggccaataactgaatcattttaaagatgatacatttgaaaacttagactaaataaaattctcagcaaaataaaatttaacaaaactaactttaaaataaatgaaaaacctgaataaatatatgtgtgtgtgtgtgtacatatatatgtgtgtgtgtatatatatagctattagggttatcaaatcagtaattaaaaatctgcccacaaataactaaactagtcaaaacaatggtgacaaaaggaaaggaaacatcaggcccactacagcccatgatgactaaaatggaaaagactctcaaaaacaagttatggcaaggatgtggaattgaaactctcctgcatttcttttcttttcttttttttttttttttttttttttgagacagagtctcgctctgtcgcccaggctggagtgcagtggcgcgatctcggctcactgcaagctccacctcctgggttcatgccattctcttgcttcagcctctctagtagctgggactacaggcgcccaccaccatgcctggctaattttttgtatttttagtagagacggggtttctccatgttagccaggatgatctcaatctcctgacctcgtgatccgcccgccttggcctcccaaagtgctgggattacaggtgtgagccaccgcgcccggcccactctcctgcatttctaatggaagtgtaaattggtagaaccactttggaaaactgtttgtcagtagctgctaaaggtaaacataagcctgccttatgatccagcattcatttcaacaaaacttagtccctgtattaaaagacatgtacaagaatgttagagtaattttattcattgttaaatgttcatcaacagtgtaatctataaactgtggtatgttcacataattatacacatcagtaaaaaagagcaactacaactatgtaacaacatggattattatcacacatataatgctcagcagaagaagccagacacagtagaatactgtataattccatagcaaatcaaggataggcaaaattaacatatgttgttaaaagtccaaatggtgcttacctttttggggtaaagaatattcactgggaaggtacacaggggtgctggaagtgttctctatttgattgggttagtagttaagtaagtatacacattattataaacttctctcatttaggatttctgtactttactcaataaaaaattaaaatcaaataagaaaaactataagaaaaaatctacagaagatatgtatagtcttaatttttttttaaagaaatatggtattgctttgttacccaggctggagtgcaatgctgtggtcatggctcacagtagctcccaactactgggctcaagtgatcctcccacttcaggctcgcagatagttaggactacaggcttgccccaccacacccgactaatttttaaattttttttacacatgggtctcactgtgttgcccaggctggtcttgaactcctgggttcaagtggtcctcttgctttggcctcctaaagtgcaagtattataggcatgagccactgtgcctggctttaatgcatgttttaaaatgtatttggggtttgttttaatcaggtatggtaagatacagacacaggactgacatggagaaagaaatttttatacttacagatttctagaagtaggaggggcacaatatgctgttttgggatccttggggtgttgcttcacgagccagaaacctctgtggccagtggcacctttgcccgagttttactctggcccagtgggctcattctgcccactcagcctggcaggctgcgcttggctcgtgctaccaccctggatcccacacctgccaagggtgagctaggtgcagaatggcaaggggtgtgtgaacgaccatagggtccagccactatacatagccaggcatgccggctgtggtggtgtgagcagctccaggcgccagcacgggcgccagctccctgtgaggctgtggctggaccaggtatagcataagcagcttctgtggctgacaccagggaacggggtggtactggaagcttggagacaccaggaaccacagagccctaaagagggtgtcacagccctggctcgggaagctcataggtctgggctcccctgaagggctgtagctcttctctccttctcttgtcttttcttcttgttgcctgcaacgtagtgagcagggggcgtgtttcagccatttgtgttacagcattttaagccccaccattcagtgggtcctgagttcttgtcctgcatccaggaagaatgaggtaagcaaacaagtggagggtgagcaagagaagctctgttgagcgacagaacagctcagaggagacccacagtgggtagctcctctgaatggctacccccacctcatttgcgttctggtacatgtggacacagtcaatgcagcagtacccgatgtcaattgccaccttcacagcttcagttacctggcccaagggggacttgcaggtgcccagccccagtatgagcatctaggtgctgttgttgagcatgaggtagctggccgtggctgctgcactttacagacccccacctggaactgtcttattttattttatttttttttagagatagggtcttgctctgtcacccaggctagaatgcagtgttgcgatcatggctcactgcagcctcaaacccctgcgttcaagggatcctcctgcctcagcctctagagtagctgggactacaggtgtgcaccaccatgcccagttaactttttgtagagacgatctcactacgtttcccaggctggtctctaacatctggcttcaagcaatcctcctggctcagccttctaaactgtttggaatacaggcgtgaaccaccacacccagcacataacaattttagagatgttaaaaatgtgaaaacatggtaagactataggagattatttaaaaaaaaaaaaaaagcgagaacaggctggacacagtgactcactccagtaatccaagcacttggggaggccaaagtgcgagtattacttgaggccaggaattcaagaccagcccgggcaaaatagcaagaccccacacacacaacaaaaagtgaaaacaatgtgtctcttagaatagatgaactgtgatatatactatttgtgggtgtaggttaacatgaatgtacaaaataaaaaacaccaaaatcaggatagggttacctctgttggaagaagtcaggggaatgggatttggaagggacacataaggacctcaactttatttgtaatattttgtttgtcttctgtagccttttcagacaaagagtgaagattcattaaaacgtgattgggagtacatggtaatatttatccagactttttgatgtggctgaaatatgtcattactttttacaaattggaagtgaggaagagtagataagtgtaaagcggataagtctggcttgaaaagaaggataatagaggaaagcacaatacgtgggaaggtttttgtttgtttaagtgagaaatacaggtatcctttgatctgaacagtacctgtgcacactcaggaattgattatattcctacagattttcagagaagtcctttgttgtccttactttcctttatctgaaactttggagtcaaatagacgtacttaaccacatagactcagaaagttaggagtacttttacttgaacttgtttatacttgtggcaaaataaccaacagagagaatgaaaatacagaagctagagtgtatttctgaagggttaagagttaagatctagactataaatagagtaattcaccctggataagaggagggtcactaacctcacttacattagaaagaatatgatgggaataggtttaaatattaaaatatttttaggtgtgagagtgatattgaccaaatattctcaatgtattgtgccccaaattttcatttcattgcaagaagcataaggaactaagagatgaggcaacaaggttcggcttaaagagtggttggtggtggttgtgttttttgttgtctagatttttatatctggtatcaatagaagttaccattttttgaaataactatttgaaatttatttgacctttgcaaaggtcacagaatttactgagtatatttaatattctagacaatagactgattctgtaatacctaacctttgaaaatgtatcatccagcctcaggctatttccctaatctgtcttttccagatagggaaaaaaaaaattgccaacacataagaatttatatatatttcgacatttatgtttattattgttttgtgttttatttttcatattgatagagtgagaaaatttttgtagtatgatctacattcttcattttatactttaagcctaatactcctttttagtgcagagaaatttgtttctctccaattattccttataattaaagattactttggaacttaactcttcaaatgcagagcattcttcacttttattcattatctctttttaaattttagagctgaacgacaaaggaatgaagcactatataatgccgaagagctgagtaaagctttccaacaatataaaaaaaaagtggctgaaaaactggaaaaggtaaaaggcagttgtgcaaattcagtgttttgtattactgtctatattccaacagtaaaggtaggaataattaaaatatgtttatggttgagacagagagtaatttttatgatcttacaaaatcatttaaataaacaatttgtaaatgttagttaaggatgatgttcaccaacccttttattatcaggagaaacttttttatccaaagagggaaaagagtagagagaggagaaggaacaaaatacagagaaggatggaatgtgttaacagagactggagctaaagaagtagaaaaaagaaattcatttttatcacttcaatgaaaatgaagatagattatgtagctttcaactggtctccctcagtctgctactctgagaggggcttgcttctgcctctcggaaggttccttgaactgatttgatatagaaataatagtgagtttattacattcatttattatattcatttattatctttaagtaatatcacatggtaatgaaatgtgtatggaggaacaccacagttggatattcagatattgagctcaaaagagaggtctggtaaagagatactaatatgggagacttccatcttgagatagcaatgaaagcagaggaagtttatgattctgatccaagaaaggtagaaaggcagaggaaggaatgttcaggtagaagggtagagtaagaagatgggtgttcatttattaaacaatcatgaaattccttttacatgccaggtactgtgctagtctctgggagattcggtgatacataacacatgatacctatcctaaagagctcactgtctagtaagattgacaagtatgtaaacaaataatttcagtattttggaataagtataatatagaaataagaggtaggtgtggtagggtgggtgaaggtggcagtggttaataaactctggtgggcccaaagaaggcttcacagagtaggcaatgcttgagctgctaggctatctcaaagattgtgatatatctttgaacagtgttaaccagggaaaatgatcaaaatctatgttctaggaagctcaccctgatgtcatgtgaagatgcatttgagaggtgagagacaagtcaaggagactttaaaagacaaggcaagagatattgaagatgaaggagctgagtaggtagctatgagggatgttaaagttggggaatcagtgggatctagtgaccacttgaatgcattagaagcgggcagtatgagaaagaagaatataggatatttttaggttgctggtttgagtgactgctggatgattgcatcatgaatcaaaatagacagtttaagaaaaaaagttaatgagttctattttggaaatgtctgtagaatatccagttataggtaggcttttgtatctataggtctggatttagacatacaaatctgtactagggctgtagttttgagaattaacagtactgaattaaagtggtagaagccttggacattgacagagttcatatagaatgagaacaagatgaaagataccctgggagataaagaacaggtagattagcttttgaaagatatcgagaagtgatttaaaaaaattagagaatcaggaaagtataataagaaaagccaaggtgatagaacattttaaaaagaaggtggtgatcttcagtgccagatgttgcaaattggtcaagaagaatgaggactgaaccaggtgtggtggcttatgcctgtaattccagctactcagcaggctgaggtagaaggattgcttgaactcaggagttagaggctgcattaagccatgataatgccactgcactcaggcctgagtgaaagagcaagaccctgtctgtaaaaaatcagaaaaaaaaaatttagaaagatgaggaacaagacagggctattggtttttataatcagggagtcattggatactttgtagagagcaacttattaaagtagaaggcacaacctctgaaatgggagaaatggaaagggagggggtagaggtagctaacagacaattctttacatacggtaggtgaagaggaaataagtgtgtgtggtgggttgggagaggcagcgaatggaagggtagaaagaagctaagttaaggtgaagaagctgtggtaaagcacctaagggtatcctgaacatattagtagggggagattgaagatgctagaattataaggaataaaagatggcacaagggtctgaatgatatgcaagatgatagtccaagagcagaagtgagattcttttttttaatgaaataggacatttctttatgggaaaaaagtggataaaaacagaaaaaagttttaggtggaaggaaattgaacgattttgaattaaatgtctttggtctcataaattaagatgttgcttaagtgattttcatagcgtaaggaggataggagggattttggaaacttggggtgagtatttctcataatatatttgcaataaggaaagccaagaaatttgctaaacttttgagagaatatatggaaagaaaagagcagtcaggaatgatgagttaataaaaggaagcaaggaaaacaagagtggccagagtcaagtgtaatattatcatgacagctacatgataaaatattttagaggagaagttaccaacaatattaaatactgagatcaaggagaaagtctgcagttgattacaaagtggtcattcctttgcagtaaaactgtgagtatcacttggcagtgtaaaatattaaggtctcactaggtactgaaatcttttttttttaaattttattattattatactttaagttttagggtactgaaatcttaagtgtgaattagttaatcagaacgctgttttgagagctaaagagggtccttgtgggaatgaaatatcttagaagggatttttaataaggtgatcagtaaggggaggtagaagacctagtaggaggaatatgcttggggagaagaaggactttatggagaaggagagaagaatgtaagagacaggttttgtttttttacacttaggattatcaattgcaaacaatgctcagcaaagccctatagttaggtggatgtaacagggtaacaaaggaattggggcagatctacccaatcttctcctctcaacagtgtatcttgggtgcttttttctgttctacattttgggctgtggtttcgttggtaaattttgtggttcaaatttcaaaagtaacttctctggaatatttgcactgaaattaacctttagtaactcggacgcagcagctgtagatgaatttttgacttcagttgatgcaattgcctatctgttacaggttttctggacaggtagtagtgtctttttctctgtcctttgctactgcccaggaacttcactttgcttcttttcactacaaggctggggacttaaatgtatgaaattcttagtctactctcctgcttatttctgaaatcactactgacatttttagcttgaaacacctaaaacttacaaccacattagtatgtccacttaaattattgttttaggttcaagctgaagaagaaatattagagagaaatctaactaactgtgaaaaagaaaataaaaggctacaagaaaggtgtggtctatataaaagtgaacttgaaattctgaaagagaaattaaggtacagtattctgttgtagaaaaaggatttttgtgtggacatggaaaaaactgaaacactttaaaacacaatattttattgttgtaattataggcttacattatatagaaggataggcttcatgactgaaactgttttctagctatagagttagaattagaagtgaagtaaaatgtgttaatgctaataatatttgtaaatacggagacatactgatcaacatatttgctttgcatatatttagagaaaattaatagatataatgtccttgatgtataaccacattaactcactagtaaaatgtgtataatatccgatgttctaaaaaaaagtgtttttcaaatcataaaaaattacctagtccagacttctcattttataagtaaacagaagccccgagagtagccagaatttactgaaggtctgaaagatcgaagtcttctgactccaatgctctcttttagtacatcatgttgtcctctcaaaactaacacccatcaactttcagaggttaatattaaccagtctttatcacttcaaactgttaatttaaaaaaaagggggagcaggaagcaatcaatgactgatttgtctaattttgccatactttccttaaggtagtctgtttagtatttttgccaaggaggaggaagtaaagatactttttactagagtattttttagaatcggttatcgattgcaagatatacttttaagaaagaaagatgctgccaattacactatgatgcaatcctttatcacttaaaatttttatacttcatgaaagaattcttgtatttgtaattagatatgatttcttaagtcgttattttcatatttttcaaaaaagttattctcatatttcaaatataagtgaaataaattggttaagatatttttaaaacttcacatttggagtctaaccctctaaaatgtctaagtttttcctcacagtatctcccagtgtgccattaagacttgttgatgcagtatttcttaaaagaatccttgtaagaacagaaagtcattgatgctgggctcttaagctggttgtacaattatgtagagccagtttactttttctcctgttttaggaatccaaaactttgttgataatgtgaaatgctatgtcagggattttgaagttagatttcctgtcttatataattaaacagggagcagaaatgcttttaagacagtagggctgtccttccctaccatttactgtgagacactaggaaagttatataacctttttgtgcctcagttacctcatctgtaaataagaagtaataatagtgccaaccatataaagttgtgagtgcctggcatgcagaaagtaggtatttagtaaatgtgagcaggtattattttagaattaagcttcaaaaaattttaaaagtgagattaaataaatatgattaaaatgaatgcatatatattttattttcatttttattctcttttcttcataggcagttaaaagaagaaaataacaacggaaaagaaaaattaaggatcatggcagtgaaaaattcagaagtcatggcacaactaactgaatctagacaaagtattttgaagctagagagtgagttagagaacaaagacgaaatacttagagacaaattttctttaatgaatgaaaaccgagaattaaaggtccgtgttgcagcacagaatgagcgactagatttatgtcaacaagaaattgaaagttcaagggtagaactaagaagtttggaaaagattatatcccagttgccagtaagtatgtgtgattacgtaatggaaaagaagaattttactaaagtgttttagaaaagactatcattttgtggttgctttattagcttctaatttctttttctctatacttttagtcatgaatttctcttctgtctaaatctctattttttttcctgcacttaccattctacacttttccccagtttctcagatgccatatataagaatggcacagaattttttttaaacagctttgttgaagtatcatttatataccataaaatttgcctgttttaagtgtactaatctatgatttttagtaaatttataagttttgtaacaatcaccatgatccagctttgaaacatgtctgtcatccccaaaaggtattttggacccatttataattagtccctgtactcacttctacccctaggaagacactaatagtttttgcatctgtagatttgtcttttctggacatttcacataaatgaactcgtataatatgtgctcttttgcacctggtcttttgcattcttagagtcgttcatgttgtgatatcagtatttcatttctttttattgctaaatagtatttcattatatagatatgttatattttgtttatccattcactggctgatggacatttggattgtttccactttgggatattatgaataatgctgctatgaacgtttgcatacaagtctttggacatgttttcatttctcttgggtagatacctaggagtagaattcttgggtcatatggtgaatttattccaaactgttttccaaaatgtctacactattttacattctcaccagcaatgtatgagggttcctgtttctccacttccttgccaacacttgttcttgtctgtctcttttattataaccatcttagtgggtgtgaagtggtatcacattgtggtttttctttttttttgtttgtttgtttttttgacggagtctctcactctgttgcccaggctggagtgcagcagcatgatctcagctcactgcaacctccacctcccaggttcaagcaattctcctgcctcagcctccctagtagctgggactacaggcacaagggacggggtttcaccacattggtcaaacgggtctcgaactcctgacctcatgatcaacccaccttggcctcccaaagtgctgggattacaggcgtgagccaccatgcctggccctaatttacattttttttaatggctcatgatgagcaacttttcatgtacttattagaatggcatagaacttaaaattttttttctttttttgagatggagtctcgctttgtcgccaggctggagtgcagtggtgccatcttggctcatcgcaacctctgcctcccggattcaagcgattttcctgccttatcctcccaagcagctcaaactatagcacgcaccaccatgcccatctaatttttgtatttttagtagagacggggttacaccatgttggccaggatggtcttgatcttttgaattcgtgatccccctgccttggcctcccaaactgctgggattatgggcgtgagccaccatgcccggccttttatttttttgaaacgaagtttcactcttgttgcccaggctggagtgcaatggcgagatcttggcgcactgcaacctcagcctcctgggttcaagcgattctcctgcctcagcctcctgagtagctgggattacaggcatgtgccaccatgcccagctaattttgtatttttagtagagacagggtttctccatgttggtcaggctggtctcgaactcccaacctcaggtgatctgcctgccttagcctcccgaaatgctgggattacaggcatgagccaccacgcctggcctaaaatgtttttataataatggtctaccaccttttctcttttagtaatatttgtgaccatatatataaatgagattaagaagaaggtaagtaaacctattcaggaatttgtaatcaataggtgtaaaatgaaggaaagatcaggggaaactataggtaaatatattatggttggtttcagatatgaatgtatggtagactagatggtagacttaccaatgttaaactgttatgaactgtggaattatgaaccaaaaaaatctcagaaatcatctgattcaatactattttattggtgaagaaacctagacccaagaaagtaaataacttgcccaactggtaagtagtagaatttaaactagaacataagatcttagctcctctgatatctgctttcccaggatgctgtttatttgcttggatttttaatgtactgtttgcttttgaaattagaaagtaatcatatacagataacaattttaatttggcattctcatttgtgtatcaagaattatttcatatatggtcaggcacagtggctcctgcttgtaatcccagcattttggcaggccaaggtgagaggaactcttgaagcaagagttcaagaccagcttgggtaatacagtgagaccctgtctctacaaaaatgcaaaaattagctgggcatggtggcgcatgcctgtggtcctagctactcgagaagctgaggtaggaggattgcttgagtccaagagttcgaggctgcagtgagctctatgatcataagctccagtctgggtgacagagtgagaccctgtctctcaaaaaagaatcatttgagatatgattccgaatgtggtaatgtatgcttgatcgtttgtttcttgtagtgctaagaatgacacgattagaaaatgtgatttttttctacttctaggaggtgtgattcggttatagtttgaaggtagaagtcattaaatgctaaccttgctcctttttataactgtcttttaaaattctgtattatccaaacatacagaaaggtgcatatgctagtgtagcaccttatttgtaaaatttgggacacatattgtcttatcaactctatgtttttttagaataaaattttacaggtaaatcttctttgtgtaccttgtcagatcccaattatcttcctctctcctcagaaatggcaattattctgaaattcatgtgtatccttctcgtccatgttttaaatattgtcacatatcgatgcatctagaaatatatatatgttgcttagtgtttttatgaaaatactgtttgccactataatttgtttttcactcaatattgttatgagatgtatccatactgatttatgtgactcaggtttatttcttttaactattgtagttttccaattatcttaatatttcttaatgtatttatatattctcctattgatggacattaagttgtttccattaaattcatacagtttttaaaatttgaagttctgaataaaaaagcaaatgcatctcatttacataagtttacatatgtttgtttttaaacttgcagttaaaaagagaattatttggctttaaatcatatctttctaaataccagatgagtagcttctcaaacaaggaagaccgttgcattggctgctgtgaggcaaataaattggtgatttcggaattgaggtacaattttcagattctgcagttatagcaaatagaatgttttttattggtaattaagacccttaattggccgggcatggtggctcatgcctgtaatcccaacactttgggaggctgaggcaggcggatcacgaggtcaggagttcgagaccagcctgaccaacatggtgaaacctcgtctctactaaaaatacaaaaattagccaggcatggtggtggcacgcgcctgtaatccccactacttgggaggctgaggcaggagaatcacttgaacccgggaggcggtggttgcagtgagctgagatagtgccactgcactccagcctgagcaacagagtgagactccattaaaaaaaaaaaaaaaagacccttaattgaggaatttaaaaaatatacagaaaagctcagagaatattataacaggtatctgtgattccacaactaagaattgaatcttcttaaccaggattgattctccttaaaatttgtggtatttgttttaaatctgtttctccaaataaaaaataaaacattacaggatgaataatgccctttgatccttatgactagtcccatttttcccctaagtatccaccatcatgaattggatatatatttctctattcatttttgtatgtttacacacatgtacacaaatatgtaccgtatactgtgtgcaattttgctttttcactcagcagtatttaaaaaattcattcatattgagatagagtagattaacaaatggatttgtgtaattacttttaatagctgtataggattctgtcctataacagtgtcataatttatttgttcctttataggtatcttgtttctgttttctgttacaaacagtgctgcaaaggacatccttgtacatgttttcttatacatatatatgagagtttctgtagtatatattcctaacagtgaaattgctgggtcatacagtgtgtacattttcaattttactaaataccatcaagtttgtaaagtggctgaaccaatttataattctacagtggtatatgggagttttcatatcctgcctaaagagttgactaatattagaattctaattttttaaatcaacttgaaaggtgaaaaatagtacagtatgagtttttttatagaatctttctaataatttttcccttcttttcttttgtgccagaattaagcttgcaataaaagaggcagaaattcaaaagcttcatgcaaacctgactgcaaatcagttatctcagagtcttattacttgtaatgacagccaagaaagtagcaaattaagtagtttagaaacagaacctgtaaagctaggtggtcatcaagtaggtaagtatattgagttattttaataaattatattcagagttttggatgatagtttttttttaaaaaaacttttatttaaattttttttttaatttaagttcagggatacatgtgcagatttgttacataggtaagcttgtgtcatggaggtttgttttacagattatttcatcacccaggtattaagcctagtaccccttaattatttttcctgatctactccctccttccaccctccaccctctgatagaccccagtatgtgttgttcccctctatgtttccatgtgttctcagatgatagtttttaaagaacaaatttatcaactgtttggtttctattatcaaacatacttgataatctgttactagttgtggtctgataagacagcaaaagttatttcagaattattagactttgtatcattcgttaatgaagtaaaattgatatccaatagaacagtggtccccaacctttttggcaccagggactggttttgtggaagacattttttccatggaccagggacagggtcagggttggtttcaggatgattcaaacgcatgacatttattgtgcaatttatttatattattatcatattgatgttgaaataattatacaactcatcgtaatgtagaatcagtggtagccctgaccttgttttcctgcaactagaaggttccatctgggggtcatggcagacagtgacagatcatcaggcattagattctcataaggagtgagcagtctagatcctgcgcatgtgcagttcataatagggtttgtgttcctgtgggaatctaatgctgccgctaatctgacaggaggtagagctccagcagtaatgcgagcgattgggagtgggtgtaactacagatgaagctttgctcattcgcctgccactcacctcctactatgtggcccagttcctaatgggccatggactggtaccagtccgtggcccaggggttggggacccctgcagttaagatgcacccattttaatatacagtttgatacgttttgtcaggtgtttgtgttttaatgtttaactcttgttaccatcaccacagtcaagacataagacatctccaccaggatcctttgtactttttcccagttaacttttaggcttaattttctctctttttttttttttccaaaaaaaccacaaaacttttcttaaagtttagatta

SEQ ID NO: 24 - DNA, 30947 bp, Homo sapiens
  source 1..30947: mol_type = other DNA
actgccccgccccggcgcagactgcgtgaggcgccgccgaaggcgcggggcttgccggggatcgtggtcggcgagcgcgcccgagcccactagcggagcccgcccgggactacatttcccacaattaccgccatgatgcccattggtgggggaagccatgggaaccggaggccgtcagggggagaggcgggcggcgctcacgcctggcctgagggggccgagactgaggcggttgcggaataggactgctagccccgcccagagtccctaccctttggagaactgcgcttctctttcggagggagtgttcgccgccgccgcggccgccacctggagtttcttcagactccagatttccctgtcaaccacgaggagtccagagaggaaacgcggagcggagacaacagtacctgacgcctctttcagcccgggatcgccccagcagggatgggcgacaagatctggctgcccttccccgtgctccttctggccgctctgcctccggtgctgctgcctggggcggccggcttcacaccttccctcgatagcgacttcacctttacccttcccgccggccagaaggagtgcttctaccagcccatgcccctgaaggcctcgctggagatcgagtaccaagtaagtgcggaggataaaccagcctccttcctttaacccagctgcactgcgttgtcgcctctcacccgtttagaaacttctggtggacggccctggtggtgaagaggcgagggccgttcaggaagccagcccgctccgcgcaggcgcgcgaggcgaggcgaggctctcgctggggccggggacccagaacttaggctggacctggaattgatgactacccgccttctcccctttcctccggtgggaaggaggccagaactggtgatgtcgctggcttttctctttgtttcctaattcgcccactgcttttcttagccactacacgctctcatactgagaatttcacaatgcagaactgatacacgttctccttcatcattggacaaggtgatgacacttgtttgaatcacccccacccctttcacacagttcagatgttacaaatcactgtctttgcttcagttaagggtttttggattatgatcgtgtaattggcattaagcccgattttgaaattttttggaagacgctgttgctatatttaatgatacatttccgtttaagttatatatccattattttcaaaagatcaaatcgtatattaaaactttataacctttcttttcattttttcattgagcattgtaagcatttccctcgtgtcattgttttttttttttttttttgagacggagtctcgctttgttgctcaagctagagttggagtgcagtggcgctatctcggctcattgcaacctccgcctcccgggttcaagcgattctcctgcctcagccttccgagtagctgagattacagacgtgcgccaccatgcccagctaatttttgtatttttagtagagacggggtttcaccatgttggccaggctggtctcgaactcccgacctcaggcgatccacccgcctcggcctcccaaagtgctgggattacaggcgtgagccaccatgcctagcatgttttctttttagtatctgcataatattcttgctgggaattaccttattttatgtagtcatggtggtagggggtaatttcttagaagaaatcttgttcgttccacagcaaattccgatgttttcaggtagcagtacaggggggaaagaaaaggcattgatgtgtttcatctttcagttttttagaagttaattataatcatcaaatgttaattttttaagttgatgtagagaattgtttttaaataccaggtactgtcacatacagagcaaaataaaaagttgtagaattttttatacgatggaactttaggattaagttgtatatagatacacacgataagcacagagaataaaatatctaaaatcacatagtgagcaaaactgaggctaaaactcagtgtttcttgatttccagtaaagttcaaaagttcaacatttactgaacagttaacacgtgccaggaattgtgcatggaggtgggggagacggagggggagctgggttgtgcgggatgtaggtaaaagagaaagaaagaatccctcttctcaaagagcttaataaaggttactggctcataaacaggtaatttcaataaaggatggctaagtaccagtagaggagggtcacttctaagggtttcagaagaggattcctggagaaaataaaatttaatccagaaagatgcttaattgagacgaaaatgccaggaacaaggggcatttcagaaaagcgaacaaaaagatccatagttcttaaaatacatagtgtaagtggggatggttagtgtgtagtggacactacaagtactgagtttgtattagactttaagacatataaagtctagggtgggagtagcagaaaaggacatcggagaggccagaaggctggggtcattaagcatgaatcatagccttgtttgccgtgctgagtaggttttccttaattttgtacaagtccatttaagatttaagcagatcactggatgcagtgtggaaaatggatttaaggagagcaaaattagagtcaaggaaactaactagagggctagtgaaatagtctagataagaaaacaatttgtattaataaaaaaatcttcagtatttacacacatattagggaagatatctattttaactactgtcctcttatagttaagagcaccagctcttaaccttagcctgggttcaaatcttgactctgcctacttaaaacttatgtgatcttctcacttgtaaaatagagataataattgtaactacatcatagagttgatttgaaaaagcatgagttaataaatgctcatattcagtgtaaagtagtctattaaaaaatgctcatagatcatccctgacacatagtaaataatcaatgaatgttaattttacatttatacctctatagttatgtagctggcttggtttagctttattctttacatctttagtcactcttaaagggactgttcctttttttttttttttttttttttttttgagacagagtctccctctgtcactctgttacccaggctggagtgcagtggcgcgaccttggcccacagcaaccttcatctcccgagttcaagtgattctcccgcctcagcttcccgagtagctggattacaggcatgtgccaccacacccagctaatttttgtatttttagtagagacggggtttcactatgttggccagactggtcccaaactcctgatctcaagtgatctgccagcctcagcctccaaagtgctgggattataggtgtgagccaccgcgcccggctgggactattcctttaaaacattctccctaaacaatttgttttgattaaggaaagaggtaaaatcatttgtctgtaatcctagacagtgttggtgagatgtgtagggtaactatcatcttccaccctgtttgtatttcccaacttgtttaatttcccagtaactacatcctactaatttttgtcttaaagttagtttttaaaattttatagaacaatctagttttgtccttggttacttattgaaaattttactaatttcttactttttaggttttaggagaatactttttggataattgactagcctcacattatattgatagaggttcttgaaaactttaatgccaattcatgtatcttatgactaaaatagataatccatttagaaatttaagtcattcttgcgtgcttgatatgtgtcagcactatccaagttgctagggatacaatggtgagtgaaaatatcagctaggtgcagtggctcacacctgtaatcccaacagtttgggaggccaaggtgggaggatcactcaagcacaggcgtttcacaccagcctggacaacatagcaagaccccatctctaccaaaaataaagttagccaggcatggtagcacacacttgtggttccagctacttgggaggctgaggtgggaggatcacttgagcccaggaggttgaggctatggtgagctgtgatcacaccactgtactccagcctcggtgacaagagcgagaccctgcctcaaaaaaatatatatatatatgtttgtgtgtgtgtgtgtgtgtatagtctgtgccctcatacaatcaagtattaattaatcaaattattacacaaatacatgtcaaaatatttactaggggtaatgaaggtaagttcataagactatgagtgggctcagtaggaggacttcattttatctggaaattgaaagacatccagaagtagagttaagatctacagaattatcagactttcactaggcataatggaatgagtggtacgagacaatgggtaaaaaagaacaacaacgtgccaagatactaaggaagaagagagaaagatacctttgaggtcctgaaagataggatacagagagagaaaagtggtacaagtctactttagagaagtcagtagcaacagcaaccaaatcattgtgggcttttaggtccttgttaaggatatgggtcttttgcagagaccagtaatacgccactgaatagttataagcaggttaactcgatctgtgttttttaaaagatcgttttggccacaaggtattgagcctctctgtaccagtttctatactttaacagtaatcacctgctccccactatatattattgtgaagaataaatatgctaatacatgtaaaaggaatggtatctagcaccaaataagcactcaaaaaatgttagctagaaaataaaccctgagcctagaacaacaatacttttttaagggcataataggcactaaaaagtatctattgaatgagtgaaccagacgtttaccaaacatgtaaaactatctgggtgagtttttgggagaatatagctatatcaatttttaaaaatttttattagtctttcatttttgtatagagccaaatttcaatattttctggtaaactggccatttcatctaatttttaaaatttacttgtataatatacctgatgccatttggaatatctcctatttccattttatctacaggtatacatgcctaatattacatgtataaagtagataggactactttattgatctttgggaaaaaatgtcttttgagtatttattattttttgttttatatacatacacacacatatctattatatatacacacattttatacatatacaaaatatataatatattcatatacatataaatgtatatgtatatataaatatgtatataaaaaaacaaaaactcaaaagccatatatgtgtgtgtgtgtgtgtgtgtgtgtatatatatatatatataggcataagggagtaagtggaacaagacaatggattagaaggcacaacatgtgccaagatactaaggaagaagagtgaaagatacctttgaggtccatttatatatatatatatatatatatataaatggcttttaagtattatataaatatatatatataaatggctgggttttggggagaataatatatttaataatttaatatatatatttgggttttatgtgagtctgtgtgtgtgtatatatactttttttttttttttaagagatagggtctccagcaatcccattactgggtacacacccagaggaatataaatcattctaccataaagacacatgcatgcgaatgttcagtgcaacactattcacaatagcaaagacatggaatcaactaaatgcccagcaatgacagtttggataaagaaaatgtggtacatatacaccatgaaatactatgcagccataaaaaagaatgagatcatgtcttttgtgggaatatgggttgagctggaggctattatccttagcaaactaacacagaaacagaaaactaaataccacgtgttctcacttagaagtgagagctaaatggtaagaacttatgaacacaaagacggaaacaacagacactgggatttacttgaggagggagggtggaaggacagagaggcacagaaaagttaactattgggtactgggctttatatctgggtgatgaaatactaagttggtgcaaaaataattgtggtttttaacacgtttacctatgtaaccttcacatgtatccccaagcctaaaataaaagttaaaaaaaagagagatatggggtctcactatgttgcctaggctgaatttgaatttgggcacaagtgatactcccacttcaaccagcctcctgggtagctgggactacaggcacatgccaccacacctgtctcctttatgaatttttttacttccaattataaaagtaatatacaacctccttagagtaagtcaaacaatacaaagatgtaaaagcaaaaaaagctgggtgcggtggctcacacctgtaatcccagcattttgggaggccaaagtgggtggatcacgaggtcaggagttggagaccagcctgaccaacatggtgaaacaccatctcttaaaaaaaaagaaaaaacaaaaaacaaaaattagctgggcgcagtggtgcgcgcctgtagtcccagctactcgggaggctgaggcaggagaatcacttgaacccggaaagcagagattgcagtgagccgagatcgtgctgctgcactccagcctgggtgacagagtgagactccatctcaaaaaaaaaacaaaaaaaaacctctttgtaactctattgaatgcctgttgtcattctcctagatgtgaactcttccacaccttttcccatactcataaaaacatatagggtttgatggggtgaaacacatatgattatttaattaaaatgtcatggtctttaagtccttacaaagtttttaccaataggtaaacaaaccaaatcagtttttaataaggaagtctattggttcatataactggaagtctgaataggactgatttcaggcttaatttgttttcctctggttcttacggctctgctctcttgacttttcttaaagaattgaattacttaaagaattcttcactgacagatatttttcctaaatgcatcaaaactagtattttattgtcttctgacttcgattatagctgttgaagcttcctgtcagtttgttatatatttgtagttcatctctattttctcttgtagctttttaaattttctgcttctgcattttcactgcagtttaagtggatcatccaagcttcttaatctctcataatttctctctttgtctcactctcctattttatggataatttcttcagctctatcttctacatcattagctttaaaaatttattatcagtattatttttgattggcaaattataattgtatacatttatgcggtatagcgtgatgttttgatacatatatacaacatgtaatgattaaatcaggctaattaacattgccttgcctataattttttatgatgagctatttgaaattcagtctcagttattttgaaatatacattattattgaccatagtcaccttcctgtgcaatagatctcaaaacctattccttctgtctatcagaaactttgtactctgtgatcaacagctccctattccctctctccccaagtcccccacccccagcttctggtaaccatcgttctactctccacttttaggaatggaactgtatggaattctaggaattccacatatgagataatgcagtatttgtctttctgtccctggcttatttcacttagtgtaatgtcctccagtattccattgtgtatctataccacattttctttattcattcattaatggacacttaggttgtttctatgtcttgactattgtgaataatgcttcaatgaatatgggagtgcagatatctcttttacatactgatttcagttcctttggatgtataccagaagtgagattactagatgatatggtagttgtatttgtggttttttgaggaaccaccatattgttttccatagggctgtactaatttacattcccaccaacaatgtactaatttgttttttcttttttgagatgaggtcttgctgtgtaactccgctggtctcaaactcctgggctcaggatcctcccatctcagcctcctgagtagctgggattactgggattatagatcttgtacatattttggtagatttgtacctaattctttttttctttttttttcttttagtgctaacgtaaatggtattgtattttttattcccaactccagttgcttgttgctggtgtataggaaagcagttgactattgtatgttaatattgtatactgagacttggctatcatcacttattagttccgggacgggtttttttttggcagttctttaggatttctacatggactatcacaaggacagttttatttcttcttttccaataggtatgtcttttctttccctttcttgttgtattacattagctcgagcttccagtatagtgctgagtaggagtaatgagggagtagcatctttgtcttgtttctgattttagtgagaaagcttctagtttctcgccattaagtgtgatcttagctgtaggatttttgtaaatgttcttaagttgaggaagttcccctctattcctagtttgctaagatttttttaatattaaatatcatggattgatattggattttatcaaatatgttttccatacccattgctgtgatcatctgagttttcttccttagcctgttgatgtgatgaattacacaaaataattcatgaatgttgagccaggcttatatacttggaacaaatccatctggtcatggttgtaattctttgtttacattgtcgaatcagctttgctaatattttgttgaagatttttgcatctgtgttcctaagagatactggtatgtagtttccatttcttgtaatgtcttttctggttttagaattagggtaatgttggcctcacagaatgagtaaagaattgttccctcagcctttattgtctgtaagagattttagagaattggtttcattttgtccataaatgtttggtaggattcaccattgaaactgtctggtcctggtcctttcttttgggggaggttattaattatcagtataatttctgtaacagatacaggcctattcaggttatctatttcttgtatgagttttggtactttatatctttcaaggaattggcctgtttcatctaagttttcaaatttgtgggtatagatttattaataatgttccactgtgtccggaattggcgggttcttggtctcactgacttcaagaatgaagccgcggaccctcgcggtgagtgttacagttcttaaaggcagcgtgtccggagtttgttccttctgatgttcggatgtgttcggagtttcttccttctggtgggtttgtggtctcgctggctcaggagtgaagctgcagacctttgcagtgagagttacagctcttaaggtggcgtgtctggagttgttcgttcctcctggtgggtttgtggtctcgctggcttcaggagtgaagctgcagaccttcgtggtgagtgttacagctcataaaggcagtgtgaacccaaagagtgagcagcagcaagatttattgcaaagagcaagagaacaaagcttccacagtgtacaaggggaccccagcaggttgccactgctggctgaggcagcctgctttaattctcttatctggccccacccacatttcgctgattggtccattttacagagagctgattggtctgttttacagagagctgattggtctgttttgacagggtgctgattgatgtgtttacaatccctgagctagacaacaaaagttttccactagattagctagatacagagagtgtggattggtgtatttacaaaccctgagctagacacagagtgctgattggtgtatttaaaatcccttagctagacataaagattctccaagtccccaccagactcaggaccccagctggcttcacccagtggatcccgcacctgggccgcaggtggagctgcctgccagtcccatgccgtgcgcctgcactcctcagcccttgggcggttgatgggactgggtgccgtggagcagggagtggcgctcttcggggaggcttgggccgcgcaggagcccacagtggggggctgaggggaggctcaggcatggcgggctgcaggtcccaagccctgccccgcggggaggcagctaaggtcctgcgagaaatcgagcacagcagctgctggcccaggtgctaagcttctcactgcccagggcttgcaggccggccggccgctcccagtgcggggccgcggagcccacgcccacccggaactcgagctggcccgcaagcatcacgcgcagccccagttcccacccgcgcctctccctccacacctcccggcaagctgagggagccggctgcggccttggccagcccagaaaggggctcccacagtgcagcggcgggctgaagggctcctcaggcgtggccagagtgggcgccaaggccaaggaggcgctgagagcgagccagggctgccagcatgctgtcacctctcaccactattatccttttatttatattttttaagatggagtcttgccatcacccaggctggagttcagtggcacgatcatacctcacagcagccttgaacttctgggctcaagtgatcctctcacctcagcctcccaagtagctagggaggcatgcaccaccatgcctgcctaattttgtgtgtgtgtgtgtgtgtgtgtgtgtgtgtgtgtgtacagacagggtctcactttgctgcctaggctagtctcaaactcctggcttcaagtgatcctcccatctcagcctcccaaagtgctgagattacaggcattggccaccacgcctggccattattatctttttaatgtccatagataattaatgatgacccagcttttatttctgatattagtgttctgtgtcttttctcttttttttcttggtttgcctgactagaggtttgttagttttattgatctttttaaaaaaccagttttttgcttcattgatttttttttttctgcgttgatttcttgttatcaattttcttgatttctgctctaatgtttttcttctggttgttttaggtttgtattactgttctttctctggcttcctaaggtggatgtctacattattgattttacatctttcttcttttctaataagttcatccaatgttataaatttccctctaggcactgatttctctgtatcccacaaatttttgttaggttgtattttcatttcattgaagttaaaaaaaattttatcttgagacttctttgtcccatgagttctttataaatgtgtggtttaatctccaaatagttgggaattttacagctatttttgtgttactgatttctaccttaattccactgtggtctgacagcacaaatcaaggtgtgttttatggcccagaatgtggtctgtgttggtgaatgttccatatgagcttgagaagaatgttattctgccatcattggattgattagttctcaagattcaattagacacatttgattgatggtgctgttcagttcaactatatccttactgattttttgcctcttggcttggtcaattactgatagagggatgtcgcagtctccagctatagtaatgattttctgtttcttcttgtggctctttcagtttttgcctcacatattttgatacattgttgttaggtgtatacacataagcattggtatgtcttcctggaaagttgaccatttattataggtaatgcccgcccgccccttttctttttgagacagagtcttgctcgctctgtcgcccaggctctagtgcagtggtgccatctcagctcactgcaacctccacctcccagattcaagagattctcctgcctcagcctcccaagtagctgggactacaggcacgtgccaccatgcccagctcattttttgtatttttagcagagatggtgtttcaccatgttagccaggatggtctcaatctcctgacctcgtgatccgcctgcctcagcctcccaaagtgctgggattacaggcgtgagccaccatgcccagccagtaatgcccctctttatccctgaagattttccttattctgaagtcgtctttctctgacattaatatagctacttcagatttcttttgattagtgttaacacggtatatctttctgcatccatttactttaaatctatctgtgtctttatatttaaagttggtttcttgtggacagcatatggttaatcttgtattgtcatccactctagcagttcttttaattggcatatttagaccattcacaatgtacttactgatattgttggattaatattgccatgtttataactcctttctattcattgtacttgttcttctttttacatctttccccccttttctgccttctctggtttttactgaacattttatataattctactttctctcttctcaacatatcaattatacttattttttaaaagttttgtggttgaaatggaatttgtccctgggatgcaaggatggttcagcattctcaaatcaatcagtagaatgatatgatacatcatatcaacagaatgaaggacaaaacccatataatcatttcaattgatgctgaaaaaatatttgataaaattcaacatctcttcataataaaaaccctcaaaacactgggtatagaagaaacatacctcaacataataaaacccatagatgacaggcctacagctagtatcttctgaatggggaaaaactgatagcctttcctctgagatctggaacacaacaaagatgcacactttcaccacggtcattcaacatagtactggaagtcctagctacagcagtcagagaagagaaacaaataaagggcatccaatttggaaaggaagaagtcaaattatccttctttgcaaatgatatatcttatatttggaaaagtctaaagactccataaaaaaagctattagaactgataaacaaatatagtgaagttgcaggatataaaatcaacatacaaaaatcaatagcatttctgtatgccaacagtgaacaatctgaaaaagacatttaaaaagtaatctcatttacagtagccacaagtaaaattaaaaaagaattagccgaaaaaatgaaagatcgctacaatgaaaactataaaacattgatgaaagaaattgaaaaggacaccaaaaatggaaagatattccatgttcatggattggaaaaatcaatattgttaaaatgtccatactacccaaagcaatctacagattcagtgcaattcctattagaatacctttggcattcttcccagaaatagaaaaaacaatttaaaaatgtatatggaaccacaaaagacccagaatagcccagaaatatcctaagcaaaacaaaacaaaactggaggaatcacatgacctaacttcaaattatactacagagatatagtaaccaaaatggcatggtgcttgcaaaaaaacagacacatagaccaatgtaacataatagagaacctagaaacaaacctatacacttacagtgaactcatttttgacataggtgccaagaacatacactgaggaaaagagtctcttcaataaatggtcccgggaaaactggatatccatatgcaggagaatgaaactagatctctacctctcactgtatacaaaaatcaaattaaaatggattaaagacttaaatctaagacctcaaactatgaaactactaccagaaaacattaggataactctccaggacattggtctgggcaaagatttcttgagtaatacctcacaagcacaggcaacaaaagcaaaaatggaccaatgagatcacatcaagctaaaaagcttctgctcagcaaaggaaacagttaacaacgggaagagccaacccaagaatgagagaaaatatttgcaaactacccatctgacaagggataaataaccagaatatataaggaactcgaacaactatacaggaaaaaaaatctaatctaatttaaaaataggcaaaagatttgaatagacatttctcaaaagaagacatacaaatagcatataggcatatgaaaatgtgctcaacatcattgatcatcagagaaatgtgaatcaaagctgtaatgagatcatctcaccccagttaaaatgggttatatccaaaagacaggtaataacaaatgctggcaagaatgtggagaaaagggaaccctcatacactgttggtgggaatgtagattagtacaaccactatggagaacagtttggaggttcctcaaaaaactaaaaatacagctaccatatagtccagcaatcccaccactgggtatatacccaaaagaaagaaaatcagtatgtcaaagagatacctgcactcccatgtttgttgaagcactgttcacaacagccaaaatttggaagcaacctaaagtgttcatcaacagatgaatggataaagaaaatgtggtgcttatacacaatggagtactattcagccataaagaagaatgagatcttgtcatttgctgcaacatggatggaactggaggtcattatgctaagtgaaataagccaggcacagaaagacaaatatcacgttctcacttatttgtgggagctaaaaatgaaagcaattgaacttatggagatagagagtagaaggatggttaacaaaggctgggaagagtagtgggaggctggggggtggaggggaaggtgtggagatggttattgggtacaaaaagaacaaaaatgaataagacctactatttgataacacaacagttgactatagtcaatcataacttaattgttctttttaaaatatttttgctttgtaaggcacttttgttgtagcataaatgtacattttaaaataactaaaagagtataactggattatttgtaacacaaaggataaatgcttgaggggatggatacccaattttacactatgtggttaatatgcattgcatgcctatatcaaaacatctcatgtaccccatacatatgtacacctactatttacccacacaaattaaaattttaaaaaaatttgccctagatttgcaatatacacttacaactaatccaagtccactttcatgggtagtacaggtacattataactgagtattcccagttcctctctgccatcctttatagttgtcattcatttcacttatccacatgttgtaatcactgaatacattgttgctattattactttgaacaatgatctatttattagattaaaaaaataaaagattgttttctcttcatttattcctttcctgatgctctcctttcttatgtagatccattagttatctattgataaaaaactaatcaaccacaaaatttactggcttaaaatatttactagctttagtttctgccagtcaggaaaatctggtcactgcttaactgggtcttctactctggatctctcacagggctgcagtcatcttaggctcaattgggaaggatccaaactcactcatggttgttgacaggattcaattccttactagttgttggacttaggcttctgttccctacaagctgttggccagaggccttccttgtttcttgccatgtgagcctctctgtaacgcattttacaacatggaagctttgcttcatcagagcaagtaagagggcaagagaaagtgccagcaagagaggacaagctagcaagacggaagttacaatctttagtaacctgattatgaaagcaacatcccatcacatttgccatgttgtatttattacacaagtgtatgaatatcagaaaggcagggatcattgagagccatgtcagaagctacccatcaaacccatacccaatggggctatatcctatgtgaatcgtgtgtgccctaggttgaggatatgaccctccagaaaggtttttgcatttcctcctcccaggcattccacgatggaggactacattttatattgttctctgcttgagtctctgaacacgtgggtagtgaaactgtgaactacaaatttgcttgatgtgtaagcttatagatgaattacctggtgaacttatattgtttttttcacatatgacttgaggccaagacggacaagctttcttgtgatctctatgtactggtggactttttaaaaaaattaacccttttactgatggtatgacccttcaaagatcctagctttatgcatagttcttagttcctgccccttacataattcagccccaaagcttcatgacctgtcctcatggggatattaaatctcaagctcccaggtaactgtgacaagttaacccccttcacaaacttccatttaccactctagttttcatgtcttttttttctttgcccttgctatgtagttggaaagattgttttcaaaatataatccagcatttccagggagttttatactgggagggcttttcggttatctgtatattgccaaattagatgtccctctatttaatgtttaagtacccatttgtcagcatcaaaattaatgtctatgtttccttttaacctaacttttaacagttttactattatccccatcatgttccattgaaatcaactggaatttttgttccagattatggcttttttttttttttttgagatggagtctcactctgtggcacagactggagtgcagtggcatgatcccagctcactgcaactctgcctcccgggctcaagcaattctcctgcctcaacctcccaggtacctgagattacaggcgtgcatcaccatgtccagctaatttttgtattttttttttttattagagacagggtttcaccatcttgcccaggctggtcttgaacccctcacctcaagtgatccacccacctcagcctcccaaagtgctgggactacgggagtaagccaccatgcctggcccagattgtggcatttttagtatttattttgtatttttaaagtgtattttatggccaggcacagtggctcacacctgtaatcccagcactttggaaggctgagatgggcggatcacttgaggtcaggagttccgagaccagcttggccaacatggtgaaaccccatctctacaaaatacaaaaatagccgggcatggtggcgcatgcctataatctcagctactcaggacactgaggcgggagaatcatttgaacctgagagccagaggttacagtgagctgagatcgcgccactacactccagcctgggcaacaaagcgagactgtgtctcaaaaaaaaaaaaaaaagtatattttatgattttttaattaaccttccatagtcttaaaaatcatttttcacaatttcattaagcctgacagccactaccaataactgctttttaactttgttttactgaaatcttttcttagctttgttacattgcttgttttctgatttaatatatatattttttgtttttggagggtatccttgagtaattctttgagaatgttttgagtccttggatatctgaaaataactttatttatttattttaaaattttattttagagatgggttttcactgtattgcccaggctggagtgcagtgactactcacaggcactttcatagaacactacaggctttaacgcctagcctcaagtggtcctcccacctcagtctcccaagtagctgggaataccagtgcatgctaccacacctggcaaatggctttatttttgctttcatgtcagtaaatatctttttacttgggaacattgactacatggctccattatttttttccatctaatgttatatgtaagaattctgatgctaatcccaattcttgtattttgcagttctctactacttctgctacttctctttgatagaagattgtactttttaaatcctttggaaaactccatattttatggtcttttttcatttatcctgcttcacatttattagatcctttctgtctgaagattttcatcttttgaaacaggaatttttcttctttgtgggttttttgtttttgtttgacgtggagtctcactcattcttttgcccaggctgaagtacggtggcatgatctctgctcactgcaacctccgcctcctgggttcaagcagttctcctgcctcggcttcccaagtagctgggattacaggtgtgtgccaccatggctggctcatttttttatttttagtagagatggggttttgccatgttggccaggctggtctcaaactcctgacctcaagtgaaccacccgcctcggcctcccaaagtgctgggattacaggcatgagccaccgcacccagcctatagattttaattgttacatgtcttcttcatttcattgggatttaaagaagaaaattatgtacatttagccagccatttgaaaccagttctgttgaacaataaaagcacaggagtaggtaattttttatatcatcacattaaaactaccatgaaaaataaaatggagtgttaagaaaaagagtagccattgagttaggtttttttttttttcagttaaaaggctgtactatatagtgttccaaatagattctttttaaaattttagcaaacactataaatacagaagagaaaacgcagggaaagaggaagacaggaagagaagtttgcagacagatctacagggaaaacactgagacactttaatttgtataggatgataaaaagatgcatttattaaatatttgcatctgtgacaaaaaatcaaaatatggataataacattgttaggaccagtacccttggagttataaaaatagtgaacaaaattttcatccatcttatcatctatgttggatatgccacataggtgtccataaaggtacctacaagtttatgctaagtgaatcctacaaaaagatgcttagattccagagaacgtctcataagtgccaaagaggataggtgtgcaatctgtagtaatacaagagagagtgtgagagaactggacaggaggattcagaggagatttcaaaggacttgacccatttatgcaggaggttgcaattttttgaattgcaaaatgagaccttggcaatgaccttgagcagtaggatataaataactcctacatgcttagtgttccactaatggaacacaaggcataaatgggttaaactggctcttaaagaatgaatacaattggatgagtacctattcaggagaatggaacagaaatagaggcaacacagcatacttattaaaaattattctagaggcagattgctgagttcaaattttgaccatgtcacttatttgctgtatcactttggtttattttttacttattttttttaatgtggcctagatgaattaatgctgtgtcactttggaaaaatgatttctctgtgcctcagtttttgttgtttttttactaaaatgagaataataggacctaccttttagagttgttataaggaataaattaatccacataaagcatttaagacaatttatggcatcaactataattgttagttgccatgattatcatcatcatcttcatagaaggacattttggaattacaaatggatagattgtattcattggctagtaaatgaaccggcctgcttcgaatacacaattcatactgggaagtagtagaagaatgtgttgaagtcagttggagtccacaccatggtggtcttgaattccaggctaagaaacagttaattattattcttttattgaagaggaaacaaaaaagttatatacaatgtctgaaattgcctaagtctttttttgggggggcaggggaggcagggggggcggggtaccgagtctcactgtcgcccaggctggagtgcagtggcacaatctcggctcactgcaacgtccacctcctgggttcaagcgattctcccgcctcagcctcctgagtagctgggatttttctatttttagtagagacagggttacaccatgttggtcaggctggtctcgaactcctgacctcatgatccacctgcctcggcctcccaaagtgctgggattacaggcgtgagccaccgcgccctgccaattgcctaagttttaactaaaacgcccagcatttgaactgctctttgtgtttccgtccattctacagggattctgaatgaaaccactattttaggaagatttatttcagtaatatccataaggcctaaatttaggtgatggtgagagaaatgggtaaggaagggacaagttccaaaaatgaatggaattgaactagatgatcttttggttcttttctagctcagacatcactgatgactttcttacctctctagcttagataatctttacatcatatgatctactgtatataattttttatttccagaatttgtaatatatgtttttctcatgtatgcttttctacaggttttagatggagcaggattagatattgatttccatcttgcctctccagaaggcaaaaccttagtttttgaacaaagaaaatcagatggagttcacacgtaagtaatctcttttagttgagtttcattgctgaataataccagtgggttatctgcagggcatggaaagttagcacatttgatactacatatcaatattagataattccatatgatttaaaacagttcatgatagtgtgccatctgataaacaaaaacatcttccattaacctttctatttttgtttaagcgttttcttttgatccaggctaaattttttctgtgctttggttagtaaattagtattcccctggtattccattcaatctatcgtggcattttaaacctgccttctggccagcacaagctttctattttaacttaaagctactgttccaggtatatgtcttaaagtttcttgagctgctggctatatgccatttttgtccatagttttctttcttaaaacaggacagtatatctttgtgtgtacgtaaattttttttttttattcagacctcattcgttttaggtaattagaaggcctgaaagtaaaagatctgatcatagggaactatataaaaataaaatacttgttataactctttgagttcagagttcagcaaaagaccatatattcttcttctgacacctcacttccctcttttcatatctcactggtatgtttcctggttccattctattatcttactataacattttcttaagtcagttttgttatatgtttaaactgtgagtctgtaggaagaagagcaaatatggagtatctagtatttgctataaacaagggttggcatgttataggcttctaaattaatctttccattacactatgagatagagtctttgactcaagattcccattttatagacaaggaggctcagagaagtcaaataagtctccagggatacacatgcagggtggagacaggatggaccaaaactctttgctttctaccatatgcttagaacatccctggtacataacactattgtaagaactagctattattaaaattattggtctttgttaaccaaaatgcctgatacataatcgatactcagtaaacactgaatacatgtatgaatggatgagaggaaaaaaatgtctcaacaataattttttaagatactcatttaaaatgcattttaaatggcattttacctatgcagagctcagaaaaatatttgcataagctattactaaataagatagaaatagtaattttaaaagtcagtttatattgatatacttggaattaactgttttctctttgataggtgtataagaagtaaaaatgggccaggcactgcggttcacgcctataatcccagcactttccgaggccaaggtgggtggatcacgaggtcaagaaattgagaccatcctggccaacatggtgaaaccttgtctctactaaaaatacaaaaattagctggtcatggtggcacacgcctgtagtcccagctacttgggaggctgaggcagaattgcttgaaccccggaggcggaggttgcagtgagctgagatggcgccgctgtactccagcctggcgacagagactccatctcaaaaaaaaaaacaaaactaaaaatgtagttcatcttttaagtttcagaattttaaaaatgttcaaaatgtatgtcagtctttatttctccccaattatttgctccctttttgagataataaaattcactgttagaaaaataagtatcttactgcttccttgtgtagaattacctctcattaaataattgggagaaaataattgagtttataatagttcacatttattgcattcttttgatatgccaggccagtgttctcagcacttttcatgtactaatttttttattcttaaccacagtcctatgacgtaaatattattttaccaatggggaaactgaggcatagaacaattaagttgctgaaggttacacagctagtgaacggcaaagccaggatatacattcaggcagtccaactcactattaatcactataccagatttacaaatttttttttttttttttttttttgagacggagtctcactctgttgcccagctggagtgcagtggcgcgatctcggctcactgcaagctccgcctcctgggttcacgccattctcctgcctcggcctcctgagtagctgggactacaggcgcccgccaccacgcccggctaattttttgtctttttagtagagacggggtttcaccgtgttagccaggatggtctggatctcctgacctcgtgatctgcctgcctcggcctcccaaagtgctgggattataggcgtgagccactgtgcccggcctacaaatctgttttttaaacattaaacaaagcttttatctttagctatattaattttgtaagagcagcaaacatctgagtatgtcactggtttttcttaagtaggctttttctttttcttttaaatgtaatttcttttttaaagacaaggtctcactatgttgcccaggccagagtgcaatggtgtgaccatagcttactgcagcctaaagtactgggctcaaccaagcctcccgagtagcttggactacaggtgtgtactcggctaattttttaatttttgtagagacaaggtctcacttttgcccaggctaatctcgaacccctggcctacagtaatcctgcctcagactcccaaagcgctgtgattgtaggtatgagccaccgcacctggccctgcttttaactttcgctaatatgggaaactaattttaactagggtactggtaattcagatattattcatttttttcttcagcacttggcataattaatgatgggctgaattacctttatagaattaaataataaaatataaactagttttatttaattctcaaaaaaagcatttaggatcaaacataaacatctataagggagccagtggcagttaataggcaaaatcagtaagaggcctggaagaagacatttaggacaatccatcactgcttttgaaaacaaaactcagtttaatctcagttgtagggtaggttggcagtcatatctgcatatgaattgaactcatgataaaatacttttaataatgtataaatattaaagtttattatgagttatgtatacaggtttttaattctatccttttccaaaaatgaggtcactaaccataatttactgagtaaatgccaaacatgtctaagttgtacttgaacatatatattttcaggttgcttctttcccaagaaattataaattatctttcaatactaaggaaatttatgggtaagctgtccaattactataaactatgttatttgttttttgttttgttggtttctttttttttttttttttttttgagacaggatcttgctctgttgcccaggctggagtgcagtggcatgatcatgcctcactgcatcttcaaccttccgggctcaagcaatcctcacactctgctaatttttgttatttttttgtagagacaggattttgccatgttacccaggctggtctcaaactcctgagctaaagtgatctaccagccttgccctctcaaaatgctgggattacaggtgtgaggcaacacactcagcctgttacttcttatttttacctttagttgcttttcatcacaaatagaaatacaggtaacttaaaacatgtacttttttttatacagtgtagagactgaagttggtgattacatgttctgctttgacaatacattcagcaccatttctgagaaggtgattttctttgaattaatcctggataatatgggagaacaggcacaagaacaagaagattggaagaaatatattactggcacagatatattggatatgaaactggaagacatcctggtcagtatggtcttctaataaaataaaaattattaacagccagaggccttactatggtaataagttactgaactaagcattttatctgcattatccaggaaaatctgtttctaatattttatttttgccataaatactttgacctcaagtatcagcttaattttattttatattaatatagcccttttatagttttcaaataacttatcttccaggaccctattataaaaatagcttcagatgtgcaaataagactgcatcttggtaagtttgttttataaatgtgcagttagaatttttaaattataaatagattatgcttctgattatacagcaggcatatgaaaagtaaaatgttttctaatttcacaactattttgtggtattaaaacattgggtgttttactgaatactaaattgttcagataaacatacaaagaaggaaatattataaacacatgcattatgtaataggtaaatacctaaagttatatcaattgggtttttaaaaatgaaatcatttgccaggcatggtagcaggtacctgtaatcccagctactcagaaggttagggggaggatcatttgagcccagttcaaggctgcagtgaaccatggtcacacatataaatagatactacactccaatatagcaagaccccatctctaaaaacttaatcatttgaccaggcacagtctcaggttgcaatgagccgagattgtgcctaggcaaactccatcccccgacaaaaaaaaaaaaaaaaaaaaccttagtcatttcctttggttgtgtgaggactaagaaagagataatgtacgtaaaactcctgatgctatgccactcagaataatttcatgttacctattttcaattcacagtagctttgttcccttgttaaataactacttataaacaatataaatatgtcaggagaactattatataaccttacagagaatctctaatgtaatataaatagtacctgccctttaattgaattgtgcagccatctaacttaaaattgtgtttggataaaaaacataaagcatattttgaaaaaaactttttttgagacagggtctcactcactctgttgcccaggctggagtgcagtggcaccattatggctcattgcaatctcaacctcctggactcaagtgatccccccacctcagcctcccaagtagctgggaccacacttggtgctaccatacccatctttttgtagaggcagagtctgtctgtgttgtccagcccagtcttgaactcctgggttcaaggggtcctcctgccctagtctcccaaagttccaggattacaaggcatgagtcactgcacccagcctcattttttaattaagttaaaatttctgagcattctttaataataaaattattttatttatctccaggaatccatcaacagcatcaagtccagactaagcaaaagtgggcacatacaaactctgcttagagcatttgaagctcgtgatcgaaacatacaagaaagcaactttgatagagtcaatttctggtctatggttaatttagtggtcatggtggtggtgtcagccattcaagtttatatgctgaagagtctgtttgaagataagaggaaaagtagaacttaaaactccaaactagagtacgtaacattgaaaaatgaggcataaaaatgcaataaactgttacagtcaagaccattaatggtcttctccaaaatattttgagatataaaagtaggaaacaggtataattttaatgtgaaaattaagtcttcactttctgtgcaagtaatcctgctgatccagttgtacttaagtgtgtaacaggaatattttgcagaatataggtttaactgaatgaagccatattaataactgcattttcctaactttgaaaaattttgcaaatgtcttaggtgatttaaataaatgagtattgggcctaattgcaacaccagtctgtttttaacaggttctattacccagaacttttttgtaaatgcggcagttacaaattaactgtggaagttttcagttttaagttataaatcacctgagaattacctaatgatggattgaataaatctttagactacaaaagcccaacttttctctatttacatatgcatctctcctataatgtaaatagaataatagctttgaaatacaattaggtttttgagatttttataaccaaatacatttcagtgtaacatattagcagaaagcattagtctttgtactttgcttacattcccaaaagctgacattttcacgattcttaaaaacacaaagttacacttactaaaattaggacatgttttctctttgaaatgaagaatatagtttaaaagcttcctcctccatagggacacattttctctaacccttaactaaagtgtaggattttaaaattaaatgtgaggtaaaataagtttatttttaatagtatctgtcaagttaatatctgtcaacagttaataatcatgttatgttaattttaacatgattgctgacttggataattcattattaccagcagttatgaaggaaatattgctaaaatgatctgggcctaccataaataaatatctccttttctgagctctaagaattatcagaaacaggaaagaatttagaaaaacttgagaaaacctaatccaaaataaaattcacttaagtagaactataaataaatatctagaatctgactggctcatcatgacatcctactcataacataaatcaaaggagatgattaatttccagttagctggaagaaactttggctgtaggtttttattttctacaagaattctggtttgaattatttttgtaagcaggtacattttataaaatgtaagccctactgtaaggtttagcactgggtgtacatatttattaaaaatttttattataacaacttttattaaaatggcctttctgaacactttatttattgatgttgaagtaaggattagaaacatagactcccaagttttaaacacctaaatgtgaataacccatatatacaacaaagtttctgccatctagctttttgaagtctatgggggtcttactcaagtactagtaatttaacttcatcatgaatgaactataatttttaagttatgcccatttataacgttgtttatgactacattgtgagttagaaacaaacttaaaatttggggtatagaacccctcaacaggttagtaatgctggaattcttgatgagcaataatgataaccagagagtgatttcatttacactcatagtagtataaaaagagatacatttccctcttaggcccctgggagaagagcagcttagatttccctactggcaaggtttttaaaaatgaggtaaatgccgtatatgatcaattaccttaattggccaagaaaatgcttcaggtgtctaggggtatcctctgcaacacttgcagaacaaaggtcaataagatccttgcctatgaatacccctcccttttgcgctgttaaatttgcaatgagaagcaaatttacagtaccataactaataaagcagggtacagatataaactactgcatcttttctataaaactgtgattaagaattctacctctcctgtatggctgttactgtactgtactctctgactccttacctaacaatgaatttgttacataatcttctacatgtatgatttgtgccactgatcttaaacctatgattcagtaacttcttaccatataaaaacgataattgctttatttggaaaagaatttaggaatactaaggacaattatttttatagacaaagtaaaaagacagatatttaagaggcataaccaaaaaagcaaaacttgtaaacagagtaaaaatctttaatatttctaaagacatactgtttatctgcttcatatgctttttttaatttcactattccatttctaaattaaagttatgctaaattgagtaagctgtttatcacttaacagctcattttgtctttttcaatatacaaattttaaaaatactacaatatttaactaaggcccaaccgatttccataatgtagcagttaccgtgttcacctcacactaaggcctagagtttgctctgatatgcatttggatgattaatgttatgctgttctttcatgtgaatgtcaagacatggagggtgtttgtaattttatggtaaaattaatccttcttacacataatggtgtcttaaaattgacaaaaaatgagcacttacaattgtatgtctcctcaaatgaaaattctttatctgaaattttaaaagacattgattccacatgtaaggatttttcatctgaagtacaataatgcacaatcagtgttgctcaaactgctttatacttataaacagccatcttaaataagcaacgtattgtgagtactgatatgtatataataaaaattatcaaagaaaattaactgccagtcatttgtaaatgctgtctactcctgaaagccttccttcatctctatttagttaataatgtgctctctcctcctgttttgaaaccccatagctctctacacctcttattgtacatcactctactttgcattggagttctgtttctatatgtacttattcacctgttgcctaaacatgcactgttcctaaaaggtacagtttttgctcaaaatatatgaaaggaaagataatcagttcttaaagtttggtatgctaaataagcacccagggaacttacctgctccacctcaccccagaaattgattattcaggtctggaatatggctcaggattcttaattttcaaccaacacaatatagaatcctgtcagttatccttggatcatttgctaagtgatcttgcaaaatcaaaactcctttgagactatttcattttcagaaatattttaaaacttgttcagaaacatcttaaaacttgttagcatataggaaaagtacaatgcttggtgtaggtaggttattatttggtcatttccctcaaaccatccagacaagccactcttctaccacaagctggtagaaatccttaggcacctttctgcttctgcactgctatcactttcaggtgtctaaggcttctggaaggctgttgtcataacctggagccatacacctaatgtacgtctggggaaaggacaccaattaaagaatctagagctaggatgatgttacataagacagggcacaatggagatggactctggatccctgcatctgaaagaaaaaggcaagaaaatgcagggcagggaaaatcctgaaggtcttcactgaccatgaattaaaatcctaattgacagttttacaaacaaaaaccctcgttttagtacttgtgttgtttttgtttctgttttaacaagcttagatttattattgtgccttttatggaagatgaggaagaaataggaaagcagtaaaatgaacaatgagaatctgttacccaaactgatataaactccctcagaaagaaagatactactccctaatcctggaagtgttaagtggcaataatgatcaaatgttgtaaaggggattgttactacagctaatatgaaatgggaggctggactaaatctaacctttctacccttgatttcaattctaaaaggacacgtaataccattgcagaaagaaaagacagttccaaatgataaattttagagttgttttgctaggatgcaagagaaattggataagtggaccactcatacgttgctggtgagatatgaaatagtagagccactgtggaaaatattcttggcagtttcttataaaactaaacatacatttaacatataactggcatttgtactacttgacagttatccctgagaagttaaaacttaacattcacaaatgttacatagcaccttcatttataatagccaaaacccggaaacaacctggatgtccttcaaaaagagtgaatggtttagtatgtccacaccatggaatactaaatagtaatatgaaggaacaaactactgatacatgtaacaaattgcatggacctcaagggaattatgcttgggtggtttggggggacaatcctaaagttttacacactgtatgattctgtttttgtaacattcttaaataataaagctatagagatgggaaacaagattcgtggttgccaggtcttgggactgaagggaaggagaatgtggctataaagggagccttgtggtggaaaagttctgtagtttgattgtggtgattacataaatatacatgtgaaatgttagaagtatttatagctgaaacatattagtatgttggtatatacatatttctgactaattaatttcgccatgttgcccaggctggtctcgaactcctaagctcaagtgatgtgcccgcctcaacttcccaagtgctgagattacaggcgtgagccaccatgtccggcctgttttttcctatgcatgcataattacgatcaagtttaatttgtaattaggcacattaagagattaacaatagctaacaaaatggaacaattacaacaatatattgtaataaaagttatgcaaatgt

SEQ ID NO: 25 - DNA, 9748 bp, Homo sapiens
  source 1..9748: mol_type = other DNA
gcatttccggagcgccagggaagagggaagtcgtggtggtcgcgagggagccggaaagatggtggttaccagatctgcacgggctaaggccagcatccaagccgcgtcggctgaaagttccgggcaaaaggtaggaaatccagtcttccctacttctcgccgcttcgcagagccgcgctcaggcaggcggggcggcgcaagggtccggttaagggtgaggacctgccgacagagaggacccgagcttgccgcgcgcttgggtctcccaggccccgtgctaagcctgtcacggaaactgtttagccttcaccactgtctcttaaggcaatttttagtatggaagagaggttagataactttatttgggtcgttcaactccttaatgcagaagcacagttcgaacttttaaaccttactgttaacacggtaccaaggagggttaatttcggccaccatgcacaagccccatttaggggggctggaaaaaaagcttcgttttcacgtggggaggctggcagctgtccagcatcacctccttaaggcgtgaggagggctgtggtgtcgtcgcctggtgactcttagtggcgttagtcggctgtctcattctgactcagcgatgcagggaacggagcggcggcgattttttcctgtacgtaaaggtaagggcggcgactgattccatcagtgtgttcctaaacacatcggtgttcagagttaatattccctttctcccctcttctataggtgggtcagaatgttggtctacccattatatttgactttaaacagaaaaattttaatcgttctgcttctgaagttacatctaggaaggatgaggctagtgaagtaaatgcagggttggctccagtgtttaaattttgatttttttgtttgtttgtttttgattcggagtcttgctctgtcgcccaggctagagtgcagtggcgcagcctcggctcactgcaacttctgcctcccggattccaacaattcttctgcctcaggctcctgagtagttgggattacaggtgcgcaccaacacgccccgctaatttttttactttgagtagagatggggtttcactatgttggccaagctgtctcgaactcctgacctcgtgatccacctgcctcggcctcccagagtgctgggattacagccgtaagccaccgcgcccggccaaattttgattttttaaaaatcatgagttgggcaggtttttttgttttttgttttaaaggtaatcttgtttactgggttttagcttttggggtcagtatttcatttgctttgcccttgttccagccctacctaaattacagtgtgttttctctggtttgcagagttttgctgctaatgggattcaagcgcatccagaaagtagtactggatctgatgcccgaactactgctgaatcacagaccactgggaagcaaagtttaatccctagaactcctaaagctagaaagaggaagagcagaactacaggctcactaccaaaggggactgaaccatctacggatggagaaacctctgaggcagagtcaaattattctgtgtctgagcaccatgataccattttaagggtaactaggagaaggcagatcttaattgcatgctccccagtgtccagtgttaggaaaaagccgaaagtaactccaacaaaggagtcttacactgaagaaatagtgtctgaagcagaatctcatgtttcaggtatttctagaattgtgcttcctacagaaaaaactacaggagccagaagaagtaaggctaaatctctgacagatccaagccaagaatctcatacagaagctatatctgatgctgagacatcaagctcagacatttcattctctggaattgcaactagaagaaccaggagtatgcagaggaaattaaaggcacaaactgaaaagaaagatagtaagattgtaccaggaaatgagaaacagatcgtgggtacacctgtgaattcagaggattcagataccagacaaacttcccatttacaagcaagatctctttctgagataaataagccaaatttctataataatgactttgatgatgatttctcccacagaagttcagaaaatatattaacagtgcacgaacaggccaatgttgaatctcttaaagaaacaaaacagaattgtaaggatttggatgaagatgccaatggaataacagatgaggggaaagaaattaatgagaaaagttctcagctgaagaatctttctgaacttcaggacactagccttcaacagttagtttctcagagacattcaaccccccaaaataaaaatgctgtatcagtgcactctaatctgaactctgaggctgtaatgaaatcattaactcaaacatttgcaactgtggaagtaggcagatggaataacaacaaaaagagccccataaaagcaagtgacttgacaaagtttggtgattgtggtggtagtgatgatgaagaagagtccacagttataagtgtcagtgaagacatgaacagtgaagggaatgtagattttgaatgtgataccaaactatacacgtctgcgcccaacacatctcagggtaaagataattctgtcttactagttctcagcagtgatgaaagccaacagtctgaaaacagtgagaatgaagaggatactttatgttttgttgaaaatagtggccaaagggagtcattaagtggagacacaggaagtctgtcatgtgacaatgcattgtttgtaattgacacaactcctggaatgagtgctgataaaaatttttacttggaagaggaagacaaggcaagtgaggttgccattgaggaagaaaaagaagaggaagaggatgaaaaaagtgaagaagattcatcagaccatgacgaaaatgaagatgagtttagtgatgaagaagacttcctaaatagcacaaaggctaaactgtaagtttttcctttatttttataagtttttgatacatgtatttcaagtggttaatttaccataaaaatatgaaatgttagcctggggaatgagaaaatcactgccttgggttcttcatggaatggctcattcatttgacattatggagccaggtgttgggtgtgcacctgtagtcccagccacccagggaggttgaggtaggaggatcacttgagtcccaagagttcaaggctgcagtggtcactactgcactccatcctgggccaacagtgagaccctgtctcaaaaaataaaataaaatgatgaaaaatatatttatttagagttttttttcaggaattcctcataaaaataagatgcttttttttctttattgtggacaatacaagggaagagaagaataagtgattttttaaaatgccatcttatatgtttccattttgatttaattacttgatctttaagtgatgatttctttttcagtctgaagttgacaagcagcagcatagaccctggtctgagtatcaagcagttgggtggtttgtatattaattttaatgcagataaactacagtctaacaagagaaccctaacacagatcaaggagaaaaagaaaaatgaggtaagttaattgtgctgttaggttttcacagaactaaccaatcacttttagaaattagtccttggtaaaagacttaattttcctacagtgaaaccacattggcctaatgtgttagttttttccttctctctaaaacagtcatttctttttacaataaaatcctatctatgaatgataatgctttaaaaataaatcaatacagggtcagtgttcctcatcttacacccaccaattatgatcccaggggttttgtttttttcccttttcttgctatacttttagttcttaagttcttaactagtgtagactgttgagaatctgaaagctgtgaatgcctgcctgcctcttccacccggaaaaaaatgcacatgtgcatatagacattttacatataatttcagaaggaattactgttaaggtaactttacccaaacccttagctttagccaacaccttgcactgttttctcctaaatctatattttctagccttgatgcttctcactgtcactttcagacctttaaatccaagtacctatttgttcatttagatgtcctcaggtacttgacgtcactaattcccctttccctgcctgaaccaggaatcctcttcttgtattcttttttctggctaatgaaaccaaactctcttttccttttgtagtcagtcaccaagcctctaggggaagatatttctctgcttcctccttttcaagcgactgtcaccagctagtgcaggcctttgcttctcatctggactactccagtggcttccttattgatcttgttttcatcttgttcttcaagccatcctccacacttctagatttctctgtctaaaaacacaaatccggctgggcaaggtagctcacatctataatcccagcactttgggaggctgaggcaggagaattgtttaagcccaggagtttgagaccaacctgggcaacatagctagaccacatctctcctccctgccccaaaaaacacaccacacacacagatgtgacagtattctcttgaatccttcaaagtacctctctaccccacccagctgtcatctgctctattcttgccactgaagactactgtagttgcctgaacttaccctgcttttccccaagcaagtgcaaaataattgatcgttgcccttggggaatattttacctccagtccttctcacaacccctctgtttccataacatctagcatagatctgattcattgttgatcatgtgatatattaacttaccatcttttctttatattcctaaaacagggtttttcagtctcagcactactgatgttttgggctgcataattttgttgtgagatgttccgtgcatagtaggatgtttaacagcatccctatcttttgcccactagatgtcagtagcattcttccttatcctcaccaccaccaaaaatgtctccagacattgccagatgctcccagttgagaaccactgtccttgaatgtactacagtacttgactcacagcaaactcttaatcatttgttaagtaaatatcatgcccccttttatgagtgataggaaagcctagacggctacctataccacacagaaacatctaggcctgaacctgaattgtgtgcctgactgttaatttctgagttgatcatttcaaatgtcagtcccaaattaatgcttgtactatattcctgtaaactattttgagggctacagagcagtcttacttggttcttgtactgagaaaaatactaattaacctgaggttcctttagtcacacagagttttaggagaatataatcatcctagtcaagtaacaaaagtacagaaatcatttaggaaaagataaacagatttgactgcacaaatttatttatttattttggagaaatggcgttttcttatgttacccaggctagtcttgaactcctggcctcaagtgattgtcctgccttggcctcctaaagagttgggattataggcatgagccatcgtgcctggccttttttttcttttttctttttttttttgggagggagctgggtttggggggagacagggtctcactctgtcacccaggctggagtgagtggcacagtcatagcttgctgcagcctcaagctcctggcctcaagtgatccttctgccttagcgtcctgagtagctgggactacaggtgtgtgccaccatgcccaactaatttcttttctttttttttttttttttacagtcagggtcttgctatgttgaccaaggtggtctaaaactcctggcctcaagtgatcctcctcccttggcctcctcaaagcactaggattataggtgtgagccactttgccaggctgactaaaaattttaaaacttacagaagtttaaactgttgaaaaacttatataacattctgacattattttaaaaccaattttatgtttttatagcttctgcagaaagccgtcattacacctgattttgaaaaaaaccactgtgttccaccatatagtgaatcaaagtatcaacttcagaaaaaacgcagagtaagtacagtgacttaattaaaatgcttagatatgtttggctatatattttcagcttatacaacataactgcacaattaaactgtatctgttggtctatatatgagtccaaagaaaataattacagatttctaagggctgtaaaatatagtaccataaacacattatgtatagattttcacatctttgcagccacaatagtgcatctataagtagaggttttttaaaaaaatatatatatatatagattacttctatctgccatttcgactagttatccagagagcttgaaggaaagttgaggatggtattctagtaatgttactgtaatatggagcaccctggcacatggtaggcactaactaaatacttgttgtatgaatgaaacaaaattaaataacttgtaggagttttctaaagaatagtattttgttttattgtagaaataacacaaggttctggatccttgtatgagtggcattctgagactcctgggtgactgaataaaaatgtttacatataagctctagaaacgaaagtgtttttatacattttcttactgcatatagtctgttttagacaataaaaattgaagttgtgtgttattctcccagcaagtcagcagttactctctgagacagaaaatagattttacggagccctcatttatgaaactgataatcctgtccctaatttagcggagaagtcactttttgtgatttaattccttttatctctatgattctggatttaagtgctttcaataaagtaaccatttgtttttaatttacaaaattttctgtatgtgttacttcaggggaaatgaattataatgtatactcttagctgttagaatgtttatttttgaaatcataatttcagaaagaacgacaaaaaacagcaggggatggctggtttggtatgaaagctccagaaatgacaaatgaactgaaaaatgatctcaaagcactgaagatgagagccagcatggacccgaaaagattttacaagaaaaatgatagagatggcttccccaagtacttccaggtatgaagcaaacagaatagtggtgatgatctgtgaattttagtttggaaagcactgtagtgttctttaaagtttactcctaaaatagaggatatttccattgtgcatgcctaatgtatggaacatatctgcataggccatataagaatggccattacccaattcagccactaacttttaatttgatcacatttagagagatggtgttacaaatggtttccaggtcagctaaaacctgttgaacctataaagttcactatgtgaatgtatgaatagtatcagcctaacagcaagagtccatacgggataggggtaaaagggtatcacgtgtactaatccaagttggtttttaaaatgttttcatctgttcgtgttacacctctgctcagaaacattcagtgatgaattatgacataggattgggtctgtatcctttcatttagccattaataatccatacccaaactagttcacctgcctttcatcatatagcccaacaaattccaacacacttagctactcagtcttgtcagaacacgtacataccagtccctgcataatttgactttgcatatccatagttcttgtttgtttggtgaaattttacccatacaaattcaagctaaattgtcattctttgttaaatcttccttacctctcttaggtacaattggtcactttgtcttcagagcgtctatagtgttttgttcagcacatgttatgctttaatattttagttactttttgtggagcttccttaagactgcaggctctgcactgcaggaaccagatgttctttgtttccctaacatgtaacacagtgcctggtgcatagtgatcactgtaaattttattcagttgagtgtatgaacaaatacagaatgatcactaagtaggccaaactggcagcctttgtgatgacctaggaaaccaaataggtatgtagtagaatttatgtgtctaattcattgatttgggaaactagaacaaaaagtatatattatctgttccacttttctcctttagttacactgtgcatcatgaatttagtgtttagcaaagaaattttggatctactataaactactgaagaaacataatagcaccactatgctacttttttttttttgctttaaataaatggcaaaatttacattactattagtgtaatgtaagcttgttctttccattcctttctctaaatataattagagctacactgaagtatgaaagcatcttggcactcaatgcatgacttatttcaatcaattgttcacagattggaaccattgttgacaatccagctgatttctaccattcacgaattcccaagaagcaaaggaaaagaactattgtggaagaactgctggctgattctgaattcagaaggtaaaggaattcatatttattttataatatgtatactttgctttaaaaatgtataaacttataaattttcaaataatttaaaaataactcatttataataacccataacatattaacatgaatatatatttttatgaaaaataatttagtgcaaatctctttaatgtctggcttaactaaagacagaggctcatacctgcttctgcagataacatacatcacgtagcccctggaaaacactacactcatgagagaacgagggtgaaaaaagcgattaatgccttagtattcttgagaaaatagtttttacctaatgaatcccttgaaagggtctactccacagaccacactttgaaaaccattggtcgcttctaagaaatatatatatcatactgtgcattttcaggataagtgtgactttttgttttgcttagtcctgatttttgtgtttttatccctcaaaaatgtttaaagcatttgatacagcctggtggatggatatagtgcatatatagatcatatatggatatatggatagatagatggatatagtgcatatagtaggaaagtcttcctactacagttgccattttttctccctagattgcaagcaagtgctatgaggtcagagactatacttgtcttgtccaccactccattcccaacttttaccctaaggttatattaacttctaatgtctgatatatcaaacataaagttctgatttttctttttcagatacaaccgaaggaagtactcagagatcatggctgaaaaagcagcaaatgcagcaggaaaaaagttccgaaagaagaagaaatttcgcaattaagatttaccaagcaaactgcaacattttacattgctcctttatttacttattaaagacgtttggaaaactaacaccatcatctaaattaatttaccatagactggccctgttcatacaggaatttgtatttggaaaaagttgatttgagaatcgattacatgcccttagaaaataggggtgtctaaaagacccaccctggtgtagactctttatgggaaaaaaggaaaaaaaatctcaaccattttaagataactgatggtttgtaaagttttcaatgcttagttatttaaagaaaatttaattaaaagataggaagtataaagtttgctaacatgttcaaagaactttaaaaaatgatcaaagatatataaacattattgtaattaataggt

SEQ ID NO: 26 - DNA, 32744 bp, Homo sapiens
  source 1..32744: mol_type = other DNA
ggagccgggctggcggcggcggtggcggccggctgggcgcgcactctcgggatggagggcgagcgccgggcatcgcaggcgccctcctcgggcctcccggccgggggcgccaacggggagagcccggggggcggcgccccctttccgggcagcagtggctcttccgccctgctgcaggcggaggtgctggatctggacgaggacgaggacgacctggaggtgttcagcaaggtgagggcggcggcggcgagtcccgggaaacttccaaggcaactccgggcgttgccagcattgcgccgacggctgcctctggcgcgcttgccctcccggggcggtggctctgagctggggacgagtgaggtcccccgggctgctggaccccgcctgccagctctggccgcacccggggccgcgtcgcctcggggcctcaaaccgcagccgctccctcctccgcactttgaccttccgttcggcggggctgtggcttagtggagtctgcaaagttgtgatttgttttccctttctgcttctctgacacagacatcttcctcgcggcagctcccgaacctgggaggctggtggctcaaaaccgctcccgccagctgcttttcgggcgaggccagccctgaactctgggagagcagccaagtttagagaaattattcttaatttagtgttgttgcttgtggatttgagacttgggtgagtctcgggtcttgtgggaataggttctaggaaatctccctgaacaggagaaaacggttgtttctaacaggaagctcctccgctgaggagctaaggatttttcagatggtcagctactgccacccaacccacagccagtgctttcgtttttccttgcccccgggaaatttaggaccaaaggctcttatttgcttattttactgttggagggaaattgacttgtgggggctagtggtagacttttggtacgtgtagactggtgtttgtaatttcttaaagggttttagaaaagaaaaatacctttcttgcagggaggttgaatgtcactccagtttctcaagttgctgctgagagaagacctgagttcagatcacaacgctgtattcattactaagaagcctgttcattttaacgttacctggagatattaggtaaagcaaacgacctacttaaccaccgcatttactctgggagagcaaaccaaagttaggaagtgaccatgcatactctgactccaaagaggagtatataaaacttatttctacttcggtttaaatggaatgataggcccaggtttgtattccgaatatttaaacagactatcacagttttgtgctcttgacttttctgttaagtagtaaaacaatggaattattttatgtttagttgtaaactctgcctttttatattccacacatacttcatgttcagatcaacgacagttggccagttggttatttactttctttccttctttacattgctgtttggataaggaatattagtctatggttatgcattgtgaaactttgggatgggatgttggaaatagcaatggtgtatcagaatcatcagggtttctttctggtttttttttttttttttttttttttttttttttttttttgtcggggctggacccatctggcctcaagggattctaccacctccagcacccaaagggtttgggattacaggcttgagccacagtgactcggattgttttaaacttgtcaagtggtttctctttccccagattctaggtgttctagctgactcttaagaatcaatgtttaaatgaggtcctcttgtcagaggcagatccaaggtgaagctaatgaaattgaagcttcagcgctattcgtttgcttagacctctgggcgtgttgggggttgctggagtcgcagatgttctaggtgggaaggaaatgacaggtcccgaccagaagcatttctaaataagcatttctggtgaattgcctaaagctctctcagactaaggaatctagatctccatggctccaatcatttattgagatttcttttctcattctgaataatgtgtttttccacctaattttgtattcttttaaaaggggaccttccaaactctaaaagcccgtacacctgggtccaccctgcttgttagtgttaactgcgcgtgttggatgcttagaaaaagttaagaacaacttctgtagaaactgcccacatagattaaggcaaagatataatattagtgaaaatccaacaagagtagttggaaaagtttaaaattagccactttcatccatttcagtaagttgaatttctcaaccgttatctgtagttaagcaaatttaagaaagcctgctccacgtggccttccctttccactaccttccttgcctgctcctctataaaacaaacaccactgctgttcagcctatcctaggatggaatctcacaattacttatgaagcaaactgtccttcccttttagtaatttgagattggcaaactacatatttaatttacattcacctttatagtccccttattctcttagattatttgtgaatatgtgtctggtatactcttccagaagctttttaaagagtatgaatttccccagcactttgggaggctgaggctagcggatcacttgaagtcaggagttcacaaccagcctggccaacatagtgaaaccccatctttactaaaaatataaaaattagccgggtgtggtggtgggagcctttaatcctagctaaccgggaagctgaggcaggagaatctcttgaacccgggatgcagaggttgcagtgggctgagagatcacgccactgcattcccacctgagtgacggagtgagactctgtctcaaaagaaaaacaaaacaacttcttattattttttttccacaacgtattacaagtacatggcaaatatacattttgtgttaagtatgctttaaaaaaaagaaatacaagatttagttcttgctatcacaatcttatactccaggtgggaagatgtgacaaactctaaatggcaatataaatcaagagggatggaaagtaaaacaaagttgttctgaattttcttataatccagtgagaagaaaatgatgccagacctcaagagaatgcagaggacattgatttaaaagaacggggatagatgttagaaggaagagaacagaaccaatcatacaaaaacagtaaaaataaaaaaataaaaaagatacacaaatggtaacaagagcctaagaattattttagaactaggtcacaatgagatgaggcttccaaaaaatttaactggagaaaaagggccagtttcttcacgtttaaaggaaaaaatcctcctctttggggaaaaacaataaattaaaataaattgcctttatttttattgaatactgtataaaagaaacagctgtggatacagtgtatgtgattaggccacaatgaagcactgagatgcttatctggtactcagtaaatgatagctctaattggcctctttaaagatattcgggatcataaaagtgagatatatatcatctaggataatcagggaacttacaggtgtaatcatcctcatcaccactagtcatctttgagaaatcatgaaatgcaataatggttccctgaaactagagataggtaaatattgtttttaaaaataatgggcaaaatgggagttctggaaggtagcgaacagtaggtttcatttcaatctccaaaaaagccatgaaatgaattatttagtatgttgtttatacacactttgaaaaaaacatgatcaatagaagctacaagttttataagaataatgaaagacttaagattgtgtttatggtaaatcagagttataatgacatgattgagcaaggcttttgaaaaaaatcactcatttcttcagaaaaggttatttatttatttgtttattttttgagatggagttttgctcttattatctaggttggagtgcagtggcacaatcttggctcactgcaacctctgcctcccgggttcaagcaattctcctgcctcagcctcctgagtagctgggattacaggcatgcgccaccatgcctggctaattttttgtatttttagtagagacagggtttcatcatgttggccaggctggtctcaaactcctgacctcaagtgatccacccgtctcggcctcccaaagtgcagggattacaggcgtgagccaccgtgcccagctgaaaagtttatttctgaaagaataaagttgagacatctaacatacacatgtatacatatctttatatgtatatatatatttttttctttgtcaatttggaaattcagtatagtgatggagcggcataattatactattcatctattctatcaaataattagaaaaagattaggaagtcctgcttactaatttctcacatatattctctgcacagtctatttggtttctgttgtgtgcctatatcagtcatcactctgataaaaatcagaattctctccaatgatttaaatgagagttgaatgcggggactatttatggaattattggcagagttagtgaacaaacaaggaatactgaggcatttagagagttgtagtgggaaaaagctattagcatccctagctttaaagggacaagaaatggaaatagcattgctggaaaccagtcagacctggagctgtggagatggggacacttcttcaggaactgcatttacagagagaggtagctactgccggaaacgtgccaaagcaggaggaaataaggggtatgttccctgaattcctctcctcctgcctttggatctcctgcttgcactcctctttgagtggtcttgctaaggtgatgtcatctataggtgccagcctcctagggcacagaaaatagatgggtggggtcgtaggacatagtacaacaatgtggagagttactttcaataaaggtgactgtgtcagtatctctcattgtatatgctcttctatgatgtgacctgccactctcctacggagagatggtataagtgctgctttccttgaacttgggtgggattatgactgccttgatctataggatatggtggaagtgatgctgtgcaacttcccaggctagatcatgaaagggaatgtaggtttcgtgttgtccagtgggacactgtgctttttggagcaccatgtaagaaatgcaacctaaaacctccatgttaggaaacccatgttacattgaaaccatatgtaaatgcttggtcagcagccctagccgaagtccctggcactatccagcattaagtggcaggctttcatgtgaagatgtctgtatgatttcagcctccagcattcatgtgccctcagccatcaagtcttttcagttgagccctcatgtataatggaggagagacaagacatttctgctgtgtgcttcctgaattcctgcataaaccagtgagcataataaaatctaaaacaataaaatcgttttatacgactatgttttcagattgtttgttacacagcagtagtaactataacaatagctaatagtctgtatatcataatcagccttccaaatcttttgataagttagaacattgtattcagaagtagactatggaatttaattgggataaatatgaagttctgaagaaagctccattagtcattgtaagtaaaaataccattaagatataagcttagtggttaggagtagaaactctcttttctttttatttgagacaaggtctcactctgtcacccaggctagagtgcagtggcgtgattttggctcactgcaacctccacctcccaaggctcaagctatcctcctacctcagcctccccagtagctgggactacaggtgcacactgccacacccagcattttttttttttgtatttttagtagagatggggttttgccatgttgtccaggctggtctcgaattcctgacctcaggtgatctgcccacctcggcctcccaaagtgctgagattgcaggtgtgagccaccacacctggtccaggagtagggactctaactacattgcctgcatttgaaatcctggctgcactgcttactagtattattgcctaaggcaagtaacttaatgtcaatgcgtcagatttttcatctgtaaaatgaggataaatactaatgacgattacatgccctaatatgtatgttcccctttccctaaggcctacatcctgatcttgtcttagtgggccttaccattttgatgattaggaaaaaaaaaacaaaaaaaacaaaacaaacaaacaaaaaaaacaataaaacaaaatagggctgatccaggactacttatatttctcttgcaaaaaatttcactctgtgccattatagctctcttataggttaagtattcttttatatttctccttggggaggaagtctaggtaggtgaaatagaaagaaggtgaaaagctctaagtttctctttttgaggtagcatatatgatcaacaataaaaccaaaacaaggaaacttcagaataagtttggggagaccttgtataggaccattttatgtgcaaacattcctagtggttttcagtgactgaaaaaccagtatacacaaatgacatgatattgaatttaaacaccatattttcaaggtcatatagggtattaattttaatgtaaatttgaactctccatgccacttcagaagatccattccactctcagcattttaaaaggagaattaacagttgatgtcaaaaaatggcagaggaataaggcctcatcttcagatgccagtgccttgttatggattctttggaatactgtgttaagatggagctgaaatctggtctgagcttagaaagagggcttagatccattaacactgtcttcctttggcacaggaagtagcaacagttttgacacacgtatttgctatccatgaaagagagtccactaagggatttcactgatgatatgttctgttaaccatggcctgtgaagaaagtctggtgaagaacaaaaagtgatttagcttggaagagatgggttaattcttttaataactccttatgaacacttactatgatctaggtggattaaatgtttacagttttgaagggcaaaactaggaccactgggtcaaaaaatagaagtttcaggttaattcagaaaatagatttctaattaaagtttccaaaatgaaagggattgcccaacaggatcgtgaattctgtcactaaaaatgttctggtacaagctggatgactaactgtcccagaggagaggagggtgtgacagttgaactgtccttttttactaaggctgttccagtggaattttaacttactaaatttaactgtaagagcagtggaaagtcttaattagatgggcctattcatcccttcagtttatttccaactggactatgttctgccattctccaattcttaatttctcttccccaacccgttgtcttttccatttaattttctcctagtgatgtaataattccttaggtgtccaggataaaatcctcagtgtttaccttctaatcatccctctcatgcactctccatgtctgttcatatatctgaatgtccccatcatttttacctttttgatatctctggaattagtgcctcctttcagtttcctctcctatgtttggggtggttgtgtagttacctctgagaactattgaaatagcctcataaggtcttcattctcctaatattctgcccccattctatgtgttcccagcaaatcagtgtttccagagcacacagctctgatcatattgtcaccatttgccattcacagctgttgatgtttaggctgtcagccttctccttcacccccactctctttcctggagagcctcactattcagttccatgactgttacatcacctgggagctggttacaaatgcagtctcagaccccagtgaattggaatctgatttaaacaggatttgtggtaatttgtttccaccgtacaatttgagaagcactgatctaggttggtccacttgccactatgtgaacttactgtgtatttttctacttttgtgtagttattgttagggcagtgaaacaaaaccttttctgttactcatcatccctaagaaccttcttcaatcctcagctggaattaattttttccagtctgtgctctccatactagtgttttgaatcatctaatgcttaatacattctgccttataaatagatattatttctcttttccaaaatcttgattgcttgtctgttttcaatagattaagctctcaaaggtaggagagtaggaactctatttacagaataaatacataaatgaatgacgtagcctctgacttttttcatatttatagagacagttattacagcaatttgctggtgatctgtttttagtgaattcagtttgtatcatactggtctttcctgtcaggatactaaactacatagaattaaattagtcttaattaatggtgagtaatgttattgtttgatgatacagagagctatgttgagcctcaatcctgaacaaaatctcccatttagattatattagaagaaataaacacaaagcataaaaaatccaagataacaatttagaaacattcttttacttgaaaaaaaaccatattaagctattaatactataatagcacctgcctcagggagcttgattacaagtagtggaagccaactctggcaggaaagaagtgcaatcttgaatattagattgctcacagagtagatgtaaaggctggaaatgcagctgcagaaagggacaggcgctagcagaaactatagccaatcgtatatagtcatgtgctgtgtaaggaacgttttggtcaatgatggactgcctaagattgcaatactgtgttttactgtaccttttctaatcatgtgttacagctgcctacagttttcataacagtaacatgtacaggtttgtagcctgggatcaataggctataccatctagcctatgtatgaagtagggtatatgatctaggtttgtgtaagtgaactctatgatgttcacacaatgacaaaatttcctaaggatgcatttctcagaacctgtccccatcattaaatgacacatgcctgtatttggaaaggggattggatgttgtataaacaaagaaaaaaaaattatgaggacctataggaaagagagctacagctcttttatgtagagacagtgagttttatttatttatttatttatttatttatttattggtcaggagcaatgaggaaagttattacaaatattttgagaaaatgatgttaaaaggctccagatttaaacttagtgtactctaaaaagaatactttatttccgtgagttttaaagataaagttttatgtttgtatccttgagggtcctcatagcctgctgtagttttacaagtagctagtgtgatcaaaaagaaacacagattcaatagctatgtggttacagtgttaaaaatttattttattcatgtttatttatttgtgtcccacactttccaaagaagatatgagactaaaagttaaacattttcattggagtcaccttaagtatatacagttttctcaataaacaggtaaagagttatatgcttaaaagattttgctcattttaaacagaatatttgattaactttggattgcatgtatcaatcaagctggataatagtgtgttacctctagtattaataaaaaaagacaattaaaattattagcaaatactgacataaaaatctgcttgtgttaaaacatagggttaaaccaacagttttaacattgaaatggaaaaattttattatttttgactttgagaaatgcttttatatgacatgctctttttttctttttaaattcaattttattgagtataatttacataccataaaattcacccattttgggtgaatgatttttttaagataattaaccagattgtacaactatcactataaaccagttttagaacattttcatctccccaatatgatccattatgcctgcttacagttaatctctgttttctctctgtcatagacaaaaaccactcatctaaattttctgtttatataaatttgtctttttaggtaatttcaaataaatagaatcatatcatatatgctttatcacaattttgagattctttcatttgtcatatttttaggttcatttctattagaaaaatgattttatatcatagttttatttttagataagtttttaagataaacaagctgaatcatttaaagtgaaatattaagaaaaaaagtctgtttagaatgaaaattaaagccttatgtgtaaccagaaacaaatggcaaattcttgttatatgaatcttgaaaattagaaaaaatgaatccctaatttgttctgagaaaaatgtgcatgtgtattttgtaatctaattgaacactgaatactctcttcatcagctttcattaggttatgctgcagtacaacctcgagatttcagtggcttgcttacaattaagttttctttcttgctcgtttatctgtcagctgtggctaaactgtgattctgctctcggctttgactctgttccacatatcttcttcattttgggatcaagactgaagcagtaacccctaactgggacatgccactcctgtgacagagggaaaataatatgagcactggtggaaatagacaatggctcccagatcttctacccagatactgccattgtccaaagcaagtaactggtcaaaccaattgggaggcactgaaaatcacctggcagctggccaggagatgtaatccgctcacaggaagaaagaagagggatcattaggaacaatcagaccacctctaacaatggttttgtggcaaagttataggcaaatggcatcttggacctttctgaatgaataaaaccaaatttttagaatagagtattaaatacaagaggtaaaattttctactaagtaagaaattattcaagtggccgggcgcggtggctcacgcctgtaatcccagcactttgggaggccgaggcgggtggatcttgaggtcaggagatcgagaccatcctggctaacaaggtgaaaccccgtctctactaaaaatacaaaaaattagccgggcgcggtggcgggcgcctgtagtcccagctactcgggaggctgaggcaggagaatggcgtgaacccgggaagcggagcttgcagtgagccgagattgcgccactgcagtccgcagtccggcctgggcgacagagcgagactccgtctcaaaaaaaaaaaaaaaaaaaaaagaaattattcaagtgtaatcaagataaatggagctgcatttgatatgattaatcacctccaattggctaatgctcatgaagagtctgaataagaccatacacatgcttaacaatctctagctgtgcaacaagtgttttactttgggattttcaggtgtaacattcatttatcacagagtgctcctccctttttaaaagactattagataaaatgtatgaatacttgaattctgatacagcaaatgtgaaaatgagctttgctggtcattccttcatcacagtctatgttccagccatatgtcttctttctgttcctcaaatattcttcctgccttgggcctcattggttggtccgactggaatcctgctctccaagtgttttgtatagctgactccttctcacgttacctcctcaaagaagctttccctgacagctctatggaaagcattcttcctgctccctgcagcccctttattcagcaacctgctccattttttcctaacacttattcttcttatctgaaattatcttacttatctatatatttatttgctcattatatgtaccctccccttccctctcaactaaagtataagcttcatgagagcaggaactctaccagtcttgaccactattgtatccccagcccagtgcctgacacctgggtgacatgcagtgaacatttgttaaatgaaatcaaaatactatactgagtgcttttcatgtgcacatggatggtgagggtggttgagtcttgctatcaattaagagataagtgatttggggagaatgcttatcatccctataccacaaatttattcacctgtaaaatatggacaatgataattatacttccatcagattgtggagaggattaaatgaaataatgcatgtatgtgttgctaaggcacatagtctctggcacttagaaaactctcagtatttgctattatggtatataagattaatattttgtttttgacttgtgtaagcagccactttgaatttgtagtgagatcttcagaggatcacagaaatatactggtttctatctttgaggaagctatgtgttttatttatttcagtggtagaatgttggaatcatctaattgcattaaaggagggtggaaaaaaacattcccagaaattcctggagttgactactaacctgttaaaaagaatggagcaaagttgaaatattttaatcatgatttcttccttttagctttgcctccatcctcaaatttttattgtgtaccattttaagtgcagaaatgctgtgtgagtttgccagggctgctgtaacaaagtaccacagactgagtgtcttacataacagaaatgtattgactcacggttctggaggccagaagtctgacatcaagaagtcagcagagttggttccttctgagggccgtgagagagggatctgttccagacttcccaacatggcttatagatccatgttctcccagtgtctccacacatcctattccctccatccatgtttctgtgtccacatttaccctttttatagaaagatagcagtcgtaattggattagggcctatcctaatgacctcattttaactttatcagatctgtagggaccccatgtccaaataaggtcacactccacggtactggggatttgggcttcagcatataaatttgggtgagggaacaattcaacccataacaaatgcttataataaaccccgagtaacaacagaaaaacttacacttaatttgtgatttttgcaataaattctattatcatgctaacaccaatctaatccatttatttcagttaagttatttaagtggtttttctgacagtggatgtattgttttggagtaaggataaaagaccatgaattcttgcaacacaggctttcttctctatgaaactcactcaaatctcagcctgaacccatcccaggactttcttgtgtgtgtgcattttcactgttctagctacaggagtaaacgtgatttaagaagtagagatttgtcacacagataatttttattatgctataatctgttgaaggaaaaaataaaaagatatattttcaccatttaaatgaccctaagataatggtcttatatccaaatagagacagagagacacacatccattattgtggaggtgagacctttgtttggaaagaacaaattttattgatccatttctcctgaaacgcatcaaccgcaaaaggttaaatggagttctttttggttaattgctactttggatcttcccaaacacttattttcttcagttattcatgtccaaatgttaagtcttttaagtattgttagtatattttctttccttttattgaagtgaatataaaacactttagatagtcagttttattgaggttttaagaatgcttttgagtgattcatagtaatttaaatccttctactgaaatcttggatgttgctaaatttcagcctgtaattttctgcctttgctagatatcgaagcatatttttatgacaccacactgtactcattggaattgtgagccttttgtaaattcatgcagatttttcccactccacaaaaggatgcatttcaagcggaagaaatagaatgctaaattatgtagtaggtaaaagaagtaggctgtggtgagttgggaggatgagcaaaaagaatgccaaagcacgtttgtacgtaatgtcagtaaaatacaaagtacgtttgcccaccaaattaaaatttgtcagcttacaaagttgctatttatatacagtggtttttgagagagatttttgtacatgctgattacacatttatttggaagctctaaattctggttttaatggctgcttagtatttcattgtgttagcatcccataacttattatttatctatgcaaccttgttaagaaaaaaatcaaatataatccgaagtattctgccaaaacaactgttttatcactacggttcttactgtctcttagcacatcatgtacaatgttgactctaacaattttaacggtttttctggttataaaatataacatatgttttagaatatttggaaaataaagaaaatcacatagaaaaatattaaacccaacagcaatcccaacatctggaataattcctgttaacttttttttttaatagctgctaaattccctctctccctccctgcccatccccccagtcatacacatacacacacattggaatctggttttacacaaattttatattttgccatttttttctgaataacatactgtgaaactttttccaagttattgtatgttcttctaaatcatctttaagtcactatgttgtattctatcatatggatagaattcattataccctcccatagagatataaaatgatttatttcactgaattttttttgcaagacatttattgcttctaaattttctgtgtctgattaatccaactgaaatttgtcttctactccttgtgtaatgcttaaatgatcacaaatctttttgtgataataggctgaaccttcgtaatctttatgactattgttattcttctttcttcagttagcatatcctgtgataatctctcttctattattacattgaaggatgacctaaatgttgcattgtagttcacagagctaaactttttgtgggaagagcctttaaagcagtgctctgagtattatcgatgcttcaaaagcatttttattgatttggtttgaagagaaaacaagtccatattatgatttcatctttttttcctattcatagtttcacaaaaaagtatctcttcctaaaacatcagaatttattacattgtactatattaatgcatttggatctgagatattttggaaatcatcaggtccaactttgtaatttaacatagaaaggctgaattagtggttcagtgcctgcttagtcaatggcagagataggaccagaagccatttttggcctcctttatgattttttttttactcagtactggccaactttgttgctaagctaaaatgggctttgttgcagatttaatattcaaatacatcagttaactttataatcttacacataacaacagacaaaacttttgattccaacatctgtatcactactttaggggaacaaatgtatctaaaagaaaaagtatagagttggagaacaagttcttactaccactgcagagataactcaaatattctattgagagtgttagttttatctttgcatgtgaaagaaccattatttgaatttaaagtttactgtaattatccttatgtttcagttaattttatttataaagaataacatgtagcccttcctttcccatctttttctttcttttatttagacaaaactattgaaggtgactgagcagatgaccagtgttgccaattgaaattgaagctgaggaggcatcctgcatggttggggttgagaataaggctgccttggcctacgtggtcagagcagaggaggaagccggtgtggttgggagattggttacatacaggggaattgagccaataagtaaacatttgggataataggagccaggtttctcactgctgactaaaagagttataaatatggaaaagggaaaggctagacaagccatgacatgtcaaattagaaatagaggtatataggccaggggcagtgactcatgcctgtaatcccagcactttggtaggccgaggtgggtggatcacgaggtcaggagttcaagaccagcctggccaagatggtgaaaccccgtctctactaaaaatacaaaaattaaccaggcgtggtggcaggcacctgtaatcccagctactcgggagtctgacgcaggagaattgcttgaacccgggaggtggaggttgcagtgagcccagatcgcaccactgcactccagcctgggtgacagagcgagacgctgtctcaaaaaaaaaaaaaaaaagaaatagaggtatatcattctaatttgtgaactcttggtattttatatctgtatctagccatagatctagagctgtatgagtctgtgtgtgtgtgcgtgtgtgtgtgtgtgtgtgtgtgtgtgtgtgtgttagtctgttcttgcattgctataaagaaatacctgaggctgggtcatttataaagaaaagaggttcattttggctcatggttctgcatgctgtacaggaagcatggtgctggcatctacctgtagtgagggctttaggcagcttacgattgtagcgaaaggtgaaggacggccagcatgtcatgtggccagagagggagcaagagaaagaggacgatccagggtcttttaataaatcagatattgcctgaactcatagactgagaacttactcattaacatgaggatggctccaagccattcatgagggattcaccctaatgatccagacacctcccactaggcctcactgccaacattgggggtcacatttcaacatgagatttggagagggcaaacatccaaactatatcagtgtacatatgtatgtgtatgtctcatatatttatttcctagcattaatatcttggttttgtaaataccaatcttctctaaaaggaaccagagctcctcggagaaatgtctcattccagagcttgggcagggaaataacaaaatattataaacttgaaacatcttgttctaaaaagtaaagtgctcaaagaataatgaagacatagcaaaaacatactggtgcagctttaaggggctcccacttgtcaaacttgggactgtttagacatcaaaataaattatgatgttaatgaattatatccactgaataaaataggaatctgtgaatctgtagtcatataattaatttgagtctatagtcatataattaatttaaacaaaatattatactctttagtctccttagtggaaaacctattgatggtatcaacattgaaaaataaaaaatagcagtatacatatatacactaatatagtttggagtgagagggaatgaataaatgaataatgaacactcaggaaaacaaaaactgggctggcacagtggctcacacctgcaattccagcactctggcaggatgtattaatctgttttcacactattaatgtgttttcacactgctgataaagacataaccaagactgggcaatttatataggaaaaagggtttaatggacttacaattctgcatggctgggggagcctcaatcatggtgaaaggcaaggaggagcaagtctcatcttacatggatggcagcagggcaaaagagcttgtgcagggaaactcccatttttaaaaccatcaaatctcgtgaaacgtattcattgtcatgagaacagcatgtgaagacctgcctctatgattcaattaccttccaccaggttcatcccacaacacatgagaattgtgggagttacaattcaagatgagatttgagtggggacacagccaaaccatatcactccacccctggcgcctcccaaatctcatgtcctcacatatcaaaaacaatcatgccctcccaacagtccccaaagtttcatctcatttcagcattaactcaaaagtctgcagtccaaagtctcacgtgagacaaggcaagtcccttccacctatgagcttctaatatcaaaaggttagtcacttcctagatacaatgggggtacagacattgggtaaatatacccattccaaatgggagaaattggccaaaacaaaggggctacaggctcatgcaagtctgaaatccagtggggtagtcaaatcttaaaactccaaaatgatctcctttgactccatgtctcacatacaggtcacactgatgcaagaggtgggttcccatggtcttgggcagctctgcccctgtggctttgcagggtatagcctcccatctgtctgctttcatgggctggcattgcgtgtctgtctgtggcttttccagaggcacagtgcgagctgtcagtggatctaccattctggggcctggaggatgatggccctcttctcacagctccactaggtggtgccccagtagggactctgtgtgggggctccaaccccacatttcccttttgtactgccctagcagaggttctccatgagagctccatccctatagcaaacttctgactggacatacaggcatttccatacatcctctgaaatctaggtggaggttcctaaaccctaattcttgactttggtgcattgtctgtcccaacactgtgtggaagctgccaaggcttgaggcttgcaccctctgaaaccatgacctgagctctatgttggcccctttcagccatagctgaagcagctggagtggctgggacacaggacaccaagtccctaggcggcacacagtatggggaccctgagcccagcccacaaaaccaccttttcctcctaggcctgtgggcctatgctgagaggggctgccatgaagacctctggcatgccctggagagattttccccactgtcttggggattaacattcagttccttgttacttatgcaaatttctgcagctggcttgaatttctcctcagaaaatgggattttcttttctatcacattatcaggctgcaaaagttctggacttttatgctccgcttcccttgtaaaactaaacgccttaaacagcacccaagtcacctcttgaatgctttgctgctcagaaatttcatccactagataccctaaatcatctctctcaagtttaaagttccacaaatctctagggcaggggcaaaatgccaccagtctctttgctaaaacatagcaagagtcacctttgctccagttcccaacaagttcctcatctccatctgtgatcacctcagcctgggtttcattgtccatgtcattatcagcattttagtcaaagtcattgaacaagtctctaggaagttccaaactttcccacattttcctgtcttcatctgagctctccaaactgttccagcctctacctgttgtccaattccaaagttgcttccacattttcaggtatcttttcagcagtgccccactcttagtaccaatttactgtgttagtccattttcatgctgctgataaagacatacctgagactggggcatttgtataggaaaagggtttaatgacttacaattccacgtggctggggaagcatcacaatcatggtgaaaagcaaggaggagtaagtcacatcttacatggatggcagcaggccgaaagaacttgtgaagggaaactcccatttttgaaaccatcagatctcatgagacttattcactatcaggagaacagcacgggaaagacccgcccccatgattcaattatctcccaccagtttcctcccatgacacatgggaatcgtgggagttacaattcaagataagatttgggtggggacacaaccaaaccttgtcacaggtcaaggcaggaggattgtttgaagccaggagtttgagaccagccagggcaacatagcaagaccttatcactataagatattttttaaagcagtagaagaatgaaaatgtaatcataattcactatatggcttggctgtgaataaaaataatttttttcttaaacctctatctaccttaaaatggtgataagatgatgggagagagaaaaacgtatgtatatatttgagagaaaggaaacattgcctataaagtagcttcgaataggtctataccataatagaaagtgaaaggtgagaaatggttccggattgaaggggaccagagatataacagttaaatgtaacagatgaacctggatttagttctgtactagaggggaagaacattttaggatatttttgggacagagaaattcaaaagggtctgtggattagactgttgtattgcgtcagtgctaatttcccgattcaaatacctggatcggtactatggttaggtaggagagtattcttgttttctgaaaatacacacagacctatttaggaataatggggcaacatgtttctagcttactctcaataagtaaaagttttctcatccctccttttctctcttttgctttctctctccttaactttcttacaccaattataatttatctacagatctaacataggcatgcttcctatcacatttatgtcattatcagttttcttttcttcctttttttgtccttcttttacttcctttttttaattccctttcttccttgtttttctctctcaccttctctgtttcctttcctcctctgcttattcccctttcgtattctgttctccaccatccccttttccttcatccctcgcttcctttattctttctccttgtcatctccttgataccctggatatttattttcctggtccagtgtatatgggctgttctctaggtttgctgcaaaactgtcaatgtagaacattattttccagggaattccctttactttgatcttctgttgtatctcttgtttttagattctatttttttctttcttggcatattctcttattttggagaagtaaagaagcttccaaagaataggtacatgggaagtaagtttttgaaatcttctatttctgaaatggcttaattctacctgtatatttgaatgacaattgcctggatatgtataattctaggttgaaaatacttttctctcaaaattttgaagacattagtttattatcatgtagtttccagcatcaccatttaagaactctgatgccattctgattcccaagattcctcctttattttacttatattgtttcttaaatctttagggaatttaaaaatctctagtgttatgaaatgtcatggtgatggatgcttgtaggagtactacctacccaaccagtgtcctgttcattttggggagacctcacaggccctatcaactttatgtcaaggatatttttctttctcattttctggaattccttttattcaggcactgcctgcctgtatccttcaatttaaaaaatcttctcattttccatctcttgttcttttggttcacatagtaggacagttcttgagctctgattttcagactttctgttgcatttttatattgctatcatattttaattttcatgagtctcttttttggttggtggtgttgctgttctctgaattttctttttaaaaagagcatgctttcattcatggatttaatattttctcttatctttctggtgatttcatggttttttaaaaagtgtttatgctctgttctatctgcttcctctaatcttctgttttggtttgtttgtgactttatttcacgtcagagcctttcctcgtgtttggatgtttggtagatcctacaccaaataataaaaagcagagtagacattctgcatgcatggtaggggctttgatgtagggtggttatgcagagacctggctaattcattaggggactacaactgtcagtttttctccaagatcagctaagagaggaaacttccaactatggtgggtgctgtggtatgaatatttgtgtccacccagaattcatacatagaaatgctactgccaagctgatgatagtaggaggtggagcctttgggtggtgattagatcatgagcgtggagctctcatgattaggattggtgcccttataaaggaccccagagagaccctccccccttttaccatgtgagattatagtgaaaggaagctgttctgtaaagtgggccctcaccagacgctgaatctgctgacatcttgatcttggacttcctagtttagaactgtgagaaataaatttctgttgtttgtaagctacctagtttattgtagttttctttaataacagcctgaatggactatgatggggtgggggttgcaccttcctgccaacgttcttgggaccagatgaacaggtttgcatgtcttttagtctggtatgcaggactttcacttgatatctgtattttcataggacttcttccctatcctactggatgccctcgagctcagacctttcagaaagtagacttccagtgttctaccaaattggggtgggaaagttacctgattgcctagggtaggtgagggaatctgaggttctaactcttgttttattagatcttcttaataaccaatcatctggtttctgctctgccacaacctttatgtccacaggttcttggtgcctccaattcttgaacctttctggcattctacatcataaatatccttgcctcttcctagtttactgttctcttctagattacttttcagttttctctgcactgctattttagttaccacttgacgatcagatctccagtttccaaaaagcagttggcacatttcgtttaccatagtttttttcttcttattcttgcctgagtccattagtgctactgtgacaaaatatctgagactgggtaatttataaataatagaaattgatttctcacagttctggaggctgggaagttcaagatcaatatgctggcagttttggcctctggcaagggatgctctcagcttcaagatggtgtgtgtctttttgttgtgtccccacatggcagacagtgaaagggcaggagaggcactagctcgttccctacagccctcttataaggtggctagtaccattcatgagggctctacccttatgacttactcacctttaaaggctccacctcttaatactattgcattggggattaagtttcaacatgacatttggagggaacagaaacattcaaaccatagcaatccttgagggtttatacttttcatttgtttgtttctttctttactgtcatcttttgggtgggattttcaagaggaaacagataaaaatacatgttcagtataccacatttaactaaaagtccaataatcccttttgttcttgatatatttcattaatattgatagcatctagaaatagaagagtttaatttttctattgatactaatttttgaatgttttatttcttaggatgcctcattgatggacatgaactccttcagccctatgatgccaacatcccctttatcaatgataaaccaaatcaagtttgaggatgaaccagatttaaaggatctcttcatcacagttgatgaacctgaaagtcatgttactacaatagaaactttcattacgtataggattattactaaggtaaacatttggtgaatattttcttgaatatagctgcttttttttaagctttggaagtaagtacctcttgttcattataattctgaacattccaagatcttagctgaattgacttttactttttcaaaccttttggctaacacattgcttcttatctgcccttcacttgttctgtattaagtcagtgaaattcaacttgacttgagaaatagtcactcattttatagcagctatacttcttagaataagaatatctaggtttttagtttaaaaaagtattaagaaatacctttggaaaagatgggcctcaagttgttaataaaaaaagaaaatgcttaaacagttcgcaatattatgtattcagatttctttggaagattataaaatatggtaccatttgtttttcaaagtgggacaggtggccactttgtctcatgtatgagatactgttatgtgtgcaataattcaagagcaaagtagatctagaacacagatctctttaatcgtagggcgaagtgctacaaagacaatttacctcagacacaattaagcaaccacctagtataatctgtattttaagtcctttatttaatagcatttgaaaataattctctttataatattttgtttatgaagcgtcaccctagacttttatatttcataaatgtaaaaagtacatctctttttttagctgaaaaagttctgaactatgtttctataatcacttcttccaatgaaactgccacactgctattagttatgtttcctgaagatatatatatcttatttcttcacttgaattcttaaaatcctttcttggccccttatttcaggcagagcaaagtgccgactttcttgtatgacatataaagaggcttctcagtctggtgcccacttaccatataagacttatttgttacacctcacattcagtaccttgctttccactcaggtagagctgcttctgttttctgaatatttaggggatctcttgctctcaaaactgcatatagttttccttctgtttgctgtgtccatccccttcttagacagaagaagtcatgcttagttttcaatatacaactcaaaatgttagatgcctgtgaaagcttctctagttgttactgtcccctggctgaaatagttattcttcctctgttttctcatactgttctattgaactcttaaggaatgtaaaacataagagtcaatatagcaaaatatcaaaagcatatatttaatccaactaagctgtttttttaaatcaatgaaactgagataatagaactcacttctgtagggttgcagtagaataagtaatcaatgcacaccccacttagtaaagtgcctaacacacgataagtgttcagtaattgccatctacctgtatgtgaatagatgtttatttgtatttattctcagtgagtttgtgagtttctcaaggaaggtaactatattttaagttatccataattccaaacacaaatcttaggacataataagtaaactatttattttgttgatgaatgagtgaaggaattatcttagctatatcaagatgtggtagagcaagacaacatggagttgaatcttgatttctctccttccttgctatgtgacttggacaatttaattaacctctctatattagttttcttgtttgtaaataggataacagtactaacctcataaggtctttatgaagattgaatatgttaatacaggcatactgctagagtagagccaaatttcttctattactactgttataattatctattgtcattatccattctagcaaataatttgtgaaactgaattatttttccatcatttgcgtctctcagaaagacactctttctaaagccaccttgtgagtttcattctgatcatagacatactgctcttctgagtttttctatttacacatactttaaatggactggtcttatagaagtagtaatagtagtagtaataataatatgaaaatatataaactagcaaacatttactgtgtgactgctttgtgccaggtaatattctaaccagtttctacatgttaactcatttaggctcacagtaatcctcaaacgtagatattatgatttacccccatttcatgcacgaggacaccgaaacttagtagcttgttaaaggttacacaacattgtaattagctgagctgggatttaaatccaaacagtttactttcatagtatacattttttctattatatttttgtgcatttaggtatggatgtggtaaactttcagtttaactattataaatgacttccattgttctacttctaattacttttactatttcatagtatatagactatatctatatatacagaaatatatattacagatacaaatatataaatagtacatgtagatcatgttatcaaatagtcttttcttattatcatttacttacttattccacaagttttattgagtaccccgtttgtcccaagtattgtgcttatatattaagaatatatcagtgatcaggataggtctgacaaaaggaactttctgctttcctggtgttttcactctgaagaaggggtgtttgcatatgatgatattaaataattaattttgtactgtgttagtttgttctcatgttggtaataaagacatacccagtactgggtaatttataaaggcgggacatttaattgactcacagttccacatggctggagtagggggctcacaatcatggcagaaagcaagggggaagcaagacacatcttacatggaagcaggcaagagagagcttgtgcaggaaaacccccatttataaaaccatcagatatcatgagccttattcactaccatgaaaacagtatgggggaactgcccctatgattcaattatcttcacctggccccgcccttgacacatggggattattacaattcaagatgagatttggatggggacacagccaaaccatatcatatactaagtaatttctttatagttataaatattttgaaggaaaaatattggatattatgagcatgggatacaccatctaatttggaggttgaaagatggctttcctgggaaaatcttagttttgtaaatatttatattcatgggtactaaggattgtaagggtaaatgaatatacacatacatacatggacaatcacctatttaggaatacttaagaatgatccaactgtgaatgattgtatcgggaagaccacatttgtggcatctgttctttttatgggaaattaccctttgttgtctaggttagcatattttaagtgactgttatagagaagtattttctcttttggagatctaaagatgtacgttctcttagtacatataagagtaagaatgaagagatttaacaaggtactttccttccacttcctctttgtgaaaacaaacctataaatgcctgtcattgtatagttaggagttaagctgtattcttgattggctgaactgactattaagtttcattttccctcaaaaaaagttttctaaataatgagtttagaataactgttcacacttgactgaaggttggtatttttggaataaatgcttttgggggtagagatcacacaagttcattagtactaaacttcaaatacccaagcttttatggtcaaacatgaaaaattggccagcattttcaatgttgcttccatagaaaactgtattctatgttagaagcattatttatactccaaatgcactttatgaaatacatgatatttctaagttggatatatgttatcaaacccagttatttctacagtttggaagcttttgtttggaagcttttgtgcatcttttttctttttttcttttttcgagacagagtctcgctctgtcacccagggtagagtacagtggcgtgatcttagctcactgcaacctctgcctcctgggttcaagtgattctcctgcctcagcctcctgagtagctgagattacaggtgcgtgccactacgtctggctaatttttgtatttttagtaaagatggggtttcaccatgttggtcaggcttgtctcgaactcctgacctcgtgatctgcctgcctcggcctcccaaaatgctgggattacaggcgtgagccactgcgacatcttacagtgatcaaatttgtccactttagaagggacaatgattctattacttgctgtagggaaattagtcttgttccaaaccctgctgataatgactgttttccttatcatattcctacatatgtgtctcttacaacccttcaagagaagaatgaaatcttacagtaggaagaaataacatattcttctcgttgcttgcacttatcctctgttttcttcttctgttgcactacattagagaattcttttgagtcagtgacagagtgatgaggatagactgaaccaattatttgacttgattttatatcttcttactggaatttatactagattgttttatgcttacttaaaatgttggatattcttagggacgtatacagctcaatcttattttaactgctggtttttttcttttgagtgcttcattgttcgttatggcaatttatattcttagaaattggtagtggacctgtacgtatgtacccggtacaaggagatgctcagtaatattttttaatgagttactctaaaccatgttttgggtgcatatgtatgtgtgcatgcatctatttgcatatggacatacactgaccagtctatattattaaactgtgctggtatttgatatagttttcctgtttttaccatttccatatcatgtaccatgttgcataatagttaagattttgtagtgttttgtgaacatttagtttcttagatttctgcatttcattcgctcccactttttcccattataaagggaatgttgtacaaagatacattgtatgatattctgaacattcattttaagagaataaactttggaaagtatagctttcatggaccttattttatgacattgaagattgcatcttatgacttggactgtttaatttacaattgtgtacatctgtgtgggtgatggatatttctggtgagtgtgaaatatatatgcaatgtgttattccatgtttacttctgcaggaaaatttcaacctaaatattactgcatgtaatttttaatatgcaaaaattcagttaaataaggtattggtgtgagtgactgttttcctatgagaggtgagtgtacattagataactcatatttttatctttggcttgggactcaggcaatagaaatgaggttgatattgtacccatgttcttcttgtcatatgtgttggcatggatttttggtttgttgagaacagatattttaatgtatttgcttaatttttaggagtttaggcatataacccaaaataaaattctttgagaaatgacaggaagattttcttttcacatcaaatgtctattaattactttttaaacagtggtaaaatcactctaaaatgttagaattttcatatactaaaagcaaatcctagcacagcaattcatttgagcaaattccaagaaaacatttttctcagttacattcaggttattttccaaattgcaaaaataggactttcctcaaattctgaattctaatcatcttgagaaaagaaatatatttgaaacctaaattcagaacacacttgcttgttagcaagaaagtcatgccaaagataatagtagttaaaatcttgtggaaggcagatggttgttgtaagacagatttttcagtttggattttaaatttaagtatgatatttgctttctttctggaaataccagaaagtttgctttatttcatctgctacatgaatagatgacaaaaaagaaaaaaattacaggctgacaaacactgaataattaggatgtgttaatttttcttagagacccatttatttcacaatgtctaaaataacgttaggcaaataccttctatcttatattgcatgtgctgttattttctcttactttcttcagacatctcgtggggaatttgactccagtgaatttgaagttaggagacgatatcaagatttcctttggttgaagggaaaactggaagaagcacaccccactctgattattccagtaagtttgcaaaattttttttttcatagaatagctaccagttttctagtgagtctttttgaatgcctaaaacctaatttcagaccttaagttcactgtaattcatttatcttaggaataatatttatttctaagtgtttcaatcaatgtacattttttttttaaaaaaaactcttcataatgtgttatgatttctcatttttggttctaacattgtgaatttttaaaaattatttttataagaaatgatcagatgttcaactagtcttccaaacagggaaagcgtagaattgcttataaacctatggctaataatacttgaatacctttttaattttttttgccttagccattgccagaaaagtttatagtaaaaggaatggtggaacgctttaacgatgacttcattgagacacgcaggaaggctttacataaatttttgaaccgaattgctgatcatccaactttaacatttaatgaagacttcaaaatttttctcactgcacaagcttgggtaaatgatttttatttatactcatataatctttgggtgtctgtatctatagtagattgtattgttcctcttgtttaccgttacaaatcatgcagtggtgtacttgaattgagatggaatttttcagaaacactggagagttatccttcagatataaccctgtgtcaaatctacatataaatattacagaaatcttgtatcttctccatatatatacacacacacacacacacacacactctctctctctctctctctctctctctctaatgtttttatgtcagggtgcttcttgcataaatagcaaatactgaacaggtataaatatatttctttcattgacactgtagttgacccttgaacaacatggcggttagggaagccaaccccttatgaaattgaaaatccatgtgtaacttttaatttctcagaaacttaactactagtagcctcctgttgattggaagccttaactgtaacataaacagttggttaacacatatgtataccttttgtgtattatatactgtattttttgcaataaagtaacctagagaaaagaaaatgttatttaagaaaatcctaaggaagacaaaatataccaacagtattctactgtatttattgataccaagtttatgttgtctgtttacaagatgaattgtcagtctgaaatggagggcaatgacagtggcagacctcagtctatggtacttagcaagcaattcaactttttttgtaatgacatgacttttctctgcttcttgggaacatttccagcatcactagtggcacttcatatgggtcccatggtattatttcaggtttatagtattgcactaaacacaataaaaaaaatacatgggaaccacaagagatcactttttactgctacacccaatttaatggagagatgaactactcacatggagatgatcagcgtcacatggcattttaagcagatattcacaacactggagctcaccacaaatagcaacaggagggctacaaaaatagtacaatagtacagtgtgtagtgtagttaattttaagcagttttgatttaatactgcatctttatgtttgtttacatttctctcaactgcatatggtggcatgtaagtcaaaatatgtgcatacgttttgataaattttaactttttataatagatttatacacattttagggtagtaaatgatagactagtatccacatacattttgtggattcatgacatacctttctctcagttttttctacatttctggactatgtggtttgtgaggtttttttagttgtcacaaatctccaaaaaattttccagtatatttattgaaaaaagtccacatgtgtggacctgcttagctcacacctgtgttgttcaagggtctactttattttgagtaataatggatcagggctttttaagttaggataaaagtccttattaaatgggtagatggatgaatggagatggatggatggatggatggatggatggacggacagatagataatataatctccttacttttcctttaattatctaagtgggggagtgtctaatttctaatacagaaaccttatccattctacttgttttttcttttattctataaagctataactctgcaagaaagataccagacaggacaaagggtcaatattaaacagttactggcaaatgttgagttttatatctctcagttgttgccagtggtagaagctaaaaagtggttcatttcaatcttgacagatagtcctctatggaagccctttgtgacttatgtgaaatgaatatgcggcctgacttcagaaccttagaagctgttagaaatattttctacagtcaacagtttcagtaacagcttgccagttgtgacgtgagctgtctctgataatgtttactctatcaaatgaggctgtagcactcttggatggatgtattgcctggtcaaggatggcatctgttattattggcacaaaagaaatcacacagaattggaaataaacaagtttactttgtatgtattctgcaagatattcaggaatgaaaacctgaaggaagatagacaatgtgttatttaatatttgggtaaataatatataatatttttatctgtaaattaggtagtcagcagtattttatttgatcatatattttattcgatcccaagcttgtgtctcaacaagggccacaatgattattaaaatcccttgtccttttttgtttgtatttgttcttttaacttatgccatacttctcaagggatatgtttctgtgcagtatattcttttataggatgttttctattttgcaagtctatagtcgtccctcctaggttaagtatgaaataactagtttcgtatcttattacaagttttctcagctgggcgcggtggctcacgcctgtaatcccagcactttgggaggccgaggcgggcggatcacaaggtcaggagatcgagaccatcttggctaacacggtgaaaccccgtctctactaaaaatacaaaaaattagccgggcgcggtggtgggcacctgtaatcccagctactcaggaggctgaggcaggagaatggcatgaacccgggaggcggagcttgcagtgagccaggattgtgccactgcagtccagcctgggcgaaagagcgagactccgtctcaaaaaaaaaaaaaaaaaaaaagttttctctgtagacagccagttggtgaaggtgg

SEQ ID NO: 27 - DNA, 29825 bp, Homo sapiens
  source 1..29825: mol_type = other DNA
aaaattagaactaggctgacattacatttcacttggttacagctgactggggattttaatcatttggagccacactgaaaaaaaaatttccccctgcaatctactcttaactgatagtcgctaactttggttatgtgtggtaagtatttgacaatggtaagtatttttcaaaaacatttttcctttcttcttcacatgtaaatagattgctgctgatacctatactgtgtctgtattggttggaatgtccaaacaaactggaatagaatttaaaagtttttttgcggggtgttcatggtcactcatataattgtgctcctctggaagatagatttccccagaagtaagaaacaattcttctgcaattcttttctatgcttacctcacttgtcacattatgtgctttttttctattatggtactaatcagagtagagagcagtcctgtgctggaggaagaaatatatcattattgacttgtgtttccctaggggaagttggttgttataggaaaactgatggatgagcaacatttaatggcaaatgaggaaatgaattagcaaatggatgaattgttttacatgtcttctaaaatacatgtatacatgtagatacttgggaattcaaaaatatttttattcgagtatttagcaaaaacttcaaactttcttaaattagagacaataaattgtaaattggttgcaatatgctcaggaagttggattaccagtgtatgtatcccaaggtttcttcacagcaaagagatctcgcattctgttcctgagtaaattcggcatgccttgcttagagattctctcaacaatttcctgcctatgccaattatttatcaatcttgaaattttaaacttttttctgtaatatagttctcctctttctttgactgtctcacacacatatatactgcataatattagtttaaaaaatcaataatttagaagaggttaataatgaaaagcaatattatctatccgattcctctctatcaccagtcctgctccctagaagtaatcattttaaccattttggaatttagttttcagtggttatctccatatttctctcttttttttctttttcaaagacaattgcatgctatttttaatcaactttaaacatctgtggagcttcattatgagaggtggggattaagttcccttacactgccatagagttatatccctatttttagcttctctcttgattaccttaataactttaagcaaatactttaatctttatttcttgttccataaggtacagacagtatctgttgattccccacttcgaagatgtggatatcggtgttcttatcatttacttcttttccttatttccttcttccatattctgttaaaagtactgtcacttttatgttttcaagatatatggcatttatattctgttctgtaaccctcaataagtcttccttacttttttatagattgatttatttcaaaagtttaagaccaatacatagactttactatgtaatttctgttttctgcagagccaacatttccttctcagtatcaatgtcatattcattgtactaaagaagaatgttaaaatagattctcctttcctgcacttcaataaatgctaaaaaatcatgccacattttgttggctctatatatggactgtggctttcttgtacagtgtcttcctcaacacaatttctgactgcctttctttttgcttattgggagaagaaatttcatcttttcaccatatctccaatgtcacacagttttttcccccttaattctagctatttttataattcaatggatgaatactgccattccttttttttgtttgtttttgagacagagtttcattcttgttgtctggtctgtagtgcaatggtgcaatctcagctcactgcaacctctgcctcccgggttcaagtgattctcctgcctcagcctcccaagtagctgggattacaggcatgtgccaccacgcctggctaattttatgtttttttagtagagacggggtttcaccatgttggtcaggctggtcttgaactcctgacctcaagcgatccaccagcctcccaaactgctgggattacaggcgtgagccaccatgtccagctattgcttttaaaacattgttttactttatttttaatttttttactatcatgtaaaacattgctgggaacagtcttgttcatgtttcctggtggagacacacccttcctctaggtacatacctttgaatggaattgctggatcataagctgtgcttatcttcaatattagtacataagtatttcaaaatagttaatactaatttacaatttcaccaatataccaggagtccatgaggatttctgtaactcaaattctcaccaacacttggtataatcagccttttgaattttagccattctgacagatgttcattggtatcttattatgtttttattaaggtggagcacaacttcatttgtttttggtcatttggatttttttttctccacagggaaagttctaccatttggattttattttttgaaaatttcctgttcaattgtattttctgttgcctttttcagctgattttaaggagttcgttatatattctagatgtaatccattggtggttatatatattgccaatatcttcccccactaatgtacatggtattccttttattttctaagtgatgtctttcaataggttcttaattgtaatgtagtccactttatcaatctgtgttaggctgttcttgcattgctataaagaaataactggccaggcacagcagctcatgtttgtgatcctagcacttctggaggccaatgcaggaggatcacttgagcccaggagttcaagaccagcctggagaatgtggagacatcctgtcactaccaaaaaaaaaaaaaaaaaactggcacactggttcttgctgtagtcccagctattctgaaggctgaggcagagggggcccaggagatcaaggctactataagccatgattgtgccactacactccagccttggtggcagagtaagcctgtctcaaaaaaacaaaaaacaaacaaacaaaaaaccacaaaacaaagaaatacctgaaactgggtaaattacaaagaaaagaggtttaactggctcacggttctgcaggctttacaggaagcatggtgctggcatctgcttctcagggagctttcaatcatggtggaaggcaaagggggaagcctgcgtcccgcaaggccagaacaggagcaaaagagggagcagggggaggtgccacaaacttaaagaaccagatctcccaagaactcactgtttcaaggacagcaccacgccatgagggatcctcctccatgatccaatcacctcctacctagccaacacctccaacgttggggattacagttcaacatgagatttggtgggaacatatattcaaactatattgtgatatagtatatcttttcctttatggatatgctttgtattctgttttaaaaagtgttctctactttaaggacatcaagataagtcctatattgtcacctaaatgctttattttttctactttcacttttagatctacaattcacatggaattaattttggtaatacatagatattcaactgtcccaatataatttctcttaaaaaattattcccatggccaggtgtggtggctcacacctgtagtcccagcactttgggaggccaaggcaggcagatcacttgagcccaggagttcaagatcagcctgggcaacatggtaaaaccccatctctacagaaaaatacataaattagccaggtgtggtggtgtgcacctgtagtcccagctacttgggaggctgaggtgggaggatggcttgaacccaggaggtggaggttgcagtgagccaagatcatgccactgctctccagcctgggcaacagaaccagaccctgtctaaaaaaaaaaaaaaatttccacaatgttctgcagtgcctatgtgtatatgagtctgtttctggggttccttattcaggtacactggtatgtttttctattgcaccaataacattatctagtaccatagctttaaaagagatcttgatgaatgcaaaataaatcctcccactctagttttctttggcaagagtgtctgggctattttgtatccttagaattgtcattaaaaattagaaactgattgtcaggttgctcctctccttctccaaatgaattttgtattgagattgattatagttcaatgtggggataattgacatttttacagattgagtctttctatcaatgaatatgatgtatatctcttcatttatttaggccttctttaatttcactctaatttttagttttctgtatagaagttttacatattctgttcattgttaagaatttgatttttatgctattgaaaatagtatatttttcagaacttaatatatattttccgctggaatatagacacataattgatttttcaaaatattgacttgtcagaagtcttgctaaattctatatatttagttgtaaattctcctggattttctagttcataattgtactcatgaaaaatgtccttttgttttttattccttttcaaactttaagccttttatttctttttcttgcttttatgcaatgggtagagccatgatacagtattgaatggaagtagtgagagcagacatcttttactaattttaaatgaaaggctttcaatgttacactatcaagtatgattgctgcaggtttttattagacatacttggttaggttaaataaattatcttctacttagagtatgttaagacttgtttttaatcacgatattaaattttaataattttctacatctattggaatgatcatattttctttctcttctagtctattcagaatattacattaattgatttctcaaacaaaggtaagcaaacaaatcttaatctctggaataaacccaatatggctgtaatgtattttcttttttttgttttgttttgttttgttttttttttgagacagagtctggctctgtcgcccaggctggagtgcagtgccaccatctcagctcactgcaacctccgcctcttgggttcaagcgattctcctgcttcagcctcccaagtagctgggattacaggtgcatgccaccacacctggctaatttttgtattttttatttttatttattttatttttattttttttggagacagattctcgctgtgtcacccaggctggcgtgcagtggcatgatcttggctcactgcaacctcctaatttttttttttttttgagacagagtctcgctctgtcacccaggatggagtgcagtggcatgatctcagctcactgcaagctctacttcccaggttcacgccattctcctgcctcagcctcccaagtagctgggactacaggcgcctgccaccacgcccggctaattttttgtatttttagtagagacagggtttcaccatgttagccaggatggtcttgatctcctgacttcgtgatccccccgcctcggcctcccaaagtgctgggactacaggtatgagccaccgcgcctggccacaattttttggtattttagtagagacggggtttcactgtgttgcctaggctggtctcgaactcctgagttcatgcaatctgcccacctcggcctcccaaagtgctaggattacaggcatgagccaccacgcctggccttttttgtatttttttagtagagacggggtttcaccatgttgtccaggctggtcttgaacacctgacctcaagtgatctgcccgcctcggcctcccaaagtgctggaattacatgcatgagccagtgcgcctggccagtattttctttttcctatattgccagatatggtttgccagtatatggtttaggacttttctctgttaatatatttgttagtgagattagtctgtatttttctttctagaattaccattcttggggtttggtatcaagcatatgctaatctcataatctgaattggggagtatttcttttctattctcaggaagagttcattctatgattagtgttattttttacccctcaaatgcttggtagaattttccactgaagtcatctctgggaccagcattttgtttgtggagagattttagattattattattgtattctattgtgtcattttaaaattttatacatgtgtgtgtttatctataatattccctttcttctgttttctttgtgtttgttttatctagcttcttgagatggatgtaaattttttagcctcatttcttctaaaatgtatacttaagactagaaatttccctctactacattacctatattccatacactttgatttgtggtatttttgttaattcagttcaaaatgccttctaatttcatgatgatagcttctttgactacaggttatttagaagtgtgtttcatggatgggtgcagtagctcaagcctgtaatctcagcactttgggaggctgaggtgggagcatcatttgagcccaggagtttgagaccagcccaggcaacatagcaagacccctgtctttacaaaaaaaaaaaaaaacaagccaggcatggttgtacacatctgtagtcccagctacttggaaggctgaagcaggagaattacttaagtcctggagtttgaggctgcagtgagccgagatcacgcctctgcactccagcctatgggacagaacgagaccatgtctcaaaaaaaaaaaaaaaaagaagaaagaaaaaaaaaagtgtgtttctttagctgaaataatataggctttttttccaggtatcttttcattattgatttctagcaagtttatattttgattagaataaaaacttcatgctactttaatcccttgaaattgactgagacttgctctatgaccccaatatgagattttttttctgtgactcttccatgtgttttttaaagcattatgtattctgtcattgtaggatatagttctttatttatcatttaagtaagtttattcattgtgtggttcaaattttcagtattcttcctaagttttaaactgcttgtgcaaccaattgctaaaagaattgttaaaatatcccacttcagttctggattccttgatttttccctttagttctgtcaattttcctttgtatatttggaagccatgttattagaggcatgtagtttaaagttgttttatatttcttgtggattaaatctcttattatgatatgattgatcttttatatctgtaaagtatttgtgcctaaagtccattttgtctgctattaatatattgatactagccttcttttgcttagtgtttgcatagtatatcttcctcagttctcaaaaaatttaattgattagccagacatggtggcacatgcctatacttccagctacctgagaggctgaggcaggaggatcacttgagcccagaggtcaaggctgcagagagtcatatcccgccactatattgtagcctgggtgatagagtgagaccctgtctcaaaagagcaaagaaagaaagaagaaagggatggagggagggaaggaggaaggaagaaacgaaagaaataaagatataaaaaagaaagaaaaaattaattgaaatataattcatatataaattctctcttttagtgtacagctcagtagttttattcaagagttgtacaatcattatcactaattctagaacattttcatcactcaaaaaactgtacagttagcagtcactccctatttccccctctacaaatcccctgggtaccacaaagctactttttgaatctacagatttgcctattctggacatttcatataaatgagatcatatatgtggtcttttgtgtctgacttctttcacttagcataattttattcaaggtttatttatactgtggcatgtatctatacttcattcatttttatggccaaataacattccattgtatggatataccacatcttgtttatccattcatcagtagatggccatttgtgttgttgccactttttagctattatgaatactgtttctatcaacattcatgtgcaggattttgtgagaacatatgttttcatttctgtttctatatacttaggagtggatcttttcctgttcttgtactgtccacttttctctacctttattttttaggtgtgcctctcataaacaacactcaggattttgtcttttctttaactggacaacctttgtatattaacttggaacacttaatcatcagggaagtacaaattatgaccaccctgggatatggctttatgcagtaatggatgtatatcaacggggacccttatacagtggtagtaagagtataaatgggcacaatcaatttggaaaacaatttggctctgacttataaattggaacatttacatacactatgatccagcaattctaattctagatatgtacccagtagaaataattccactggaacaccaagaagataaaaacattaattttagaaacattattgcttataatagcaaagctctgggacccaaatattcacattcattagaatggataaactgtgggatagttatatattttggagatcatggcatatgaatatataagatacctttcttttcttttttttgagctatataatttcccatgatatgggtagactatagtttaccgatgaaatattaggttgtttacaatattttgctgttatgaaaaacactgcgaataacttcaaaaatatttgagggataaattgctagtgtggatgagcattagtgagtttagtaagtattaccaagtttctctccatacagaatataataataccaccattgatgaaggaaagtgtctgtttccctatgttgttgcaaattttattgctttcttttccaactacattactttctatttactttacttcctttatggttttcctataatgttgaatagaagtgattgtgaatgtctttgcattcctgaatttgaaaggaaataattcaaataattgtgaatcaaattattttattattactaatttgatcaaaaatcagtacgattattttaaggccataggatattccataaaatgtacctaccataatttacataaccattttcctattattgagtattttcctttcatttctgagattcaggtcaaaatccttaatactgcgtcatccatttgcaatttattttacacaaaaggaaacaatcccaatatattatcacttaactgaatttctacttgtgcatatggtgtcctgattagattgatatctcaagattccagtctttttaaaaatctccattatttaaccattttcctataattggacatgaagactagttgcagtttttcattattatgaaatacacagtaacaaaggaatcatatattagatatgagacccccaagaaaattgttcaccttctttaaagcttaattttctcatctatacattagtcaataaaagtacctatattatagtattttatgagagtttttaaatatgatatggcatgtaaagtatataaaatagtttttggagcatggaatgtgttctataaatattagctattatgatcattatggtactcaatgaacagtctgaaacattgctttttttctctggtacatttaggtcctttctgaaatggtatctatgattcagctattcaaaacctaatgaagttggtgactatgacaatgtggagaaatcatgacagaaaatgtggtttgtactggggctgtcaatgctgtaaaggaagtttgggaaaaaagaataaagaaactcaatgaagacctgaagcgagagaaggaatttcaacacaagtatgctaaaacatatttattattttgaattagtgaaaattcatattatcatcaccataaaaaagagcattctaaatgccttgttattgaatttgatatagaattttatttactgaaaactcaaaatatacttaaagaaaacagctgactcaattaaatttgtctatgcgataggagtcacaaaaaatacaaatgtgaaaatggtagctatcttataccctcataggactctgtttaacattcatcaaagtttgattagtatcatatagtctaattttcaggattgtatgttcagcattatatgccctaggacctaaaacaacatttgacagtagaaggtacagtagattctcatttatttgaatagccatgtgttctagccagagctgctggatcacttgattccttgatctgggctatatttatttgactctcatttcctctgcctccattttatcttacctactttcctgattggatgtcaccaaaaagtattctactaatcctgcaaaaatagtccctttcctcatagatgcatatagttccatacaattctcattcattgtctctttctatcattattattattattattattattattattattattattattattatttttgaaatggagactcactctgtcgcccaggctggagtgcaatggcatgatctcagctcactgcaacctccgcctcccagattcaagtgattctccctgcctcagccttccaagtagctaggattacaggcgcatgccaccacactcagctaatttttgtattcttagtagagacagggtttcaccatgttggccaggctggtcttgaactcctgacctcaggtgatccacccaccttggcctcctaaagtgctgggattacaggcatgagccaccatgccaggccattgcctctttctaaacattaaattagcaaatgttatttgccgatgtcagttagcaaataacaaaaaattcaactaaagatggtttaggcgatagggaagtgaggctgttctgaagatagtcaatgcaaagcctcaacatcttttaaaagtcagcttttttttttaatcaccttccactgttaatccctgtgtcagtctgatcctcggattagcttccttcagtgttacaagatgactgatgcacttccaggcatcacagccaatgatcattatgttttcagaaaagtggaaactatttttttctatttcttctttaagagtaaagaaatctttcacagagggtccctaacaaacctctccttcacttctcattggccagaattggatcatttgtacacatctaacccagttaccttctaggggaatgagactgattggtttagataaattaagattcatccctggtgtattagtctgttttcatgctgctgataaagacatacctgagactgggtaatttataaaggaaagaggcttaattgactcacagttccacatggctggggaggcctcacaatcatggtggaagatgaaggaagagcaaacggacatcttacatggcagctggcaaagagagaatgagaaccaagtgaaaggggaaacctcttataaaaccattgtcttggtgattaacatgtggctcctcattacttatacaaatttctgcagccagcttgaatttctcctcagaaaatgggtttttcttttctatcacatcctcaggctgcaaattttctgaatttttatgctctgtttcccttttaaaactgagtgcttttaacagcacccaagtcacctcttgaatgcttcgctgcttagaaatgtcttccctcagataccctaaatcatcttcttcaagttcaacgttccacagatctctagggcaggggcaaaatgctgccattctctttgctaaaacatagcaagagtgacctttactccagttcccaacaagttcctcatctccatctgcgatcacctcagcctggatttcattgtccatatcattatcagcattttggtcaaagccattgaacaagtctctaggaagttccaaactttcccacattttcttttcttcttctgagccatccagctgttccaacctctgcctgttatccagttccaaagtcacttccacatttttgggtatctttacagcagtgccccactctatcggtaccaatttactattttagtccgttttcacactgctgataaagacatacctgagactgggtaatttataaagaaaagaggtttaattgactcacagttccacatggctggggaggcctcacaatcatggtggaagccaaaggaagagcaaagggacatcttacatgacagtcagcaaagagagaatgagaaccaaatgaaaggggaatcctcagccagacatggtggctcacgcctgtaatcccagctacatgggagcctgaggcaggagaattgcttgaacccaggaagcagaggttgcagtaagccaagattgcaccattgcactccagcctgggcaacaagagtgaaattccatctcaaaaaaaaaaaaaaaaaagaaaggggaaacctctcataaaaccatcagatcttgggagagagaatgagaacagtataagggaaactgcccccatgattcaattgtctcccactgggaccctcccacaacacgtgggaattatggaagccacaattcaagatgagatttgggtggggacatagcaaaaccatatcacctggattacttggtaaacacttggacttggaagcaattgatattcttccagtaaacgagggtggggggcaagaagctactgataagcaatgatttgtgttgctaaatatctgtaaaaacaaaagatcttgacagggaggaataatttttcccacttagtttttagtaagtgtgcagacatagcaagattcctgttcaaagtggattctgcaaggacagagagggaagcccaaggtcaatcctggtcaagcagaggatgtggagcctggctaaagttttgataaaagggatctttgtcattaattaagaatcacttaatttcagaaatttcagaagttctctatataggaataatgagtgtgcagtcttgccctttcttactgcttgttcttttttggcatcatctattttatgattagggaggaggattctctgttagcaaaatgtaatttccaaaagttaagttagaccaaaatcagcttctacttttagaaacattacatggaatttgtgtaatgtagtttttcaaagcacctttcccttaatcttaaaacaattacattgtaaaatcattgtacagtattataaagcttggattgtggttaaaattaagtataaactactttaaaagtaaattatatagagatcaaaggttaggtttaaaacctgtaatatgactaaataaataattttccaggtatgctggcttgtgcctgtaatcccagcactttggcaggctgaggtaggaggatttcttgagcccaacgagcttgagaccagactgggcaacatagcgagaccccatctctaaaacaaaaagttagctgggcgtggtggcatgcacctgtagtccccgttacttgggaggcagaggggtgaggcgggaggatcaattgtgccctggaggtcaaggctgcagtaagttacaatcacacccactgcacaccagcctgggtgtcagagcaagacactgtctcatttaaaaaaaaaagaaaaaaattaataaataaacaatcataactgacgcaaaatggtaagaatctgagagaccttttaaagtgagacagagaagctgattaccagagaaaaggctaactggaaaattcatagaaatttaaaaccaaccaaaggtaacccaaagaaatgtccttacttttttactctgctctgaaatagaccagtgtttctcaaacttgtctgcgtaggaatcccatagggatcttatttaaaatagcttctgggttagtaagtctggagtaggaccaagagtctggatctctaacaagctcccaggagacaatgatgctgctgttctgcaaatcacactgagtggcaaggaagtagacaaaagaagcagatttgaaaggggtcagtacacaggcaaggggtaagaagggtaagaatgtaatctaatgctgcttcgttcagctaaattggctagagctttagctaaaaaatgaaagaaaaaaagcctacagtttaaacagaaattgtgttttctcccttttgatgccaagctccttgaaaaaatcaagtacttaggtaacgattggtgtggcaatatcagaaaaaggccttattctacaataaaatttgtagaatcaaattttattttgtttttttagagacagagtctcactctgtcacccaggctggagtgtattggcgcaatcttggctcactgcaacctctgcctcctgggttcaagtgattctcctgcctcagcctcctgagtagctgggattacaggcccacaacaccatacccagctaatttttgtatttttagtggagacagggttttatcatgttggccaggctggtctcaaactcctaacctcaagtgatccatctgctttagcctcacaaattgttaggattacaagcgtgagccaccacgcccggcctcaaaagggttttagaagagttataaaatttcgattagagacctgaaagaatatcaagattaaaataagcagcttcacacctgtaatcccagtgctttgggaggctgaggcaggaggattgcttgagcttaggagttcgagaccagactgggcaacatggagacagcctttctcaatttttttttttttttttttagaaaaagctgtataggaattatagaatatttaagctggaaaatacatagatatcatttaattataacctcacattttataggtaaggcccacagatgggggatgtcttgctcaaggtaaccaaattaataaatcgtatattctggacttagatcataaaaacacagaaccagaaagaatttagcgatctttacagagatggaaatagatttttctaataatagcctgaccgtgaactcagtaacaacagagctttttgtatctccaatgtctagtacttggctataatggttactggattaattccttaagttaaaggtcaagggataagattcctaatttacttgttactaaatcttgctctgaatttcatttctgtcttagtaataataaccattaagcccattgtttgaatagttctatttttataataagtaatataattgaatagctgacattatacattttttcttagttacccacatctatgggaagcttagctgtttagatcagaaggccacacatatcccactgccacagggcacctgttagcagattaaattttaggcaagtgatagatcaaaatacacagatactaagagaggtattttacaaacccaaatacttaaagacagcaaattcaacactttgtttacttttggctttctgttcattaaaataaaatccttattgaagatcagttaatatacaaaactgctaaaattatgtattaactctcagaatgtcaagagatttctggcaaacaaatattcaaattagttaaacttcatgctttcaggactgctcatatttattatgtatccttttaacagcctaaaattttcaaaattttcaattctaaacttactctctttttcatgagtgaagaattttctgggatagaaatagctttttgcaaaaggttttccagtttcttttctttctttttttttttctggagaccgagtcttgctctgtcgcccaggctggagtaaagtggtgcaatcttggctcactgcaactttgcatcccaggttcaagcaattctcctgccttatccttcctagtacctgggactccaggcacgcatcaccacacccagctaatttttgtatgtttagtagagatggggtttcaccatgttggccaggatggtctcgaactccacctgcctcagcattccaaaagtgctgggattacaggtgtgagccaccgtgcctggccggttttccagtttctagtttgcatttttctagtttgagatcattcttatgtttgcaatagatcaaaaatcaacaggaatgtgcttcaaatgacaaagattttatacatttttatatgtaaaaagtaaagactagataaaattaacatgtagtaagatgaaattgaattctgaagttgaactgtattctttgcaagccattacaaagtctattaaatatctatagattactcaccaggaaaacgcaaatcaaacccacaatcggataccattcgcacccactagatggctataataaaaaagagggacaatagcaaatattggtgaggatgtgaataaatcagaaccttgatatgccactggtgggaatgtaaaatggtgcaaccattttggaaacagcatggcagtttctgaaaatgttaaacatagccaggcacagtggttcacgcctgtaatcccagcactttgggtggccaaggcaggcgggttgcttgagtttaggggtttgagaccagcctgggcaacatggcaaaaccctgtctccacaaacaatacaaaaattagctgggcgtggtggagcatgcctgtagtcccagctactcaggaggctgaagtgggaagatcacctgtgcctgggaggttgaagctgcagtgagccgtgatggtgccactgcactcctgcctggatgacagagcgagactttgtctcaaaaaagaaaaatgttaaacataaagttaccatataactcaacaattctactcctatgaatatacccaagaaaaatgaaaacatggtcacacaaaaatttgtacatcaatattcatagcagcattattccaaatagccaatagtggaattaacccaatgtccatcagttgatgaattggtaaacaaaatgtggtagatccatacagtggaatcattctgccacaaaaagaaatgaagtactaatacatgctacagcatggatgaactttgaaaaaaacgatgctaagtgaaataagcagacacaaaggctatatattgtatgatcacatttaaataaagtgtccaggataggaaaatccatatacaaaaagtagattagtgattaccaagaggtatgagagggaagaatggagagtgactgctcatgggtatggagtttcctttatgagtgataaaatgctttggtattagatagtgatgatagttgcacaaatctgtgaatataccaaaatttactgaattgtgtacttaaaaaagtaatttttatagtatgtgtatcagacctcaaaaaagttattaataaaatctatagagttatgatacttttaaaaaatttaaaaatagggcatttgtggtactaatcatatttataattcttgcaaaataagttattgtctgatttccaggtactaatagtcaaatggtttttgattggtaattaaaatatatatatataaaagtggctgggcgcagtggcttacacgtgtaatcccaacactttgggaggctgaggctggtggatcacaaggtcaggagttcgagaccagcctggccaacacggtgaaaacccgtttctactaaaaatacaaaaaattagccgggtgtggtggtggacgcctgtaatcctggctactcgggagtctgaggcaggagaatcacttgaaactggaaggcagaggttgcagtgggccgagatcgggccactgcactccagcctgggcaaaagagtgaaactctctctctcaaaaaaaaaaaaaagtgaatgccacttatgtaattgtctatgaactaaaatgatttcctggtttcctaggctagtgcggatctgggaagaacgagtaagcttaaccaagctaagagaaaaggtcaccagggaagatggaagagtcattttgaagatagaaaaagaggaatggaaggtaagcttttatagaatatttgattttccacattttgcattttgtgagtcagttgagagaatgattctgagactgtgtaattaagactagaatagttagaaactaattttaataatacaccaaatgaatttgagcaacatgtgcaactgaaaagaaacacaacttcacaattattttgcaaaagttcagtttgcttcaaccctgcctaaacctaaatcatttgtgatatttctcctattaatccttcttatagcaacctctcatttcccataaaaaagataaccatctgcctaataaaaataatattgcttttccaaagaaatgctcagttaaaactttatggaatggaaatattagtattttcagtgggtctaccacctaactcatattctttcttccccttacacacaaactcacagttggttaattatattaggcatactctaatttttacaagagcttctaacccttgggtcagtgtttgtttttatgttttatgtcagtgtttgtcagagttagctcctttatattctctactggctattttaggctgaaagggaaaaggcacagagttcagaatagttgaaactcttaaaattctcaaattaaaaaataaatttttaaaaatattcgtgtatttcaaaacagaagtggaaaagcagtttgaattattgattgaaattatttttttggattgtctcattttcaataacatatatgtactttaggaaagcctaatactgcataacagaatcatcaggacatactggatgtgtgtacattattgatcaaaatatttttgtttattctatcatgattggggtttgaaggtttagccaaaaaaaaaaaaaaaaaaaaaggaaaagaaaaaaaaaaggaaagatcttaaaatccggaagtcacacaaagcacttggaaaagtaacccactaaggaaaacaaattccaaatattccaaagtgcttgtataagtcaaatatcacatttcagggtggcgtgatactaaaaaaatttaagtaatatacaacaaccatcatttcttttactgtagaccctcccttcttctctgctgaaactgaatcaactacaggaatggcaacttcatagaactggtttgctgaaaattcctgaattcattggaagattccagaacctcattgtgttagatttatctcgaaacacaatttcagagataccaccagggattggtaagaaagattacttttattcctgtgctattttatccacctgcagatgtgctttttattaagatttttttggatacatggaataaagacctctttatacagccctcaaccttgagaattttaaacatttaatctaaattgaagcttctaggggattcaagtttgtggatttactgaggtgattcaagatgagatttcaatgaaagaaaagcctctttggaaaatatcctgtgattctcggaacaatattgtcggctcagctattcctcttaggaaacaacaggttgaaggcaataaagcaaaacaagaagattcttcaaatgggaaaaaaaaatccaaatagaaaattgctgaggattttgtgtagacaaaatgaaaatagttttcgatttttttttttttcctattgcacggataaacttgtcccttgtttgaagaagggacaggacacagactgggaaaaggaaagacactaagaactccgaatttgccaatacaaaattggcaagtaagttatgctgtaggccgggcgcggtggctcacgcctgtaatcccagcactttaggaggccgaggcaggcggatcacgaggtcaggaaatcgcgaccatcctggctaacacggtgaaaccccgtctctactaaaaatacaaaaaattacctgggcgcggtggcgggcgcctgtagtcccagctaccgggaggctgaggcaggaaaatggcgtgaacccgggaggcggagcttgcagtgagccgagatagcgccactgcactccagcctgggcgacagagcaagactccgtctcaaaaaaaaaaagttatgctgtaataccttaataactataaagattattttatatccaactcctctctattgtatattattttttataggactgcttactagacttcaggaactgattctcagctacaacaaaatcaagactgtccccaaggaactaagtaattgtgccagcttggagaaactagaactggctgttaacagagatatatgtgatcttccacaagaggttagaaagacataaatgcctatgattgtattttccatctgcagtagttgaccactcaatgtgtggttgttaacaataataaaactaatgagaaaattctatgtatttcagaaaaaatatttagagaaaaccatttccttaagtataatgcaggttttaactggagaaagatttagtgtaaaagatacttctattattatcacagtactgacatcatttgttaaactgtgatctccttgaaggccagggtgagagttgtattatagtctcagaattgagggcagagcctaggttgtagtgattacttaaatgctttttgaattaataaatggttatcataaagcacagacaatgtagtgatagcaatgggactggaatgcctccaaactttgatttggtatgatgtcttgttattggtcaaaccaaattgatcatataaaaataaagacatttgtattactttttgaaaatatttaatgctcttagaatcagtgaagaagtttccatggtgctttggctttgaaaacaatgactttacaagataaaagttaagaaaaataataaaataggctattcccttctcccactttatcttaattagtgtatcagacttttcttccaaacaagcaaacttgtcaccaacaattgtcgctcttgcaaataaaacacagtatatacatatacattatatcttctaatagttcaatttaatgaaatgtatacccttgtgtattagtctgttctgacactgctgataaagacatactcaagactgggtaactaataaagaaaaagaggtttaatggactcagtttcacgtggctggggagacctcacaatcatggcagaaggcaaaaggcacgtcttacatggtgggaagagagaatgagaaccaagtgcaaagggaaaccccttataaaaccatcagatctcatgaggcttattcactaccatgagaacagtaagggggaaaccatcgccatgattcaattgcctcccaccaggtccctcccacaacacatgggaattatgggaggtacaattcaagatgaaatttgggtggggacacagccaaaccatatcactttgcatacaataaaaatgataatcatatggataatttcttacacatacaagagggccaataaatattttatttctaactcatgtgtttttgtttctgggttggctccatcattataaaagctatgtgattttgtacagtctattaaccagtctttttttttgagacagagtctcaccttttgcctaggttggagtacagtggtgtgattctggctcactgcagcctcaacctcctgggcccaagcaattctcccacttcagcctcctaagtagctgggactacagtcgtgtgccaccatgcccagctaatttttaaagtattttgtagagacagggtctcactatgttgcccaggctggtctcaaactcctggactgaagtgatcctcctaactaccaaattgcctagcaaaatgctaggattataggcatgagctacccctttcctccaccactattatttggaagttaaatgttgagttttcccatacaattctcaactactggatcaaaggaaaacatgataatgggtgcttactctcagggaaaaaaaggttttgccaggcacattctataaaccctgaaaccaggttattatgaaagataaattttcttcaaatagatgaactttctatgagagttttccacttccctggaggtcatttagctttatatttatttttaatttgttgcggactaatatgactaaataaagcccaagtaaaatgtgaatattcctggatgtgaaatatctcctttaccaatgtgagtcttttagtagtttacattgtggacatttattttgaaaaaccttgctttcttcttcagctcagcaatctgctaaaacttactcaccttgatctgagtatgaacgattttactacaatccctcttgctgtgttgaacatgcctgcccttgagtggctggacatgggaagcaacaaacttgaacaacttcctgatactatagaaaggtaaaagaaataactctttatgctaatgataaaagtcttgaaacctcttatgaaaaataaccaagcaagacaaatgggatctcaagcataatcaatcacaataggtccaactagtttgaaatacactgttttaacagaatattttcatttgttccaagtaagtaaaagggtttgggaagaagaaaaaactggcttttttcaagtgatccacctacctcagcctcccagagttctgggattacatgcctgagccaccacacctggccaaaagtggctgactttgagaaattaacaagaatatgccacaataaccaccttgcttagcatatgccaagcacttctatgcactttacaagtggatgaagaaactaatgacagagatgttagctaactcgctcaagttagtaagtgggcaagctaggatttgaacctaggcagcctggccccagagttcatgatgttacgcattatgcatactgctttgctataaatgggcatattcatcattttattgttctcttaagactctgtctcagattaggtaacatttacagtagttcttcttcaagaaatcctatgagaatagtgaaagaattctagaatatgttgatttgatttcatttctattgccatatgacatgagagttgtactgtagagataaacttcctgatgtggtttctctaataaccaggtaatgtgatgtcagttaactcaataagtatactggttaaagatgttgtaaaagacatttgatttttaacataagaaccaaaggctgggtgcagtggctcacgcctgtaatcccagcactttaggaggctgagggggagaatagcctgagctcaggagtttgagaccatcctggacaacatgataagacccctacctcttaaaattatttgttaaaactccaaaaccaatattttcatattatatgtaattaattgtagaaaccttaatttttcagaatgcaaaatctacatacgttatggctgcaacgaaatgaaataacatgcttgcctcaaacaatcagcaatatgaaaaatctgggtactcttgttctcagcaacaataaactgcaagatattccagtatgcatggaagaaatggcaaatctgaggtaaaaagttgtaggcacaaaactgaaaaaccttgctttctttctggctacagaaaaaagtactgtagagagattgttattaataaatttcagttgttatttatgtgaatggatatcttaaaaatcttttccaatgttgacattctataatttgatgaataggattcatataacactggtctattcaagaaagaatccttaaaactaaagcagtttgggatttatcagctttaagaaatgtcttccattttagatgtttatcaaaggtcttttatggggaagaaagtaaatgtatgaaataataaatgtgtgacctttatgggtaatgttggctctgaacaaacttttgaaaacttggttgacaaaattttgaatcaactgaaaaaaagcatgacttgaaatctctgaatgccttggttctcagtattatcattcttcattgaatttgtttcttattaaaatatgtagtttttaagactttttttctcacagtattatgtaattttttagcatgggtagatgggagtgtcacttgtatgttaccatacagctgacaagtatttttgtcttttctttattatgtttcatgctatgtatgtaccataaccaacctattgcctatgagaaacatgtaagataaaatatttacagccattgttacaagtttatagtgtatttttctatcttgttttatatgtatgttacataacattcaaaaggaattttttttcttgagaaaaggatacaaattgcaaaatccacaattttgataactgaaaattgccaattgttttgcagtactttattatattgggtgtcttgtctcttttgggcttctagttagctaaatgaatgaatacattagacatttttgggttttagttgggattttacatagcttgcattttaattctttggttcttcgctgtttgtattaacccatagcattattttaataaatgttataataccaacctaaaaaaaaaaagaaatgtcctctgttgatgacattttcatgaaaattatacagctaaaaaaacttcactcacaacataaaaatcaaaagcataaaagtgtttatttcctaaataagcacaaagggaaacaattatgttattgatagcagatatattagtcgggagtggtggtgcatgcctataacagctacttgggaggctgaggctggaggatcgcttgagcccaggagttcgaggttgcagtgagccaagattgcgccactgtactccagcttgggaaacagagactatttcttaaaaacaaaacaaaaacaaacaaacaaaaagccactagatataactttttactaagtactatcaaaactctgtcaagcattttttctttttaaaaattattttagattattttaggttgcttgtatgtcttcttttgggaaatgtctgttcatgtcctttgcccgcttgtggggttggtttttttcttgttgagttctttgtagattctggatattagttctttgtcagatgtataatttacatatattttctcccattctataggttgtctattaactgttgattattacttttactgtgcagaagtttttctaattaaatctcatttgtctatttttggttttgttatgtttgcttttgaggtcttcatcataaattctttgcctaggccaatgtccagaagagtttttcctaggatttcttctaggatttttactgtttcagatgtgacatttaagttttaacccatcttgaacgctccctcaagtatttttcttccaaagcttaatcttctgacaaatgagaataagagaatacccactaaaacccaaaacttcgataacaaaataattcatttattcacttgttcagcaactacctgccttgtactgggtggtgaagacacaatgataagtaagatggaggtatataaattatgcagaaactaagttcatagcactaattttatatttaagatatgttaaaattgctcttagaagttaagctgtattgcattaaatatatgctgtaggccagatgtggtggctcacacctgtaatcccagtactttaggaggctgaggcaggcagatcacttgaggccaggagtttgagaccagcctggccaatatggcaaaaccctgtctctactaaaaatgcaaaaattggccgggcgtcatggtgtgcacctctagtcccagctacttgggaggctgaagcacaagaatcacttgaacccgggaggtggagggtgccatgagtccagatcatgccactacactccagcctgtgcaactagactaacagttgcttttataagctttgaaagtaagttgtctaaagctagtgtttttttttctcttaggaaaaaaacataagattcttgagatatatcacatctcaccaagtcgttcagttattgaaaccagttaaaaacgagtaatttagtatattatcatttgacctttctccagggaaataaatgtacacttccatgacacctataaaaatactgttttttgatgaacttctaggtttgtcaacttcagagacaacccactgaaattgaaagtatcacttcctcccagtgaaggcacagatgaagaagaggaacgggaattatttggccttcagtttatgcacacatacatacaagagtcacggagaagagcaggtataagatttgtatataacacagattaaatgttttttggtagagtaatgtgtgtatcactaactgctgccttttgattaattcctttatatatttctcattccatcttaagttttctgtcaaattctgttctcttagtcaatattgtgggaagaaaaaaagtgaaatagagagagaggttttaaagatattcaaagtctttcaagtgggggaaggaaataaatcctttggctaagcatctgaagtaaaaccaagtgagtgaagacatgattcttaaagctttgctacctcattctaccagcttgccacacatagcagtttgaccatgaactgaccttccctgtcattccataaatagaaaaaaaaatttacctagggatgaaaaatattgagaacacagttttttgtttgtttgtttgtttgtttgttttaaagagatgaggtcttactatgttgcccaggctggagtgcagtggctattcaaaggcacaatcatagctcactgtagccttgaactcctgggctcaagagatcatccgacctcagcctctgaagtaactggggctatcagtgcatgccaccacgtctggctgagaacacagattttaatgaacaaagtgtgaggttttgatatagagatttcaatcacttagtctctgataattaattgagggcctttaagctaaaccaagatcaggggaagaggacaaagtgcacaattatttgttaataaaaacaatgaaacaatagtaacagaaatcatagtcttataattttaaaatgttaagaatttttaacttaaaaggtagattttagttcaacttaatgcaacaactagtttgaaaaatgaatataactgagaagacaatgacagagtttttcagctaaaggaaataatttttactaacattcagtggaggatgtttaggaaatggtgattagatttattgcagcaaggtcatagaagcaatgacatggagacagattgggggaagacaggcaaaaaagtcataattgtgacctagttttggaaagcagagaatatataaagacaattaggagacagaattggtaattgaatgaagatgagaaaagggagtttacaatgaatgtttttggtttagagggcaactggatagatggtggtgctaagatggagaatgaagtacagaagatgggttggcgaatagaatcaggtggtagaggcagaagatgatttctaattttggcagtcttttttttttttttttttttttttgaggagtttctctctggttgcccaggctagagtgcaatggtgcaatctcggctcacttggcaaatttcgcctcccaggttcaagtgattctcctgcctcagcctcctgagtagcttacaggcatgcaccaccacgccacgccccactaatttcgtatttttagtagagacagggtttcaccatattggtcaggctggtctcgaactcctgacctcaggtgattcacctgccttggcctcccaaagtgctgggattacaggtgtaagccaccacacctggcccttagcagtaaatttgatgcacctgtggaacatgcaagttgtggtaattgtgcaggtgaatctgaagttcaagaagaggtttgttgaatctgaaaattctgcaggacaagaaatagctgtatgcatatcccacagtcactttctcatgatatgtgaagacaaattaacagttaggaaaacaataatcctgacctaaggctggcatgttgaaggacaaacttatcttcctttaaggtacttgataccattgtcagaaacataccattaagctaaatgggccacagaactgtttctgtatgataattcttgggtgtgtatgtatattttatcaaacataaatgagattatgcctgttgtagaatattgtttatttctgggcataaattgttgaatgatgcaaaacaaattttatgacacaaattagtattgcttgacacaataaaaaaaggttaattatttaatgatatatcttcatttaggttcccttgattggggacatgggtaactaacttaaacaaactaccttacttgacataaaacttataacaagggaaaaaagttaacaacttaaagagataataaaatcaaagcctattatgttattaaaaagattcacgagttactaccactactattactagttaatatttattgaattactctgtgcttggaactgttctatgcattttacttgtgttatctcatttgatgctcacaacaaccttgtgaggtaggtattattgttatcatcatcatccccattttaaaaggaggaaattgaggcacaaagagattaggtagcatgcccaaggtcgcacaactgaagatggtaggtttggaatttgaaccgagacagtctgacaagatatatgagactaaagtcaggaattttaaattggttaggcttcttatttacaaatcatataatcatagaactacaggataaaaatagttatttcagaatatcataatatctaaaattagtaattctgaacctttgtcttggcaaatgtaccatcaattaagacaatttttacaaataaaggcagaaacaaaatagggataagatgcagaagagaataacagtcctaccatatatttggtttagtattttcttgtgcatagaaaccagtcatgagttaaataaggcctaaatttgagaaggtttttggtttcattatctaatttctattttattccaaattattttcccaaacagaagagaacatacttattgtttgtgcctacatatataaaaaatgacctgataaaagatatgagatagctaatcaacttcagaaattatttcaaatttgtgaattatgtttgtaagtatctttttggaagttctaactagacaattatccaacaaaataattaagtgaaataatcttttttctttgaaaacagctcttcagttttgtgtttgtcatggacagattctgacaatatatacatgtatggctctggaaatttgaaggtgacttcattaattaattgtgtttattaattgtgaatatctctgaattgtctgcatttgagaaaatcacaattgtgctttccagatctgtagggaaaaatgtccacatataagtcaaattctcagattggcccttgttacaatcaatcactacctcttgaacttaagaaataaaaaatattaaataaaatcaaaggaagataaatttccaaaattaatacaaacagaaatacgctaattatgtgttgacatgttatgtatgtttcagatcaccaagtcaacggttcaactactttaccaatctccataaatacggatggataatataattcaagatgcccttctaaagaggattactttggtgaattctctaatgtttggatttctgaagtaaaaagaaaagctattaccaaagtttaatgaggccacagcattttttaaagttcatattatttgctatttaaagtatatatttttttgatataaaaatataattaaaaaattttttttggtggaagacagatgatgctcaaatttcttttccattaagcagttgtttctggtgatgaagaatgatttggtaaagcagttaacaaaacattttccaaagacaccagagggtctgtatagtactgcaaagcaggactgaatcccttctgctgcaaatactggattcgaccttggtcaatcagcaatttacaaagatgccctattttcttcttttcttcaacactaagaagcctaaattgaataaacacacacaaaacattgttaaaattttgcaaaagtttataaaaaattatttttgtcactatttattgagagactgttaactaacccataatgtactaagtactttgtcccatgcttccaagacacattatatttatgaccacaataaaagatgtgtatatttt

SEQ ID NO: 28 - DNA, 22807 bp, Homo sapiens
  source 1..22807: mol_type = other DNA
tcttgtcagaacctccaggccagtttcagcaacgtgcaggcagaagctggcccctcggtgggatgcgagggcgtgtggagcgcggggaggagagccccacaggcctttcctgggcacccgcggtggatgggaaggctccttcgggcgcctttcagggaagttgtttggctgagggaaggtggtccgtcacgtgaatgtttaaaagttgttaccttggagaagaaatggaggaaaggattggctttcggaggtgggctggaaactacaaaaccgagcttcctgggaatgccttttaggccgacaggaagtggagcgtcaccgaaagggaggggcggccactcggggactgtcccttgctccaggcgctcactttgcgggcggcactttttccaggttgttaatccagctaatggagaaggatagatgcacgctacttggtttagaaaaaaaaacaaaaatgagcaaacgagacgccccttccgttttatgataactaagctgcagggaaataaatcggctggccctactgcaatctactgcactcgaggtaaggagacacagcaaaatgctccagtattagtatttttctttttgtagtgaggatatatgcatgttttgctctcgttctgagaactttgtgtgtgtgtatggagtattcggtggttttatttttgaaaatatgtacttattctacaattttgaaaaatgttaattaaaactgctgtgtaaaaacagctaggtttcagaagtaagttctgggaagagtattttgtatttgcctttgttagcgtatatttcattcttttaatttaagtgtagaaatatttaaaattagtagcatttactctttttttggaaggaagtttttgtattagcagtagaccttgaattttactctactgcactgctgaggaaaaattaattgggtgcaaactagatagtttaaagataaataattctatggtaattggatttttctccaaaacgcccttattcaatatgatttaacttgggagaaggcgggagaagtaatagaaataattaaatttcagcaactgatttccagcataatcctaactcatcaaggtcagctgcattttgaacttttttgtattctgcctttgaaaataagtcctatattttatactgtattgctacaaatcagaaatcgcttaagtggtttatggagaaacctacattacctcttttcaaatagttttgaaatgggtacgagaaattgaagtttaatttcagttacatcagtttccagagactcccaaattcccccactccccatcccccaagatatatgataggtattcccatgaggaccttctcctttcaaaaagtgatggtgatgtcttcacatctttcagtcttaaagagcataatgaccaaatttaaaactaaaggcattttatttgcaatataaaagtgtaggtggacactatttaaatcaggaaaagttctatgagtgaaaaacgtcaggctgtgcctcacttcttttgtcattgtcaaataatgtttgtcccatatatgttaacctatctttgttgtcatatcaaatttgtttctttcattcattcaacagtcatttaatgaatgtcttctatgtgccaggctctgtgctgggtgctggggatacaaagccagataaataaaaagttccttccctggaggaattttatggaaaagagtagttatgaagaaaggggggggttgtgacaggcaaatcagtctcgtcttttagaactctgtgatgtttaaaatttacacaagggatgcccttggagcagtgtgaagggacagctgtcactcagtaagtctttccataaatactaagccattccttttgccctttcaatatgtcgtattggaaaatcaaaaatgattcttcaactctgttcaaatggtatcttgcaagtcaccaatcagaattcttaattcctttgtatgttacaagattaaatcggtttataagatcataaaatacatatactattgaacatttttaaactaaaaaatggatttctaccctgaacttttaaatatgtttttatatctctcctaccaactaattgcattaggttagctatgcagactctatgggtggaaaaaccccagctgctcagacgtgtgactgaggattctgagaaatgaaagcagagagaattaaggggcagaagctcatttcagtcatggtttcagctccttttgggcaatggtcagcaaggaataggaaagatgctatctgtcattcctcagtaatcaaccctggcatttatctgcaaccctgtttgacccttttagatgcttcaaattgagcgccctgggaactgctggttaaaaaaggagttgtaaaggtacataagaatacaaattcatataaatctagaaactggatacaagtgcaaattgctgacatgttcaaatgttttgctccatggcatacatcctctggtttcaaatgtgtaacattagatagttgggatcgtgtgcatttattttgcttctggatccttatattagggttctctggagggacagaactaggatagttctggtaggatagatgcgtatatgaaaatgagtttattaaaaagaactgactcaaacaatcacaatgtgaagtcctacaataggccatctgcaagttgaggagcaacaaagccagtagtggctcaatcagagtcccaaaacctcaaaggtagggaagccgacactgccgccttcagtctgtggccaaagacctgagagcccctgacaaaccactggtgtaagtctaagagtctaacagtcaaagaacttggagcctgatgttcgagggcaagaagcatccagtacaggagaaagatgaagcccaaatactcagcaagtcagcttctcccaccttctgcctgcttttcgtagccaggctggcagccaattggatggtgcccacccacattgtgagtgggtcttcctgagagtgggtcttcctgtcctagtccactgactcaaatgttaatctctgctggcaacacccagaaacacccaaatacacctagaaacaatactttgcatcttttaattcaatcaagttgacaatattaaccttcacaagtccatcccttgtcaacttgaacccatacacatttcttgaaatcatacctaatctccaaataaatgaaactgcctttgcaaaaattataactgaggaaattatgacagtgaaagatatcagacctaaccaactccgtcttgcttctaacctctaaacgtccattcctgaatgtaagccaaactagccttgggaaggaatttagtttatagtttaaataatagcccttcccaaaagctaaactgttgttgtaaaatgattgaaaggccaccaggcaccaagttaggatgagaggggctggaattctaaatattaccagccattattccagaggtcataagatttgcaacttttccagttactcttgaagataacatcactattgtgaaactaagattggccttttgagatgtcttttcaggtttttgcatttctgataactggatggccccacctggacctgccaaccagttctgtggcccccaccctggagctgagtcagcataaaaggacagttttgactccctaagatttcatccacaagccaaccaatcagcactcccaactcactggccccttacccaacagattatccttaaaaactctgatccctgagttttccaggaggctgatttgagtaacactaaaactctggtctcccgcacaaccagctctgcatagattactctttcttttttgcaattcccctgtcttgataaattcgttcggtctaggtagcaggcaaggtgaacccattgcatgcttacataaaaacaataatacggtcataattatgcctaacaatacagctatcctttatacaaccagaagcatactaatccttaacctaaatgccattacataaagttaacaacacttaaatgctgatatgatgtcaataaatgtcacaggatacaggaaaaagaggggaaatatagatatattctttattcttagtacaagtgtatacatgcataaacatattcttaacaaaataaggaggaaaactcatgacaattacagtcctaatttctgcaactgcttatgtggtcatagctggtattgatcactaccttcttctactacccattctgtattccctttgctttcagcaagcacctcagcaggtcatagttttttacctggtgaagtaaattggtactgcagagagtagggcattggtataaaaatatccaaaaatatggaagagactttggaactgggtaatgggtagaggatggaaaagtttggagagctcagaagacaggaagatgtaggaaagtttggaacttcctagagacttgttgaatggttttgaccaaaatgctgatagtgatatggacaatgaagtccaggctgatgtggtctcagatggagatgaggaacttattgggaactgcagcaaaggtcactcttgctatactttagcaaagaggctggtggcattttgctcctgccctagagatctgtggaactttgaacctgagagagatgatctgaatttggaacttgtgtttaaaagggaagcagagcataaaagtcaggaaaatttgcagcctgactatatggtagaaaagaaaaacccattttctggggtggaattcaaaccagctgcaggaatttgcataagtaacaaggagcctaatgttaatcaccaagacaaaggggaaaatatctccagggcatgtcagagaccttcacagcagcttctcccatcacaggcccagaggtgtaggagggaaaaatggtttcatgggctgggcccaggaccctactcctactctgtgcagccttgggacttggtgccctgcatctcagccatggctaaaaggggccaacatacagctcaggacattgtttcagaggatgcaagccccaagccttggcagcttatacatggtgttgagcctatgggtgcacagaagtcaagaattaaggtttaggaacctctgtctacatttcagaggatgtatggaaatgcctggatgtccaggcagaagtttgctgcaggggtggagccctcatggagaacctctgctagggcagtgtggaagggagaagtggggttggagtccccacacaaagttgccactggagcattgcctagtggagctgtaagaacagggccaccatcttccagaccccagaatggtaaatccacagacagcttgtactgtgcgcctggaaaagccacagacactcaaacgccagcctatgaaagcagccaggagggggactgtaccctgaaaagccacaggagtacagcttcccaagactctgagagcccacctcttgcatcaacatgttctagatgtgagacacagagtcaaaggagattatttaagaaccttaagatttaatgaccgccccactggatttcggacttgcatggggcctgtggccccttttttttggcctatttctcccatttggaatgggagcatttttccaatgcctatatccccactatatctttgaaggaactaacttgcttttgattttacaggctcctaagcagaagggacttgccttgccttggaagagactttggacttgggcttttgggttaatgctggaatgagttaagactttgggggactgttgggaaggcatgattgtgttttgaaatgaaatttaggaggggccggggtagaatgatatggtttggctgtgtccccacccaaatctcattttgaattgtaatccccataatccccacttgttgtgggatggacccagtgggaggtgattagatcatggggacagtttctcccatgctgttcttgtgatagtgagtgagttctcacaagatctgatggttataaaagtggcagtttttcctgtgcttactcactctctcctgcccccttgtaaagaaggtgcctgcttcatcttccgtgatggtcataagaggcctccctagccatgtggaactatgagtcaattaaacctctttcctttataaattacccagtctggggtatttctttatagcagtgtgaaaacagactaatacaaccctcaatagaaagatgaaaaccaaaatatagcaccaacctcactggaagtcattaatcatctacctcattgcctaaatataatttttagaagacagaataacaaattttaatttctaaagtaactcaaggcttatggacaatggcattgaaagcaccattttttgttttgtttttaaatttcctgctgactgacagaaacatcacagaaaattctttgatttatcttaatagtgacaagtgagcctgcttctgtcaattactgaagctataaggagattttttaaaaattaaacttcaacacaatgaggtaagtaccaatattttttggcttttgtttaactgttgtaaaatacgtataacacaaaatttatcaccttaacgggttttaagtatatagttcagtagtgttaactgttttcacattgttgtgcggccgatctctggaactttttcatcttgcaaaactgaaactttatacccactgaacaacaactgtccatttcttcctactcccagcccctggcaactgccattctttctgtttctataaatttgactttcctaggtacctcataataaatggaatcatacagtatttgtctttttgtgactgcttatttcaattaacataatgtcttcaagattcatctatgttgtggcatgtatcagaattccctaatttgtaaaaacagaataataatactcttttgtacctgtgtatcatattttctaaatgtattatccattcatctgtcaattgacctttaggttgcttctgccttttgactcttgtaaataaggccacaatgaacatgggtgaagtaccagtacttttgtctgggaaaaattatctcctatagagttggttttatttccttggaaacactagttcttacttaagccaaaatcttagaaaatactgagagacctctcttaggtccattgaaatagtattccaggttacagaatgaagtcagtatgtatagagttgaatattcttgtagaccagaacaaagctggatatagagactattcagaagacatagaaaatacaatgtggcgggcagggcgcggtggctcacgcctgtaattccaacacttgggaggccaaagcgggcggatcacaaggtcaggagatcgagaccatcctggctaatacggtgaaaccccgtctctactaaaaatacaaaaaaatttgccgggtgtgatggcggacgcctgtagtcccagctactcgggaggctgaggcaggagaatgacccggggaggcggagcttgcagtgagccggatcgcgccacttatctccagcctgggcgacagagtgagactctgtctcaaaaaaaaaagaaaaaaagaaaatacaatgtagctcaagtgagagagtcgagagtttgatttagacttgccactctttctgtggctcaggaaaaatcttttaatactgtattctcaatctcaaatgtcttctctgcaaaatgggatggatacactttatttcctttctttctaaagatttgaaacattgtcagtttgaggtaatctataacatgaagcagggagagctctgacaactttcattagtaatgctcagctctgtgagggcagaaattggttcttcttgctcactaccatcccttagtacttagtgctgggcacgtggtaaatacctataaatatttgctggatatttttaccttcccctaataaagtaagaaagctcacatgaagtgggattgcttccatcttagattcaatacttaaaaatatttttaagccataattcatctgtatgaaatccatttctcttacagaagtgattttggaaagtgagttaatggctgaaaaccaatattggataaaagagaaagggttctatagaacagaacagggatctgttgcctgacaaaacagattcaaatgaaaatctctggtatcctggaatggtaaatgtacaatatttgcagaggtacttggtttctttttgacccatttctagaactaattttgcatggcactgtactgagctaaaaatgcttttctatttctaggctttcctcttaggatgcgttgactccttggatcctatgagtcatggatatgttcctcttaggaataaggcctctctcactcctgccctaatatatgtccatggaattggtcatctccaaacatcatcatcattatcattatcatcatcaatagctacaattaattcactattccaagagataggtgcaaagctagaaagaacttttatctagcataattcagacctgcgcagtttgaaagtagaaaggacctcattgtctacctcaggagcagatagctggattgaaggaagcaagtggtgcttgaaaacgactttatgcataatatttatgttatttccctgtaaataagtgataacaaagcaaactctagttaattgataatagctgcctgaagcattgttgagaaggaataagatcctttgtataggaaaggggaagaggaaaactagaaaatgctagaactgatgagcagcttttgcaatgcataagagcttaggattgaggagggaaatagaaacacaggtacttaatgcctgatatcccattttcagtgctgcccttgttcattctagcctgatttacctgttaagaaatggctcattcaacctgtccgccagatggaagacgtgatgtttaatgtaatcagcacagagatgctttcctcacagcttgcagtgctaaatgacctattgcagcaacatcattctatttaaatgtgatactgaagtttgtgtagctacttctcaatattttagcaattgtttcagaactgtagtctaaaaagggcaggactaggccttctaaataacaaggtttaaattggctatcaatgatcatatatatgcgtagccattctattgtcaatagaaaagatggatcacttccaccctaataactagtccgtaacacagttgatccagattgtagtcatctaaatgatccattcatatcactgtaattggccataaacataagatcacaagatgaatctctgacactacatggactcttttattattataagtctattcctattcctgcctttactgctatatttattattaacacaaactaatttaaattattttgttttagatttgtgaaaaaagtaacaggaattaagaagaacctcgtaagaatagaagagctacttaggaaaaagggaggggaaatcattttggaaggagagcatagaattggtagaaaatgagaaaagctgtatggcatttctaaaacaacaatgaaaagaatgactttcctgaatgtgggtaaaaaccttacatcaaaaactcttccccgaatcttgtatagcacctggaaaagacttgtgaagaaaaatgacctttcatgtaccatttctggcattttgtattttgcaatgcaataaattctagtttatgctgcttataattttaatggaagaagcttaccatgggcaatactgaattgagttgtgtagtgttctgacttagttttctctttctgccaattgtcatgaagtctgtagtttttgtcactttctgaacccaaactaaattttcttttctcaaccaagtaagaggttttttgtctgtttaaatcatgtatgctgcgtgccggattaaataatatagcttccggttatcatgacctgctaaacttccttggggaaattcacaaggatgatattatccatcaaatgatgctttccccccaaggcaaatcagctcattcaccaagagctttcatagaaacagggatgttcaaatatattttaatgcagaatatctttgaaaagatgtgaaaaaaaatcagagatctgagacatcttttgtttatcaagtggcttggccacagaactgcatgtagaaagggggcctgtgtggtctgtgtttgaggtcacatttcatgacatgctcttctagtcaccagatgggtgatgacccagctcttctatgtagggaacagttgctttggtactgtctagtcttaattgggccttaatttacatttaatctgcatttattctgttaatgtttcaggcattcattgacatttaggacaatttagacataaattccctcatttaattcaactatagtgatgtgagcactgagtcaaaaaatgggccagacactgttctggattataaagaaggacagaaacttccctcaagatacgttaagactgaaaaaaacagcaaaagaacagtcgatagttgaaatacctgaaaacaaggactagaaacacagtaatcagagttcactggaatactcagggtggagagtggtgagggaaacatttataggagatgtgatatttgaaagagatttgaggggcagggagtaagagtttgtcagatagaagggttttggaagtagagaaaatagcatgtaccaatacatggagtcgtggatcggctcactgtatgtaggtaccattgaggggaaatgtctttttggaatttggcaccacatgcgcctttgccttagtttaaacagtgttggttatctgcatgccataaacctggtcagaaactggtcattggttgtagagccgtctcttccaattttctttttgcatcttcttacgtgcatcagctcaggttctgcattggcctctgtattcaaccttggaatgattttatctcttggcagctgaggccccttttctgagcatctacattctatattcatcagtttataggcaagtaaatattctagaagatgagccagaggagaaacaatctggacagtatgaggcaaatctcgtagtgaaatggcagaatagttatcgttctgctgccatctgtggcagcaaaataaaaatgacagcttctcattgtacaacaccacgttgctcattgcttttctaccttatgagtcagagaacataatctttgttcatgctgtgcactggcatgtttgttttcagcttctctctggataattattgctttccagtctgaaggaactagccttgaggaaagaatccttcaacggtgtttcttctagggaactttgatagattatgtagtaagtaactctatagcagatctttggaaattcaaattgcctggtccatttaaagacatccatgacagaatttgtactgttatttaatatactatatattatttactttcttattctatgtccacatttaagaaaattacttgtaatttcaaataatgctctttgaaaagctacttcagttctcagatatttaaatattactgacataatgacccagcaattctactcttaggtaagcacctaagaggactgaaaccataggttcacataaaaacttgtacatgaatgttcatagcagcattattcataatggccaatatgtggaaacaattcaaacgtccattaactgatgaatgaagaaaatgtggtctatccatagaatggaatgttacttggcaacaaaaaaaatgaggtactgatatatacctcatgatatatacagcatggatgaacctcaaaaacattatgctaagtgaaaaaagccagatacaatggtcatatattgtatgattccattcatatgaaatatccagaataggcaaatccactgagacagaaaataaattagtggtttcctggagctgggatggaggtcaggggttaagggaagtgaaaatagggattggctgctaatgggtctggggtttctttctgaggtgttgaaaatgttttaaaattaaattgtggtgatggttgcaaaactctgtgattatattaaaagctactgaactgtatactttaaatgggtaaattttattgtatgtaatctctccttaaagatactaaaaaactccaacataacaagtataattttttatattatcttgcaggttagtgacagtcttccttattaattttttgacacatccttgcagaatttaccctagcatagtggaaagagttgtggactgtgccatcagaaggtttagagtcttctcttggttctgctgctgattagccacatgcagctgcatgaccttaggcaagttccttatccccggaccttgagttgtttatctgtgaaacaaggaaactggctaaggaggaccctgaagtctctttcagctctctgagtttctgtgtttgtgcaataagtcatataattatgtaattattggggcagtattttttagttggtttgttgtgttttttgttttttgtttttttatgagatgagagtctcactctgttccccaggcaggagtgcagtgatgcaatcacagctcactgcagcagcctcaacgtcttggctccagctatcctcctgcctcagcctcctaagtagctgggactataggcatgcaccactacagatggctgattttttaatttatttgtaggaatggggtctcatgacattgcccaggctggtctcaagttctggggctcaggcagaatcctgcttttgcccccgtaagtgctgggattacagatttgagccatcatgctgggcctcccggggcagttttagagacagggctttgccctttattgtttgagtataactaatggcagtaggattttcagaagccacctctctagtagtcctcatcatgatgtttaagtgtgttttattaggcaacctatatgtagatcagggtttctcaaccttggcattattgccgtgttaggtcagataattctttgccatggggggctgtcctgtgcatcgcaggatatttagcagcatccctaacatctacccactagatagcaatagtatctcccctctagttgtgacaatcagagatatctccagactttgccaactgtcccttggaagacaaaatcatctctagttgaaaacccttggtgtccccagcagtggtccccaagctttctggcaccagggacctgttttgtggaagacaatttttccatggatgggtggtgggggatggttttgggataaaactgttccacctcagatcatcaagcattaaattctcataaggagcatgcagcctagatccctcacatgcacagttcacaatagggtttgcacgcttgtgagaatctaatgccacagctgatctgacaggaggtggagctcaggtggtaatgcttgcttacccattgctcacctcctgctgtgcagcccagttcctaacaggctgcagaccagtactgatgtgtagcctggggattggggacctctggtgtagaagacgctaagtaacaatgtatcaaaataactaaaaggatgtgttctctacctataaagaactaatgaattaatgtgcagaaaatatcattgggggaaatcttggatttttttcgttcatgaggagaagaggaaggatttttgttttgttggcatttactgtatttatcaaagttatatttactgcagtcatggggatgggtgaaggacagaaggggaatagactaagagctgtcagatcctttttggaatgaggcagggtgtcagcaaatatataaagacataacttaaaaaatgaaaaaccaaaacctaaaagggaaagtttaggaaatgagggcaagagaactgaggtgcttatgtttacttcttagttcttcccaagtacgacataggtcatccagatgtgttttttctcatatctctcattcaaagctcaaagctgcaaattagatgataggttctttctctaaaagaagaacagaagaacgccaaaaactgtgaaatccttctagccataaagtcatcattattctccaaattgtactgaagctgtttctaatgggcctacaatggagttctagacctcagctattgtcaaagtacagtgtgccacttgcactacagtctataaagtccttgcttttcgtactttactatgcaaactaaaatttacataattttattgggttgcattatttaataaatacctcatgaaatatttacactatgtttctaaagacataaattattcatatctcctgaaacctttctgatacaggtaaaattgggggattaggagctatctgaaaggaaatgtctgtgatggatacaggggataaactcctacttaaaagaatacatgagaaggaagcagtcactcatgagtgtcttcaacggtgtatatttatagtaagctatagtaattaatcttattactttttctagattaaaactgctagatagcaagttattagtgtctagagatcagaaacacttctatgtaagttttaaaatgtgctattcctactcagctgcagaaaatgaatataaagatcttaatcatggtatactataatgcagttagtcaaagtgattgtttattctcagtacttataaccagtcatttttatgtagaactgaaaatatgtgttatgggacctacttttccttcaatattaaaaggattttcaaggactttgaaccaagattgttaattcgtaatgatttgtccttgaccacattaacattacatgttttagtaagagggtagataaaatgaaaacatggtacactaaagctttaagttattatccttgtaaaataatcatggaaaagctgaggttaccttgaaaataatttatttgtttataccttaagagtgaggccgtgatagaagcagaaacacaaaattgctctttttaatagaacaagctgcagagaaagtccaggagagatacccttgaaatcactctcaaaagcttactctaaaggtgacattacttttcaaatctggactgttgaaaagtgagagctgctgaatgacaatgatcttctccttgtctttgtgaacaaactcttcctttgcttgcacatgcctgagcatactgtcctatcatggagagtatgctcttgtccttctttgcaattctctaaacttaaacttcaaaggaaaatgttaaagacggggtatatatgatctctctatgtccttgaactatagagaggaaactttctaccattacaaaacacacaccacaacatgaaacaagcttacaggaatatgatggttactaacccaaccactgccaagtctcctcagtgaaaaacaaaatgttgagtagatatcattaggaaagtaaaatgagatttagtttggaacagaatattccaaaactattctattctattccaaactaaatttagactacagtcttaggattgcctatggaatgatggcctagcttcaattgcctgactttagccacaagacatgaaatcaagagcttaaatattactatgtaagtatacatacagttcacttttccaagaagagggggagtaccaaaaataaaatgtacagaggcagtgttataccaagaagaagagtgacagtagctctttgcagttagtatacttcagctgtggttagcagtgaaaagtcttatccagctgtattacatctgtcagtattaagcaatagatgagagtaactgtttatcatagccaagaagagaaattgtaccagaagtggggatgagaagggatagactatgggttaattaaggtcaccaagaataacatctcatctattctttctcagagatctatttttttcctaaaggtgttttaaatatgttgtttagaaactcctgattggtttttgtttccagtctttcttttcataagtaaatttctttgaatagttcattttcctcacttctggctttgcacttgaatagagtagtaaaatagatccatgatgtgctgaaatggctatgaagactcagttgccaaagtacaaaacaaggaccatacctaaaatgcttctggtggcctgtggaagagtaagtagcctggaatcagaagcagaaatagcagaagattgaaaaacagaaataattgaatgccaacagtactacagcaggagtcagcaagcatggaaatgaaatgttattggaatccagggaataagagttttaggcatctataaaactgtctgagatttaaccttttctcatataagcaagggatttgattacacaaaattttttgacagtggatagctagactgtacttatcaatttgttcactactgttctatggctatctctggaagaccctttaggtacaataaggaagatgggagagtacatagctgataataataccttgtgatttgtactgtgagagatcgagttgtggaagctgtagggctgtgcctcagttcaacctggatgtaaagccaggcaatacacccccaagcccatgaacaacctaggctctcggggcagattttcctgttggaaatcctagcactattactgaaattacttggtaatcttgggaagggcatgtaatctctgtaagcatctaaactattaaatgggaataataataataaataataaattagatccaagaactctccaatggcttctcatctggcgtatagtaaaatccagactctaatgagggtcagaggtcccacataatctggcccttgcttattctgatttattctttttataaacagattctcttcatacccgctaccccagattatcttttgaatttgtttattgtgttatctgtttctccctatcatctcctctgctactaacagcagacaccttttgtatctcattaattgctgtatccacagaacctggaacagtggtggcacaaagtaagtgctcaggaactatctgttgaatgagtaagtacatactgtggtatatgaagcacatagtacagggctggtaagtaatacacctaccataattgtttgctgcctcatgtattatggctctgtatgattttgtttgggaaaaagtctgctactacagaagtgtagattcgaaattaatatattactaagggaaataaaatcccagttgaaaaataatctcagttctggagatatagtgataaaatgatggcaaatttttaaatgcttaatttttccaattttgtgtgtataacatcttttgtctgcaactgcgtaacaagcagggcaagaaggaagggaatattaaactggttttttaaaatctcttaggccaaattaccttattgaggaggaagggagaactgaatttgaatcaactaaaataagattgatatctttcctcattggaaaaaaacatgaaaacacagggactcgtaagaatgctaacatttgtatgttgtttccatttctactccaggtgttgccacatctgcaaacttcctgggagagtaatggggattcgagtgcttcgattatctttggtggtcatcctcgtattattactggtagctggtgctttgactgccttacttcccagtgttaaagaagacaagatgctcatgttgcgtagggaaataaaatcccagggcaagtccaccatggactcctttactctcataatgcagacgtacaacagaacagatctcttattgaaacttttaaatcattatcaggctgtaccaaatctgcacaaagtgattgtggtatggaacaatattggagagaaggcaccagatgaattatggaattctctagggccccaccctatccctgtgatcttcaaacaacagacagcaaacaggatgagaaatcgactccaggtctttcctgaactggaaaccaatggtgagttgcagtgtagttctcagcctggaaaggctgccgctgtccagagctgggacagacatgtgaatttctggccttctgcttaaccgtctggagaaaaatgaaggaagttagtcctaagaaagcactttggaaagcttgagggacaatttccaagatgtcaagaagtggtttcctggcgaagaggttaatattgtaataaaggatatgctataattacatatgattgcattacagttgatagtaagatgccatttagcttatgcttaatatatttttttgccactcctcttttcctcccattcctgacagtttcatgaggttgcaatttgcttaaaagaatcttggctttattcatttataggcccaatagtttctaggatgatggataataactgcttgattattttcccttcaggcagttatacaatcagttatgataccaaaaaaattattttctactggacaaatctccccaagaatacattgcttatttattgttgggtcagaaaatacttcatttgaatgatctatatagacactattgtattttactacttttgttttcatttccgaactattcaacttaaatttttgtcctttcattttagcagtgttgatggtagatgatgacacactcatcagcaccccagaccttgtttttgctttctcagtttggcaggtaatgttgctgtctcttttatgaaaccgtctttataagatcttgactagtacttaaccacggcaacatggttaatatagaagttacctaaaatattttagataatatttatctaaaagatggatgaatttgttataggctaatcaagattttctgagcttagttcagccatcctgaaagttatagtatcttttatctagatttaatttatattttggtgtattggggaaaagagctagaactgccttccagagaacaatggggaaatgatgtggtccagcaaaaactagaatgaggagatgttttgcctagaccacagacatgtgtctcaaatgataagcctatttctatgttaataatgtgtataactttttgtaaaaggaagtatttattacctccacaaaatttaatcctggttctgagagcattgtttagaaattttgcagtaataattttacatgtaccattgtggtaggagggttttgttttattttgttttgttttttcctaaatcatagcttgaataagcaggcataaattggtcagtatcctataaaagccgctctctcctattgaatatgtgttagtaatagctaacttttacaagttgcactgccattacctgaaaccggaactgcatggaagtacttcgaagccgtgtcaaataattaaacactgtgctacccagtaaatgatcgaatttatgccatggtaacttttaaaattagcttcttgggatataacagcattcgatattaatggtaagtgatcacaatactcagcagatatcagcatttttaaaacttcagtttttaatttcatgcctagtgtgctgaccaacgaaatttttccatatcaacaatttttttttccagtccttggaatgaaatgaaatacatgaaagcttcttggacaaaaagttctaatgtgataattcaactgtgagatttctattgatgcttaaaaatccatttgcccaaaatgtaaaaatggaggcagaatatggggactgtggttaattggaaccatctgagtaaactataaattaaagatatataaatatgatttcaggttttatttttaaaaatatcaaaaacaatttcagtccattgaccaacttaaattcagtccaacccaaaccctgcatagcataatgatctgaggtttgtgtataagcaagcaagattcgagtagacattcatctgtgtctttgtatttgcccattacctccacttttagtgttttcccttttccctctctagccaattgtgaaatttctttcattctcctagattgtataaatagcgcatcttctctgaaacctcccagcctttatcccccatcccctgaccttcccctttgcctcccagcaacacagttgtcattctaccctcaatgtgcccattgaatttacccagctgcacttaaaacaactttctcacagtattgtatttccttgtttgcatatccatattatacccctctaccctctctagactataagtgctttgaaatagcatttaactcagcctcgtgtgtgtgtgtgtgtgtgtgtgtgtgtgtccctagttctgcatctgttcaataaatgaatgaaactcaaattatttatgagtgaatgaaactttcaaccctataaattcttacctctttcccatgcttcagtgtttttcttttgtttgctgattgttgttttatttttagtcatgctcatctaccatctatcctttcatcaaagattctgatgcatctctctcacatatacataatataaacatttatgttatatagataagtataaacatttatttatattatctcattttttaaaaaaagaaacacccaagctgaaatgggataaatataacattgtttaaaatcaacagtaatttttatgaacatcgaaatcaacatgaaaaagagacaatcacacatgtaggtccataattttatatactcctaagagattagaacaaattttcaaaacgatcccattatctcttatttcctacaacaaatagcattcaggcagtcaacttttctcgcagcacattttgaaggattggactctttggtgactggaatttgttaatgtcagataatgtttgaattaggagaacatttgtaagggtagaatatttgttttcagagatgtttgggttgtgatgccatttgacctgtaaacatatcagaacacagatttatgaagttacctggagctagataaaactgaaatgtagaaaccaggaataaggaagagttgacaaatcagtttcattctctctgtaataaatcattgcctttttcactatgtcttctctaaaaatatgtgacattttattgttctttttccctcttttcagcaatttcctgatcaaattgtaggatttgttcctagaaagcacgtctctacttcatcaggtatctacagttatggaagttttgaaatgcaagcaccagggtctggaaatggtgaccagtactctatggtgctgattggagcctcattcttcaatagcaaatatcttgaattatttcagaggcaacctgcagctgtccatgctttgatagatgatactcaaaactgtgatgatattgccatgaattttatcattgccaagcatattggcaagacttcagggatatttgtgaagcctgtaaacatggacaatttggaaaaagaaaccaacagtggctattctggaatgtggcatcgagctgagcacgctctgcagaggtcttattgtataaataagcttgttaatatctatgatagcatgcccttaagatactccaacattatgatttcccagtttggttttccatatgccaactacaaaagaaaaatataaaagtaaaacaaacaaaaacaaacctgaaaactgcttggcatttgagtagcttctccatgctatgtatttttttaagcaacatcatgaattttatctactccagaagtctctacaatagaaaaaaaagtgcagtgcttctaggatataaaattcacattacttttgaaagccaagaagttggtcttatccagttaggtcttcttatgaagagttttcatccagggatataactccttggtcagtgattttattgtttacatcctgagactgttctacagtttctttgactcctggcatttgccttaaggacctatagcaagctgtttctaggatcagaaactcaagagaggcatttctctgctttttcactaaaggtcagttgttttaatttgaaacctgaaatgcctctttagcaaaagcctgtggtatggggtaaagccatgtaagaagagaatagtctcagtcacatatgaagaggaaaatttgcagctgccagtgctttccttgtggccctgccaaccagctcttccaggacgaactcagtccagcatggttttgatgtaaccatccatgcttttatttttgttaagtcttttgtgactgggacagttaattttagtagctgaagaacgtctagttgtttgcttgatatttgtgaacatttactgcatggatcacaaaacaatataccctgtatttcttacacgccacttatatgcagcaaggagtaaatgtgttactagattcgggtagtgcattttgtcactgaatctgaccttgagaatgtacattaattcttatattttacataatgtatgtgttgtttaagaaatgtataaaaaacctgaaaaaaatgagtaagaactggcagaagttaaaaccctttgtatcaaaagatctttattggtagagcactggttatcttctggatactaaaaagttgtattacaaagccaaacacttgcattcacaactttaaaaaaagatccaaggaactattcataatgatgaaatttcaactacatacaaggaggagaaaataagaacccagtcataacagaggaattctataggagtctgcatcaattcattcttaaggttgcctactctctgttatgtgaattagcgtctgtgtttcacccattgtctgtgtttagtccttgttcaccactaaggcaaggaattcttaactaggcctctgtttaccaacttctctttctcctcctttccctcttattcctccttctcctcttccttcttatataatgctagtatattctcaaaattgcaaagctgtgagaatattaaaataatcatggctaatgttccaataatgaggtctttgtgcatttagttccgcatatgatggttttttttttacattaaagagtatatgtgtcttaatgcagtcagattgtaaaaaacaaaaacaaagaaactaagaatcttactaaaaatcgataatgtcagttatctgttttgtccaatattggtagtacttttttgcctcttatgattcctctagcagataaataaaagaaacttttgccatccatgtgttctgtgtta

SEQ ID NO: 29 - DNA, 2649 bp, Homo sapiens
  source 1..2649: mol_type = other DNA
gaagcccccgtttcctggagcccgcgccgtgccgcgctacgcccgccgggagccgggcagagcggccaagatgtcgcagcccaagaaaagaaagcttgagtcggggggcggcggcgaaggaggggagggaactgaagaggaagatggcgcggagcgggaggcggccctggagcgaccccggaggactaagcgggaacgggaccagctgtactacgagtgctactcggacgtttcggtccacgaggagatgatcgcggaccgcgtccgcaccgatgcctaccgcctgggtatccttcggaactgggcagcactgcgaggcaagacggtactggacgtgggcgcgggcaccggcattctgagcatcttctgtgcccaggccggggcccggcgcgtgtacgcggtagaggccagcgccatctggcaacaggcccgggaggtggtgcggttcaacgggctggaggaccgggtgcacgtcctgccgggaccagtggagactgtagagttgccggaacaggtggatgccatcgtgagcgagtggatgggctacggactcctgcacgagtccatgctgagctccgtcctccacgcgcgaaccaagtggctgaaggagggcggtcttctcctgccggcctccgccgagctcttcatagcccccatcagcgaccagatgctggaatggcgcctgggcttctggagccaggtgaagcagcactatggtgtggacatgagctgcctggagggcttcgccacgcgctgtctcatgggccactcggagatcgttgtgcagggattgtccggcgaggacgtgctggcccggccgcagcgctttgctcagctagagctctcccgcgccggcttggagcaggagctggaggccggagtgggcgggcgcttccgctgcagctgctatggctcggcgcccatgcatggctttgccatctggttccaggtgaccttccctggaggggagtcggagaaacccctggtgctgtccacctcgccttttcacccggccactcactggaaacaggcgctcctctacctgaacgagccggtgcaagtggagcaagacacggacgtttcaggagagatcacgctgctgccctcccgggacaacccccgtcgcctgcgcgtgctgctgcgctacaaagtgggagaccaggaggagaagaccaaagactttgccatggaggactgagcgttgccttttctcccagctacctcccaaagcagcctgacctgcgtgggagaggcgtagcgaggtcggaggggaaagggagatcccacgtgcaagtagggggaatatctcccccttttccctcatagcctctagggagggagagtgacttcattctccatttgaagagattcttctggtgatgtttacttaaaaagtgatccccctcaacaacggatacagcgtgcttattattgggcatttagcctcaaaagcatgtagtaccaagcacttgtatttccgtatattttgtttcgcgggggagtgagggggaagaacacggatgaaaatgtcagtttttgaagggtccatgcacatccctgacacctcacaccttatctaagtctgaagctggggagaaaggggttcatttagacttcatacatttccagtacgactttagtatctctccagagccatattttctcagtccgaattaattccccctccctaggtgcctgtaggctatggtacttcttcctcattgttttctaggtaaacttcactactggtaattaaggggaaggatatgaggaagcagtttaaatagccctgttctcattactctgaccacatacatcatagggtgctaaagttgatgaacacattaatccgttaagtaaaatggactttgtaattgtacagcatacctaagaaactcagaaggtgcatttaagagagagacctgaaagaaatagtatggatttttaaaaattcttgtctctactattataaccaaaaaatatttcttgtatgtcccataaaaatatttgtgtaattcttatgaaacaggctggtagaggaggtttctgagcctagcccaagggcttattcatcaccatgggtaaattatttaaactcacttaattaaggaaaatattttcccagctagaaaagtatactcattctcatttaaactctctcatttggagggatcatgtgagttggcctacttacaagtagtgaaagttcccttttcagttttgttttgttttgttttgtttttctctttcactcagccaaatgtgaaagttgtgaatttaggaaaatcacttgtaatgaagtgtgaatcttgttatcaaatttatttctctgatgtttccttccttatccttgtagccaataaaacattgacattctcacgttttatagatgaggtaaaaagtcttgtgtgctgtgagttataatgcttttgcctttttaatattattagttcttaagtgttacagccccttcagaatataacttcaggacaattcaaactatgcttaatgtatgattttcgagcttctgtatgctaagaaaataggtgtgaaaaactggtgttctgaaatagcctaacatttattgtaattctgaattttctgcccttttattcattgcatattaaagtattagagtataaaaactaa

SEQ ID NO: 30 - DNA, 32742 bp, Homo sapiens
  source 1..32742: mol_type = other DNA
ccccaacgccgcttctgcggccaaagtaggttgggagtggaaggtggtggctgctgctccgcagtgtcgggaagatggcgccgccggtggcagagagggggctaaagagcgtcgtgtggcagagtgagtgcggtggggtaggggttgagagagggaaggccgggaggctgccgtgccgggcctcgttttgcagccccaacccagcggtctgttgaggagccgccgcgagcacttgttgctttgggacctgtgtgaggacttcttcctgctttcctgccctgccttattccttgccagcaccagggatgggcggggtgcgacgggacgcggccttctcgttggcgtcgggcaccccctcgcctcggccgcgctctggccgcgaagctccgccccgggtgagccgcccggcccggctttccctcccgcggagcccgtgcgtgccctcggccgcgctccccactcttctccgctcccgtccgcgctccaccagttggggatgtctctccatccgagacaattcgggcgctgtttattccgcccccatctccaccccacactggagtttgcaaggactgtttattctgcttattcgtgttagtatcaacccgtgcttttcaaaaaacctcactgtttaacagactcatcttcccctattccgagaggagcctactttctgaaaagttcttgagaagagaccattggaatgaccggtgtccagccgtgacatcttcctgcatagcctgggcaagagccgctccttccgttttccctactctcgggggcccctccctgctgttaggaccggactccttattggttactgatgttctgcggtatcatccacaactttcataaacatcgctccaaacctaggtctggcaggttagagaaagaatgaaaccacccaacaggaataaccatcattgtttggtatctctgagttcaagataattatggcctagtagtggaaagggagtagcatctaattagtatttcttagtccaacttgttgaacaaaaaacaaatgatttagtcagcagaattctgggagttagagttccttgtctaaaattaaaaatccaaatcagtaactgggatagtgcttaacatatagcaggcactaagcaaatgtataaataggtgaaaaatatgaaattatcttttaaaagattagataattttaaggttggcatttgctttttcaagatttacatggctgacttaagatttgagatgttttaaaacaatggtatttaaatacatttatgtgaaaatgggtaacaaattgtgttgtataatttccaagatatatatgtgattaacatccgcatgtatgtatttaagccagttctttacatattgaatcataagcttttccctttttcacattttccttctgatcctcatacagataaagacattgtttttattatctgtcattctgtgacttccttttttttaaacaactgacattgactcaacatttttcatgttgcttcacaatctcgtaattaacattttaaattgctttttaaataccttgaggtggcaaaaaattttgatagcagaaaagaaaagaaaaaattatggccaggtgcagtggttcacgcctgtaatcccaacactttgggaggccggggcaagatgatcacctgagcctaggagtgggcaacaaagtgagaccccatctctacaaaaaaattttaaaattaaccatgtttggtgacatgcacctgtgttcccacctacatgggaggctgaggcaggaggatcccttcagcccaggaggctgaggctgcagtggacattgattgtgccaccgcactccagcctgggtgacagagcaagaccctgagtctaaataaataaataaatagctagcgtaagcccgggcacagtggctcacgcctgtaattacagcactttgggaggccaaagcaggtggattgcttgagctcaggagttcgagaccagcctgagcaacatggtgaaactctctctctatcaaaaatacaaaaattagccaggtgtggtaacgcacacctgtggtcccagctactcgggaggctgaagtgggaggatcgctggagcctgggaagttgaggctgcagtgagcagtgatcatgccactcaattcagcctgggtgacagagcataactcagtctcaaaaaacaaaaacaaaaattatttgggtaacttttggactagtggaagattaatttagagattaggtagaagccagtcagtggaggatgttaaatagtagagtttagattttattctataagcaagagtgagcatttgagggaatttcgaggtgtgtattaatataaacaaagggttgtatttcaggaaggtgactctgacagctgtgtgaaaaatggattgaaatagcaaaggtgttggaggtggaaagcaggaaatccagataggattctattgcagtacttcagtgagagagaagaatcaagtcgatgctgggtgacagtagcaatgaaaaataatagctaccagggagaacaatcaatatgcctaataggtgggcgtggggaaaggaggaaatagacaaagacaatgactaagaaaatgacaataatacttagagaaataagtctagagtagttttcagggtgctgtaatctcaacttgagacatgtagctgcttgtatctgtattgcgtagttgaatgaagttcaaagagagaaaggctgtaagattgtggaaaatcgaaagattaatatgatagatgaaactttgatgatgaatatggtctctgagaagaccagccacaggagcaaattctcttacctttgctctgagaacaagcagagcaaaagtaagagaattgagtcttgagatatatccatatttaggatgctagagaaatggatataaggtcaaatgattttcattagtatttagaggaaatacctccttagttctatagtatttgttgatatgatttcctttgactcctctctaaacatacctacctgtgactgtgtcactttttatgggtgcccttactatctccataaaactagttcgttcttttagacaataacactgactctgtaggtatcttcagattctttttattttttcgtctggcagacacaggtagatccaagtatcttcagattccaagacagttctatcattagaaatttaaagcacatatgtaattttaaattttctagtagtcacataaaaaggtaaaaagaaaaaggtaaaattaatatattatatttgacctaataagttttttacattcctttttttgtgctaaggttttttgaagtctcatatgtattctgtacttacaggatatctcagttcagactagccacatttcaggtgctcaatagccagatatggctggtttccaccatctaggacaatgcagttctaaggtttcaaagactgtaatgagatgacttctgcttggggagcttttctccaatctgctccatcataaattccatgagcattcatttcttaagagaaagacacaaataaatctgataaaaacaagcaaatgtcttcaattttcagctgtttgaggtataaggaatgaagctagctttgaaaggaaaagcagcataatatttctgtatctgagctctaccggagaaaatcctttatttttgcctgtagggttctagaagccagcgcttttggcttaaattatggttaaatatttcggactttcaccataattctcatataacactataatcctcctagcaaacaatatataattatctcaattgatatttcataacacttccaaatcttctcaatcacaatacaaccttccagatcacaattctaaaaatgactataaataactgaattgcttttactaacaacatttctgacaccaaatatgtgttttattcccccctcacaccaaccagttctccaactctggacaccagctgtattagtgtcagaattgaaatgaattgtaggatatccagttagttaggaactagttagctaggaacactagttagtgtcagactccacaggtttaagggctcagtctcacaatactgccttcacttcaaatgccagtaccaagtccctaggttacccacacttctgtctgtcttggctacaaagtcaggaattcctacaacctcccttccctttcaggttcattaatttgctggaatggctcacagaacttcagaaaacgcttaacttactattaccagtttattacaaaagatacaaatgaacagccaggttggagaggtacatagggtaaggtcaaaaaaggtcctaagcataggtgcttctatccacatggagttgggtgtctcaccctcctggcacatggtttgttcaccaccttgggagctctccaaactctcttaaggggtttttatggaggcttcattatataagcatgaatgattacatcactggtgattgaactcaatctccagtccctcttctttcccagaggtcctggggtggggctgaaagttccaaccctctaaacatggcttggtctggtgaccagccctcaatctaaagctgtataggggcccctcacccaagagtcatttcatttgcagacggaagagatgctatcactcaggagattccaaggtctttaggggctctgtgctaggaacagggggtaaaaaccaaatattttttattgtaccacagtaactgttattatttataccctctgatagaagagccgtcagtttttaacatgacttgttaccaaaaacttgttgataaatttcccaaaagcattaacttaaatataaattaggaaatagaaaagcttaagttaatgaaataaccatctcattaataagatttaatgaaaaataggttactataatttatattttaattatattttatgtattactatgtattactaccgattttaaaatcaattgaacattaataaaacatagtgtgggaaattgttttattaagtagaacagatatttgtataaattgtccacatgaattatttaatacataatggaaaatgtttttaaatcagtgaactaatttttaaaacatatttagataattttgaaagtcattgtaaggaacatatttattgattataaatcaagactgaatattggtatccaaatgctgtgatatgtattgttgaaaagcataatgtagtaaatcagtatgaaaaatgtttatgcagatttgatcatcagatataatttagcaatgggcaacttaaggatgttcccgtgggttttttgttttcatcttgttttacttgggatttaagtagaataggaaaaaccaaatcaggtaataattttagaaatattttctcggtacgttcatgtacttaaatatattaaccctttttataataccttttaaagttaaaaaattgattacagtttaaatgtactgtataggctaggtattagaattggatttttccgtaaggtttaacaaatatgtatgctttttatgtagtttaacaaatttcaaattggatttttccttagccattttggaccctttggattactatgtttctgtttatttaattcctaagtaattcctttcttttttaaacagagataaaagcaacagtgtttgatgactgcaagaaagaaggcgaatggaaggtagagtttgcataccttgctcttataaaaaataatacaaactttaaaaacaatacagtataaaaactacatagtatttacatggtattaggtattctagtataagtaatctaaagataatttgacgtatgtgggaggatgtgtgtaggttacatgcaaacactacactattttatataagagatttgagcatccatggatttttggtatacacaggggtcctcgaacccccatggataccgagggatgactatatagggtctggaatcacactgcttggctccaaatactaacttcaccacttaatagctgtggctccttgcacaagttacttgacctctctctgccccatttccttgtttataaaaatggtgatggtaatacctcatatggtaattgtaaatatgaggtgaattaatccatggaaattacttaaaacagtgctttgtgcaataattgttctacaagtggcaattgtaattttaagaaaatttgatgttaaacagtgtcattcaaaatgaataagctctatgtttcaaattagaaatatttctgtttgtttacttatgtacgatactatatgcatgtatattgagaaaatctctagctcatgcaagataaaagatgagatcattttgcctactgttctgatattttgtgttataaaaggcttataaagtttaatggataaaattctttttttcattcttggtaataggatgcttacagtatttttaaatttgtgtttgttttaagataatgcttttagatgaatttaccactaagcttttggcatcgtgttgcaaaatgacagatcttctagaagaaggtattactggtaagtgttattcttggcatgaacactttttaattgtaattgggggagatctgaggtattaaattttagttagtagttgtgtttctaaggagcttatttttttaaattactgtagccataactattagatttaacattcttttctctgaatcttctgtcagtttttttccctcagccgagacatataattaagacctctaaccaagcctaacttaattgctttgttgaggttgttctttaaatgttttactcatatatacatatatatatataaaacaattttgtatattgatacacaagctttacttcagtattttgatttagtttatggtttcatatatcgctttaaaatggatatcaagatttatgtcataaaatcagctgttgtacatgtttacaaatgcataatgctgacttcgtaaatttatctttattaccagaaatgagacaaataattataagtttaaatcagttttagtatgaaaatttgaaatacttacagattctgaaaaaaaatcataatgtcataagaagttatcttcctctaggcgggattatgttattgagatattaatctgtattacctattgaggaaaataccaatatcttgtaacatgcataatcatgttattcttaattcatcatcctttaactcacttattaaaatttgatcttcataataaccctatgaagacagataaatactctcatttgtaatgaggaatctgaggctccaagtgaaatataattcatttatattttggatcctaatgtagtttatgtaccgtctgttactcctaacttaatgaagttcaaaagtatacccagtattctcaagaaagtctgaccatataatatttatgttttgatgtttacacataaaataatctttttttttttttttttgagacaggatctcactctgtcacccaggctggagtgcagtagtgcgattttggctcactgcagcctcctcctcctgggttcaaacaatcctcccatctcagtctccgaagtagctgggactacaggcacacactagcacacccagctaatttgtatattttcttggatagaaacagggtttcaccatgttgcccaggatggtctcaaactcctgggttcaagtaatccacttgccttggcctcccaaagtgctgggattacaggtgtaagccaccatgcccagccataaagtaacctttattgtttattacatattcaattgtggtctttctgaccctcaatgtaaaaagctctaaactagaaattagaaaattgaagccttgatttttctactcctggataagtgaaatattgattaagccacttaagttttttaagttctgaaaggtcattctgatgtgaaactagggtgagaaccatttgataatacataaaagttctgtggaactgcagagccattatgcactgtagggaggttttattgcattttgtagaccattgtttcttactgtatgctcactattaatagatattcttcaaggaagggattccatggccagtacatttaggaaacagtattaaacagagctccacagctttctttaggacttaagagtctttatatgccaaggtataagtggatcccctgggtaaaatgatagtattcagttttctaaacttatttggccacagaaagctatttttgagaagcatttcataggactgtatatcatagagctcgctgctgtgggatacctttgatatcctccagaaccacctaagtttgctatggtttaattgtagtcatatcttctaacttaaactcaaaacagtccttttgagttccacattagctctcctgaaaatccctctatgaaactgggcactggcaggttcagcagtcaaactttctgttgtcattcaggtcattcatgaaaatatttagtagtgtcttgggattaaaacaaaatcgggaaaaaaaatgctctgtcaggatttgctacttgagtggagaataaagtcaagtataaaaccttaaaaaaaataaactgaagctgggtacaatgactcatgcctgtaatcccagcacttcgggaggctgaggcaggaagatcacttgaactcaggagttcaagaccagcctgggcaatatagtgagactttgtctctactaaaatccaaaaaaattaaccaagcatggtggcacatacctgtaatcccagctacttggagaactgaggcaggaggattgcttgagccagggaagtcaaggctgcagtaaaccctgattgtgccactacactccagcctgggtgacaaaatgagaccttatttcaaaaaaataaataaaaagtaaaaaacagactgggaattagattttttttttcactattaaagacctttctctttgtttttttagttgtttgatagatgtgtatttttcagtgaatggagaagtggcactttctgttattaataaagagatttcagaatattttcagagcctgagccctaaatcatatttatcacagtattttcagtgttttaacaaatacattattcaccaaacaaaataatatgtatagcatgactgtaagacactccattttgaacattaaacaattgaaataaatgaaaacagattaaaccttaattttttcaagtaaaactataatagttgagaatgaagataaaaagattaaatttttccttggaaatattatttgattgtctagtagtagttatgataaacctatacattactaatatacatttaggaatgagaaaaggaaatcaccatatttaaaagagaagtccagcagtaacctctcttgcccgtcacattaatgttaattctttctaggccctttgtcaacatgaatcttgaaagatggttccctggatttgttgaaggatactttaaattagttttaagaaatatatatgtagctttaaatagttaatttgacaaagtttattaactttatattcactttgctttagctaatcttataaactgcttaatttccataataaaaaatataattgactaaattctagtgatgttctgttgttgaaaaaatactttataaatatgtgtggttttgaaagaataggcgttaattggcaatttatttaaacagcattgtggcaggtaaaaacttgggctctggagtcacatctgggttagaagcctgcctgttccacttcctaactgtgtgattggataagttacttctttaagcttcagtttcctcatttgtaaaatacttgcaaggttattatgaattttaatgagtaattcatgtaagaaaatgaattattaatttaagaaatgaataatttcttacattattcatgtaagaaaatgaagaatttttatttttcatttttcaggattttaaaatgtatccagtgaagacaaagaaaatgttaaacccagtaaatgtttttgttttcatattatttgtaaatgtattttcatattattataaatggaaagtacagtaaagtttatttaaaaattattttaagtatataaatatttggttatataaaatgaccttttttcttgttagttgtagagaatatttataagaaccgtgaacctgtcagacaaatgaaagctctttatttcatcactccgacatcaaaggtgagtattttgagaccttaaaaagcaggttcatcaatatttcaccattgttatggtttactaacagaaaattcaaagtaataaagtacactttagtagaaaaatattgccataaactagtttgcttaggaaagtttttttctgtgttagaagattatttgcattcttccgaatgagaatgtataagtaaaaggattccttttttccccatatatgaaagcagaattaaattgtataaaataacatttctttgcatgttttgtttttcatgcagttcctattgaactataccttttggggggatggtaatgtaggtaaaagaaataatctatagtcttggattacttctttatctcagtgactttcctgtagcatatttgtatgtatatatgaagatgggtatatatgtgtgtatgtatatattttatgtgaaaggaaattctttagtttataatctgactctatgacctaactcatacttgatgccaacctttcagagccaaattatcagatttctttattctgtacaatatctgagaatgcatttttgaaaacctgatctctcacttattcccatgtagaacgttaatttggcaatctctgtttcatttcacttctaaaaaactttagcagacatttttaaaaaaacaaaaagatacacactttttagtctctacatgttggctgctagtgggttttaatgacattttatatcttatctgtaatataattccataagagaaaaattcatgattggaaaaaaaaatgcaacttaaaagtaccatttttcacctagcaaattggcagagggatttaaaatatatatatatgggtatgtatgtgtgtgtgcattctggctattctggttatcagtggataatggagcagaaactgccatatactgctagtgggagtatagattgatacagcctttttggaaaatagtttgtaatttgttatcaagaaccttaaaaaatgttttatattttagagtttattgttaggaaataaataaatggtttagctaagtttctagtagtaaataaatctaattaaattttagcattaataaataatagaccatatgatgatatctgaatgaaatatatgaataaaatgataaataaatgaaaacccatgtggccattaaaaataatttttctaggggttgttagtgacctagataaatgttcattttgaatgttaagtgacaaaagcaagatacaaaattgtatattcctcattcttgcagtcacctaccaagctttggatctttctaatcacttgatagtttaagcttctcactcactgtgtctcacttcaacacttctccagtcataagtcttggtggttcgttatccatgtagatgatacttatagtatgttggtttctagttccttaatctgttatattccaatagtcttgtcttctatgttgtttcagttttcctagacctcttcattgccaataagagcatcctgttcatacatattaccttactctttttttttttttccaaaaccaaaaatggttaatattaccttactctttttaccttactaccttattagctatcactggctggagaacatagcatcttaaaaaatcagtttataaattaaacttttagccagtaaagttttattttgtcactgaaataaaataatcttagtcatttcaaaaggtaacatatttaaattaatatttaataaaatgtgtattaacatctaaccttttttaagtctgtagattgtttcttacatgattttgcaagtaaatcggagaacaagtataaagcagcatatatttacttcactgactgtaagtcttttaaaaagttattgcttcattgttcaaaatgccattggttttaaactgtcgactttttaaaaatcagcccaaaatgtcattaaagtatctactttttataatattatttcagtcctggtgattttctatttatcatttgttctaattaggctagaaagaatctaaaaatgtaagattatatctatcctaattcatattaaggtgatagaaaattaaaagaaactattcccaactgctttcaaaagacagtcattttgctgggatgctgggatgtgagggatgggtggagagggctagccctcaaatcctgtgctggtgacaggaagaaatatttttaatcagcatttcagttagggatttgattctcttgtgaaaaacaaagaccttttgagagggcactgaagaaaacagccatctgtttggcaaatataaagggagaaaatctgtcacatttatcttactctgccatatgatcacatagaaaactggtaactaaagaatcacagagaagtccaaagacacatacaattctgtcttatgttacatgttatataatatacttcaaaataaaaatatcatatctaagttaagtcttggtctctgctgttagagattcctcactttaagtaagtagtatatcatttttcctataaatttttatctcatgcctaatagtttgcatttttaaaaatgtcacaccataagtatttgtaatgtaaccttattatacagagcatcatgtttatggaattgatgaaatttaatgaatgtgaaccctcttttaacttaaggaatcttaaggctaaagaatatcatgttaaaagatactaggagccagtggttgatattccaacctagatctagtggaatgataaactctttgatgaaaggggaaaaacactggctctgagttccagaacttagtattatagagtcttagaattttctaatgttagaaagctgcctttaattgaaggaaaaattaaccatttgtgttgtatgattgtagtatggatcacttagtggcaatttggaaaagtagtataaatttctaagatgtcctgaaagtgctgctgtttgttaagtcataagtttggacttgatttttcttcctaacaatttcagtttgctctgttagcagatctttaaggaaatacatctgaggttgtggtggatgtgaatgggaaagatggaatttctgttatagtccttttcagtagaatatatcttttgtaaagcaaataacaatatttatatattatttatgtcctcataataactgtgaaagccagtaattatgtataactattcttggatgttggaatgatttatttaaaaggaataaaatctagatgtaactatatgctttgtttttttttcccctcagtttgccctgataatctctttaacaaaattaaggcttcttgctccaagtcaataagaagatgtaaagaaataaatatttccttcattccacatgaatctcaggtactttctatttttattttttagttcatgagaggtttcaaatttggttttatggcttattgttaataaagtatattctgaagatattttttatatgtatttggtgaattttgaacctaatccacaaatagacatttcccatgatgaagtcagacgcgtgagcaataaattggaattaaaaatgaatagcagggcttaaatttcatatctgccaccaagtcctttgtcaaattacagaactaccaggttatgaaatcaagagagttttgagcacagtctttgttagatgactccaaaaaaagtgtttcatttagcttgtgtaaccttttgtgatattaaaacaaatgctctttaataaactttttatataatattatgtaaattattttaatttataaagtgaggggatttttgacttgttttgcctttggaacattgagccttcaattaataatagcaatgattataatgatataagcaaacactcatataatactccctatgtgtcatatactttcctgagtgttttacataaatttattcatttaatcctcacaatagccatagtaatagattgtacttctccattttgaagatcaagaaatcaaagaggttaagtaccttgcctcaaatcacacagctaatgaattgttaaggtttgttttgctctgttctctgtgtttggattctagcattttatagaattgaaatagttgactgttgtttggaactatgatcaatattttaagggatagacaagtcctagacaagggatttctactatattacttttaagatactgctgggttttttgtttttgtttttttctttttttgagactgagtttcgcttttgtcacccaggctggagtgcaatggcgcaatcttggctcactgcaacctccatctcccaagttcaagcgattctcctgcctcagcctcccaagtagttgagattacaggcatgcgtcaccacacctggctaatttttttgtatttttagaagagatggggtttctccatgttggtcaggctggtctcgaactgctgacctcaggtgatccagtatcctcggccttcccaagtgctgggattacgggtgtgagccaccacgcccagctgatactgctgtttttgacaaagaaaaataataatccaaattataagattttaacatatctgcttaacattaaactgttttccaaaagtttcctttaaacttattattttaatatgtaagtttagtatagggtgaaaatgagcttctgaaaatgatgtaggatttaagtggtagtgtgagaaatattacaaacatttctagaacatctcgcttcacagaagataaatataattttagccccagaatttattaaaattctgcagttgctgcatttgaaggaatgatttgtgtagatatctgaataatttgatggtgaatagaaataacctgtctttgcatgtctagagaatgctcttgagaagtttctacttatcagtctttacaaaatattgtgattatgtaaggtcccatctgtgaatggttttcctataagaatttttttcttttaatttacttacttgaaaagagtcttaggagggtatacttgactgggcacagtggcttacccctgtaatcccaacactttgggaggccgaggtgggtggattatgaggtcaggagttcaagaccagcctggccaacatagtaaaaccccgtctctactaaaaatacaaaaaaattagctgggcatggtgattagcacctgtagtcccagctacttgggagcctgaggcaggagaatcatttgaactggggaagcaaaggttgcagtgagccgagatggcaccactgcactccagcctgggcaacagagcgagactccatctccaaaaaaaaaagaggttctacttaataaatctaactgttttggagaaattacattgaaaatattttggatttttgattgtttgcaagtgaaaatgtaaatgaaatactactaggtgctttgagctgtgagcaaaggcctactgagcatttatcaagattatgttcagtggacgttgtttgttaaatgcaaagcagtctactgtgaaaagatgagcaagatatatgtcctaccctcatttgaatactataaagagattaaaaagtattagacattttcaaaaactgtttcaatcatggttaaatcaagtaggactaggctcaactaattaaaagaaaactctggactttcagtggattacacaacacggaaatttatttcttcctaatacacaagaaatcaggaataggctatataagggtgataatgctggctctatgaaattgtcaggggtctagtctcctaggcatggcccttatgatctaagatgattgtaaattttttttttttactgttatatcttttttttaattttaaggaatgttattttaaaacattataaaaatcataggcttatttcaatattttaaaatatcttctgtaacattccactcagaaggtagataacaaaattcttcccataggaagggtgccaatggaatgtgatattatattattcagttattccattttttcttcctacctcatttttgctgaagaactgctcacttaatatcctgggagtgatcttgttgaaatttgccaccatcatgttgaagcaatgaaccttcacccgtagtataatgaatgtgacactgcttatatctatcctgtaggacagctaaaaggacaagacctcagcatcacatgccaaccagtctgttagagcaatcacacacataactacttttgccaaaatcctccaacttaatttttaaatagctgaaatatagtcaaggccatatgggtactgtacctggaactagaaacatacccttttcacacacattcagtgttacagcaacagcatcctgggacaggttaggacacaatcacattttttaaaatcaagagtaagaagtaaacataaaagaatatttgcacaaggcacagaatcctgtttcttggcaatagacagaaaacaactggctaaagaaataggtttacagatagatacaatctagaatttgattctttgagtattaaacttggagacatagctatatacattccaacatacaatctaatattttacattagtagtttcttattcaatatttaaaagaaaaacctaccaaaaaccaacccaaattatatttattaaccattggataaccccttttatcctttatcagccactttactccaggtttgattagtgtaatcatgagattgtctagcctaatgctctagggaaaattctgtgggtgtaagatgatgccttgctgtggaaccattaattattaagctccaagtgaactgaagcagatatttatgaaatgatgatatatttccaaaaatacgaaaaacagataaggcagatggtaactctaataagagtcactgaagtattataatggcactctggaaatggctcatagcaaaacccaacttttttttttgagacagagtttcactcttgttacccaggctggggtgcagtggcgcgatctcagctcactgcaacctccacttcccgagttcaagcgattctcctgcctcagcctcccgagtagctgggattacaggcatgtgctaccatgcccagctaattttgtattttttttttttagtagagatggggtttctccatgttgttcagggtggtcttgaactcccgacctcaagtgatctgcccacctcagcctcccaaagtgctgggatcacaggcatgagccactgcgtctggccctaactttttttgttaacttttaggtttggagtacatttgccagtttgttataggtaaactcatgtcaagggggtttgttacacagattatttcatcacccaggtactaagcctagtacccaatagttattttttctattcctttccctcctcccaccctctaccctcaagtaggcctagtgcctattgttcctctctttgtgaccgtgtattctcatcatttagctcctacttgtaagtgaaaacatgtagtatttggttttctgttcctgcattagtttgctaaggataatgacctctagctccatccatgttcctgctaaagacataatctcattcttttttatggctgcttagtattctatggtacatatatatatagagagagataccacattttttttaatccagtctcccactgatgggcatttaggttgattccatgtctttgctattgtgaatagtgctgcagtgaacatatacgtgcatgtgtccttatgatagacttatattcttttgggtatatacctagtaatgcgattgctggggcaaatggtagttctgttttttaggtctttgaggaatcaccacactgtcttccacaatggttcaactaatatacattcccaccaacggaatgtgagcgttgccttttccctgcggcctcaccagcatatgttattttttgactttttaaaaatagccattctgactggtgtgagatagtatctcattgtggttttgatttgcatttctttaatgatcagtgatttgagccatttttcatatgcttgtgggtcacctgtatgtcttttgaaaagtgttgatatcctttgcccactttttaatggttttttttcttgtaaatttaagttccttatagatgctgaatattagacctttgtcagatgcatagtttgcaaatactttctcccattgtataggttgtctgtttactctgttgatagttccttttgttgcacagaagctcttcagtttaattagatttcatttgtcggttgttgcttttgttgcaattgcttttggcgtctttgtcttgaaatctttgccagttcctacgtccagaatggtactgcctaggctgtcttccagggtttttatagttttgggttttacctttaagtctttaatccatctcgagttgatttttgtatatggtgtatggaaggggtccagtttcagtcttctgcatgtagctggccagttatcccagcaccatttattgattagggagtcctttccacattgttcttgtcagctttgtcgaatatcagatggttgtaggtatgcggccttatatatgggctctctattctgtttcattgatctgagtgtctgtttttgtaccagtgtcatgttgcaaaaccttcttttctgttaggttcatcacatgggtgcaaccattgtcagtagaaaacaaacaggagcctccatgggtaggcccacgccaagggaattttcctcttatggatccacagaagaaaaataatttttggtgccatgtggcttgtccttatctccagcaaaacaatctagttccctcaaccccattgtgtgtctgggaaaagatagtgaaaatatttccataagaggcaaagactataacaaagctacaagctcactgtgcaaaggtgtgaaaatgtcatggtaaaaagcaccacatgctaattttttttttttttttttttttgagacggagtctcattccatcatccaggctggagtgcagtggtgcaatctcgtttcactgcaacctccaccaggttcaagcatttttcttgcctcagcctccagagtagctgggattacagacacgtacccccacgcggggctaatgtttgtacttttagtagaaatgagatttcaccatgttgaccaggctggtctcaaactcctgacctcccaaagtgctgggattacaggtgtgagccactgctcccggcattttttttttttttttttttttttggagacagattctcactctgtcaccaggctggagtgcagtggtgcgatcttggctcacttcagcctctgtctactgggctcaagcgattttcctgattcagcctcccgagtagctgggattacaggcatgtgccaccaagcccagctgattttttgtatttttagtagagactgggtttcactatgttggccaggttagtctcaaactcctgacctcaaatgatctgtccgccttggcctaccaaagtgctggggttacagttacaagccaccgtgcctagctgattttaatagcttttttttaactggagaaatctatttgttatgtacacaccacagaaaaattgcccccgcccctgaaaaaaaaaaggtcatgcaagaaaatcagattcctaatataaaaatgtatatatctaaagtaggcaaaaatatggtttatgttttaaaaagaaaatatgtaaaatttcactatgaaatgctttgatttgcatgtgacttagtacttatttcatattaaccatatccagttgctatgataagtctctatgttttagaatagctattctttaaaaatatctatttttaagccagaacatatacgttacatttgtgcatccgtgtgtaagctatcctgcttggtatggaatcaagatactaaaagattaataaaagaagttttaaaatcttcagtcacagactagcaaagaatatatttcttcaagttttctgggccacactgctgacttaatattaatgcaatctgaattttcagatgtaaataccagtgagaggttggttgtcaaaacttaaaagcagttgagttgggaggaccttcacaatatcggctcttaaatcataagtaaaattattcttagaactggaccatagtaagcagaaagccttaagttttcttagctcaaaccctccaaattgactcttaacattcataatcatgcccttttagttgctttaagagggcatactgactttgtggtctatactttgtaagagagcaggtaactctagcacaaaagaaactgtaatatggaactggggaggacttcagtggcactattccaattttattgatccatactgttgctttcaaccctgctttgagacccccttgtgtgtcactttctaacatgtcaccaaccatcacacagtccacaggttgtactccaaggagattgcagcattaataaaatatggaaggtgctggcttctcctccctctgctgttcacctacaacaacttggacataggactgacagacacaagcctcatcttctccctctgggtctgtctgaccccattcattactaaaagtaggcagacctcctttctgatttcaatgagcatagctttgacatctcactgaccttagtgtcatgtgctgtaaatgtgtggttttccaaaggaggtaacgttcttcagccagtttcctattggctacaccatgttttgtttcctggattgcttcctcccattgtgaagtccttagatcagtaatgcatgtattgtaatggtgaaaacattccttcttgagtttaacttgagctttatcacaggtgaattcagcctcctgtttatactggtattttgattgtaagagctttattgcctccaacatgcctctcctgcttgtcacacctgtgttgatgagtgtgttgtccaggtcaaagaaaatggcctgcacgtggctcagccccatagcacctgtgccttgctgcaacctgccacgtcgctgcctgcacatgcgcaaggtgggcggcccaattttgtttttttctttgagagagggtctcgctcaaacagtcctcccgcctcagcctcccaagtagctgggaccacagatgcatgccagcacgcccagctaattttttcttcatttatagcagagatgaggtcttgctatgttgcccaggatgatctagaactcctgagctcaagcaatcctcctacctcagcctcccaaagtgctgggacaggcatgagccaccactcccagccatactgtagaattattacatcatcatttgaggatatacaaaagaatgagagaataattttcgtttttatctcattagctaaaattgagtcacatggctacacataagtgcatgggaaactgagaaaattttttagctgggcatatatggctgttcttcacaaagaactgaagtgcagttactgaaaaggggaggatgtttgttggagaagcatcttgtagtcggccacaaaaggagggagattctctttttaaatatttatttatttgacacattgtaattgtacctatttatgggatacaatttgatgttttgatacatatctgtgttgtataatgatacaaggaatgtatccatcatttcatgcatttaggagccaggttttgttaggttttgtttgtatttttagtagagatggggttgcccaggctggtctcgaactcccgggttcaagcaatctgcctgcctcggcttcccaaagtgctgggattacaggaatgagccactgcaccagcattgagagaggctaattcttactgggagattgggaaaatatttgaagaatggatgtatttttataaggtagtaatgaagagggaaagaacctaggaggtaaaaataatctagatgtaaagatacagaatcagaagagtgcaggagaacagcaggaatgtggcttataagaggtgaaggaatgaaagataggctctctgtaggtaggttggggctattgtacgtaggaggctcctggttctaccaaaaataatgacagaaaattagctggtgcagaaaactgtggaactggtcgtaaagtccttaatgaaaagtagaatcctagaagtcaggagatcattgcagagagattggtaaagtcagatatgatagtgcttcaaagaaataaagttggacatcagcacatttagaaattacatggagaggaagaagattaactcactcatggtgattccatgagtcaaagggattaaagaaagatctttctttccctttcagaggatttaaggtaagtgatgctgtcacatatataataaggcaagtagagttgatccttgaataacataggggttaggggcaccaaccccctgtgcagttgaaaaatttgtgtataattttaaactcgccaaaaacttaactaccaatagcctgctgttgagtggaagccttcctgataacataaacaatagaataacacatattttaatattgtttttactatattctaacaaagtaagctagagaaaagaaaatgttattaagaaaaccaaaaggaagagaaaatatacttactattaaatagaagtggattattatgaaggtcttcattcttgtcattgtcaagttgagtaggcagaggtggaggaagcggagggattgatcttgctgtctcatggggtggcagaggcagaggaggtggcaggggaggcaggcacactctttgtaacttttattgaaaaaaatctgcatataagtggacctgtgtacttcaagcccttgttgttcaagggtcagacaaacatagaaagcattcaagaatatgagggagtttgtttacagtgaaccttagtgagtacagagagtctggtacagttagtagagaggatactagaagggatctggtagagatagaaacaagctagctatagattagcatgaagagtagatggaagacaggatctgtatttaaggagctgattataggtttataaagatgaaaaaagcatgtggcagtagtcttaaaaaacttttaatgatggtgatggaaagtggggaggagatagaggaagagggaaatggaggaaatgtgagtatagaatgagaaccagcacccagattatctttggtacattggggtattagatagcttagattaatttgtggtaggaaccccccagatctcagtgcattactacaacaaaggtttatttctcatttgtgttgtccattgttgtttggctggggctttgctctacatcctctaccttctagtactgaggccgaagggctagtctgggacatagccgagggaaaagagaaaatagtggagccacacaatagcttttaaagcttctgctgggaagtggcacgtgtatcttctacatacattccaggctgagcacggtggctcacatctgtaatcccaggactttaggaggccaaggcggaaggattgcttgagcccaggagtactagaccagcctgggcaacaaagtgagaccttgtctctacaaagaaacttaaaaaaggaattagccaggtgtggtggcacatacctgtggtcctagctacgtgggaggctgaaattgaggatcgcttgagcccaggacctcaaggcttcagtcagccataaccatgccactgcactccagcctgggtgacagagtgagtccccatcttaaaaaacaaagacaaaaacaaacctacacatgaccatggctaaacctggtatcagtgagtgggagggagaagccttgggcggccgtgcgataaatgtttttaatcgaataatgttatctcctgctgtgggatattatactatgaggaagccacagttcaagtgtagggtgcttgttgacaattaatacagcatcctagccttttgagcaggaaagagataagtggatgagccacagctaaattttcatctatgttcaggctgctgctgttggtgctgggttatgtccagagaaatgaataactgtgtgtaaaaggaaatgcgagaagtttgttcataattcattacttaacctataatgtttattacttgcctactttcacttacaataaattttcatagtttaagagaaattatcattgtttagaaaacaacaaaatttagtttaacggggaactctcaataccatttagggagctcctggcttttgtatcctccaaatcctctaacccagttctttgtacataagtaaattattttgttaattgaatgaatgaatgtatctgtgaggttttgctgtacatacgtacagtaagatttatattatgtctagcacaatgccatgtcttttggggaaatatgtctcttattttaaggacatgaagagtataagctaaagaacggaagacatgtatcaactatgggagatttttgggttactctctaatgggttaaggtttataatttatgtctgagatataggccgattttggtaatgttgtgtttctctgtgctaggagttagatttttattttagtctatctcagattccttcatctgttgcactggtagtaaaaagcagatagtacaatctgtgtatgaaacaagaattgaaggagagaggtagactaaagcaggagaggagagcgagaaaagaaataaaggatgaaatcaggatgacagagaaaatgagatttgattaaggtaaagacacagttgtttcaggaaacagcatggttagtgcaagtatttttttaactgccccaaatagttgctgcattttcttgatatatatctatatatatataatatataaatatatatgatatatatctatatatataatatataaatatatatgatatatatctatatatatcatatataaatatatatgatatatatctatatatatcatatataaatatatatgatatataaatatatatgatatatatctatatatatcatatataaatatatatgatatataaatatatatgatatatatctatatatatcatatataaatatatatgatatatatctatatatcatatataaatatatatgatatatatctatatatatcatatataaatatatatgatatctatctatatatatcatatataaatatatatgatatctatctatatatatcatatataaatatatatgatatctatctatatatcatatataaatatatgatatctatctatatatatcatatataaatatatgatatctatctatatatcatatataaatacatatgatatctatctatatatcatatataaatacatatgatatctatctatatatcatatataaatacatatgatatctatctgtatcatatataaatacatatgatatctgtatcatatataaatacatatgatatctgtatcatatataaatacatatgatatctgtatcatatataaatacatatgatatctatatatcatatataaatacatatgatatctatctatatatcatatataaatacatatgatatctatctatatatcatatataaatacatatgatatctatctatatatcatatataaatacatatgatatctatctatatatcatatataaatacatgatatctatctgtatcatatataaatacatgatatctatctgtatcatatataaatacatatgatatctatctgtatcatatataaatacatatgatatctgtatcatatataaatacatatgatatctgtatcatatataaatacatatgatatctgtatcatatataaatacatatgatatctgtatatataaatacatatgatatctatctgtatatataaatacatatgatatctatctgtataatatataaatacatatatctatctgtataatatataaatacatgatatctatctatatataatatataaatacatatgatatatatctatataatatataaatacatatgatatatatctatataatatatacattatatataacataaatataaatatatattttttttaaatcaggtctccagattaacagtgagtttttttgtcttaacttaggtgtatactcttgatgtaccagatgcattctattactgttatagtccagaccctggtaatgcaaagggaaaagatgccattatggaaacaatggctgaccagatagttacagtgtgtgccaccttggatgaaaatcccggagtaagatataaaaggtaagacactgagcatctgcacatgttatgcttcctatttaccattcattatagaggtaagtaatgtgtctgtaccttggcatgttggtttgcaaaatttattttctttgtatgattaccatgctctacatataggagatttaaagcttgtggtttaaatttcagactagcaaatagcttctgttactgaatttcggagcctaaatttggtacaatttacggacggtttttcatcagtttaaagaacgcttagaggaaatgtctttatagtcacatagggaatacagtgttacagttaatgtttttcattaaatcaccaacaaatttaaatgaccatattctctggatacctgttacaatgtcaaagtatctatagtatctaatctgcctattctaaataaattttggggttttcttaaggggtaaaatttaactttagtacaatataccttgacttatatacttctttttaaaaatgaagtttactataaagtgcctaaattgtctatacagtaagtcctcacttaaaatgttgttgataggttcttgttaactgacaaaaccaattttaccataggctaattgatataaacaagaattaagttccttggttatgtaatgtcaccaaacttctacataaagacctgaaacacttcgaatattaaacattgaaagaaatgtgactatatgtacatttaagaaagattaataaaaacaggatcatttttttgcccagttattctagttcaggctcattagaaggatggccagagctcatcccagcagctcatggcacaaggcaggaacccacccagattataggataccatcccattgcagggcacactacacacacatccacactcactcgactgggacaatttagacatgccagttaaccaaacatgctgcacatctttgggatgtgggaggaaaccagagtaccaggagaaaacccatgcagacgtggagggatcatgcaaacgccacacagacagtggcctcagccaggaatcttttttttttcctctgcattatatcgagatgacgaacaaaatgacattatttgaggacgtgctagatatggcatgttaattcattccaaaatgaacatatccatctaaccctaccaaggtcaaaaaaatagaacattaacagcatctcagaggcctctcttgtgatccctcccagctctcccgtcccttttcttccctagagatgactaccatctgacttttaacacatagttaaattttgcttgattttgagctggtataaatggaaccacatgatattttttgtttttgacttctttgcacaacattattttctgagagtcatccatgtttgttgtgtgtgccaggcagttttagttttaattttggtctgctagttcatgtgtgaccctctcgcctcagtttccttatctatgaaataagaatgataataatacctaccatatacagttgtttttagaattaaatgaattaatatctgtaaagcattcagcactaataaatatggtagtaaatatattgcactactcgtaataagtattactcatttgtcttttaaaaagtcctttaatttgaacattggcatttgtcaagttagctggctgaactgtttaattttaaattcatgtagtactttaagtcacattactcttcacttaccatttaaaaattccactattagtacttagaaaaagtatagtgatctccttggagattaagttatctccttaattcaggtattaccagacaagctctttattcataccttgggtattagaaacattctttttctctctttctttcctttttttttttttttttttttgagatgggggtctctatgtgttgcccaggctggtctcaaactcctgggctcaagcaatccacctgcctctgcctcccaaagtgctgggattatctttttcttgtcagagatgtgctaattacattctggactcagtggagctaagtggtttggctcctgttaagggtttagtaactgttgaagcttctactgttggtgattggttacgttcagggaaatgagtaaatatagccaatttataattttatcactcacataagggctagttttgagttatgctaataaataatctgtaatcctgtcttttaaaattctacctgtttccacaaaatattcctttacgctttataaagtataatttaaaaatgaagtttctttcttttgaaaatatagtacaaagagtttaatttattgtacaattaatttattgtacaatttattgtacagagtttaattattgtacaaagagttgaattaccctttatagatgttacattatttatttttaaggtatacaacctaaagattctgtaaaactttgaagccctcacaatgagacctcccatttttgaggttgttatgctggtgaagagcctttttctttctctctctcttttttcttaaataatttttgtggatacatagtaggtgtatatatttatggggtacgtgacacattttgatacagacatacaatgcataatagtcacatcagggtaaacgggatatctatcacctcaagcatttatcctttctttgtgataaaaacaatccaattatactcttagttatttttaaatatactgtagtcaccctgttgtgctatcaaatactagatcttactcattctacctatatttttgtacccattacccatccccactaaacagtcacccaccactcctgcccctttccagcctctggtaaccatctttctactttctgcatgagaattgttttcatttttagctcccggaagcaagtgagaacatgcgaaatgttctttcagtgcctggcttatttcgcttaacatggtgaccgccagttccatccatgttgttgtaaatgtcaagatccattcttttttatggctgaaacatttgtttcagtatttgtaatagtgtaataagaatgactcatatgtccatctttagaggaatcgatacatagaatccaatataatcatgatggaatactgtataggagataaaatgaataaatccgatatgtgtgtcaatgtcaatgtagataaatctcaaacacacacacacacacacacacacacacacacatacatatgaaacagaaatgactggagggagaatacacatgaaattaattataatggttgccttggtttgaggcaggggtatgggagaggaccaggacttaggagtggaataaaaggaactgcaactttacatgtaatattttatttcctttatattaaaaaatctgaagcagatatgataaggtttttccttgtaaattccaaatatatcgatataagattatttgatacattatctgaacttttacatgtttataaaataatttttcattttgtaaacattttttaaatttcagtttaattttagaattaaacttcatgatattataaagtatacactgaaagaaagataattgtttgatccttttttccatttctagtaaacctctagataatgccagtaagcttgcacagcttgttgaaaaaaagcttgaagactactacaagattgatgaaaagagcctaataaaggtaatgtatgcaaggcaagtaatgactatgcataaagtctgtcttatttctttataagccaaagaaacttgctcattcattttctagtattgatttgggagtcattaacatagatctccaatactgatttgagaatcattaacatacacaatcgtgcaaaccttaatagatggtatggtttagagggggatctattaactaacagattttgaagtcagcactgtgtccaaatctagttctgccgtttaattcatagttaatgtctatttgggcaaattatgtaacttctatgtaactacattttcttttctataaaatggggataataaaagaatacctattttaaaagttatgattaaatgagttaatacatggaaagtccttagaataatgcttgccaatgtgtaaacatttaataaatgtaggaattcctattatcactagttctgtgaccttgagttttccatctgtgaaatagatgaaataatatataccttgctaggcggtatgaggattaagttagcatgtaagtatttggcaccaatgtgaatttaataaatggcagccattgttatcctatggaaataatataatcaaagactaaggttgaaatctgggaaataccagcatttacatgtgggtgagagaatgaagagcttgaggagactgacagaggtggtgccagaggcctaggaagccatattacagtagctggagaatgaagaaaaggaactgttgctagtttagaagaggagttgtgccaggaaaccaccaattacaatactgtgtaataagtggaatgagagaagaatatacagagtataatgggaatatagtcccgggcttatcttctaaactggagtgttggaaggcatcccaagaagaagaggccctttagcttgaagaatgaagtaacatgataaagagggagttcattgcatggaaaacaggattcttcaggtagaggcaatagagaaaaaggcaaaatccacaattaaacagtgtggctggaatggaagatataaacttagatgttaggttagttaccttaaaagtaacctgtttttggtttagaggcctggtgaaggctgttattctggttgtagttttgaagacagaatggcttagtacacatcgtagatagtgaataaatgtttgttgaatgaagagatatacaatcaaatatgcttttagtccttcatgttttcagtggaaaaagagcaaaatccacaaaaattaaacttgtcctttccactctttctgcctggaaaattaatcatccttcaaatacttgatacctttcctttattcagggacacctgataaagtgataaagtgtcaccttatttttgaagccttccttgactcttcaggccaagtgttgcttcctcccacatgctatcataagccctaagcctgctatagaatttatattgcactttttcctgtttatatttctgaagattcatagctcatatttttgagggcttactgtgctgtgtttcatagtatgattatgtttaaccttttcagtcatcttataaggcaaagattccataattgtggttcattttacaaagagaatactgccatgtaaacaggataagcattttgtccaaacttgtactgcaagatgtggtcaaggctggactcagattcagacctagctgatttccaaggctgtgctctgaaccaccatatcatactgtctcaaaatttaattaaattaatgtgcttaattttaaaatattttaaaaatctagcctataaaatttacttgttatatgtaaataaatagaaaatgtttgtataatgatctgtagttatctgttattgctttgaatactaatccaaagaatttattactttttaaaatgaaatatgaaagatactgacattaacaataaatgtttccagcactgttattcactgtttagtgattagtgatgtttgcgaattaatgataacaaggctttcattgtgatttatcatcttagttggtatcagtacagtcttttaaaatagcataatggataagagcacagatgttggagcaaacctgcatttgaatctccattctgcctcttactacctgtgtgatttgggcaagttagttcatttcagaccgcaatgccctcatggtcaactggagataataatgcctgtctcacaggattactaaaagaattaaatgaaatagtccatgtatttttgtttagtaaaatgtctaatatttagagctcaaatagtagctactattcataatttaagttttagtgcttttggaactcaattcataagaaaatagatatagtgcaaacaaaatgttacttttttaaaaggaattttcaagctattatacagttgtcccttggtaaacacagaggagggttggttccaggacctcctgtgtataccaaaatccacacatactcaagtcctgcatcagcccaacagaacctacatatctggaaagtcagcccttcatacacgcaggtttcacatcctgcaaatactgtattttctatctgttatttagttgaaaaaactctgagtataagtgcatccatgcagttcaaacccaagttattaaatataccctcttactctaattacaaaagtaattagattttagttatatagtcttcatttttcctctcttgggctactcagatttttctttgttttattataacttcacattcttaagacaattaaccatttgttttgttctgttgtatgtttttggtggggaaaagggacagaacttaggaaaagggtgctttgtattctaagatattaaaactatgttcacactaagaaattgaagctgcttaagatgattttatcttgttattctagggtaaaactcattcacagctcttaataattgatcgtggctttgatcctgtgtccactgtcctgcatgaactgacctttcaggcaatggcatatgatctactaccaattgagaatgataca

SEQ ID NO: 31 - DNA, 32742 bp, Homo sapiens
  source 1..32742: mol_type = other DNA
ggcgcagaggagggcggtgttgagaccggcggagcggcgggacccctaggtggcggagggacgctccgggaaagcgaggggcgctacgagctctggcccacgtgacctgccgggggcgggagcagggggcgcgccggcctcctgcggtgcccctgccttggggaggggccgtgaccacccgtctgtcgcccgaggcggccgccgctgcaccttcaccgcgtacccgggacccgcccgcccgcgggaggtgagcgcttccgcgacgcgggttctgaggcgtttgaggggctctcggagggaggtgacagggaggggtgcgtgtgcgtgcgtgtggggcttctgtgtccagaggtctgggggtgacgtcctttgttttgggcaggaggcgggctgggggcttgcgggacctgtgggcgctgcggggacgcggcgtcgatgctcaagaaaccagaaactcggcttgaggagttgctgcttttttgtcggaaggtcttcaaatgagagtaaagcgttaagagcctcactcctgagtctttttttttttttaagataaaaactatactagagtccagcgacttcttaccactctgaatgtgagtaacaaattgtgaatcaaagcccgaatccccgtggaattcattccgaggctgattgcaatcacttggagtcgggcgcgtcctacctaaaccaggcagtttatggcaaatacctgccttgaccgtgcttaaattagtgaacttttgggcaccaactggtcgatttaccatagaaattggtagttgctgcaaaaagagtaagtaaacataaaacgttaagaaaactctttcctgaaatctatagaataccttcgaataaaaaaaaatctgtaatttccttgttttaatagtaaccagttagagcatttgaactagtagcatttgaactctgttaaagaaaacgagtaaggatggaaattttattggccttaatgcataatttaaccacaccgtagaattaaacgaagtaggttcttggctttcctttctatcgggtttgcattggagcgttcgtggggtgtgttggaagtcagcaggaccaacagagctgagttttcaagctgccactttagaagggtgtaccgaagatttctggcctgataatagccggtgtgattgcttctgataaataccacttttgattgggttctcactattcaggagcagctttagttgattgtttagaagtgaataaacaacattaaaaagggtagatcactgttggttgacatggtgtgtgtaaggagaggggggcctcagggattaggggtggtctcacacctacttctctttacaactaccacggagtcgttttcgcaagctatttcccaggctattacttataatttaagtattggagcggtttcaaagtaaaaagttgtgtgatgttgttgtagaggcatgtctccaaaatcctctctggccagataagcagtttaattgtattttcttacattcttaaatcagatattcggtgttacaaacatattttaatatagatctgagacttgcttactagactaattaaaacagtgataagatatagtagttttaaaaatgaccttttcataaacataaaatatttctaagatctatctttagaaatttgtaattagttctctggaattttaaaatggaaaatctgacatagatttaggttattctaaatttatttgaatatatattaaatatgtctattttataataacagttactgttattactacagcactatgttgagtacttttgttatgtatcagagccaggtgctgggtcaggtgctttataaatcatgtctgtaattatcacagcacattttaggtaagtgtcattatgcccacaccaactgagagtttagcgtaagatcatataactaataagtcactgtgccgagattcaaatcatggcctgatcccaaagcacatgctgtattgcttctgtgtgtctgtttaaatctctgctgtgtctctggattccatttgtagggacaagttctactttaaagatgcctttaggtgctgtgttttgttgtagcttcgcagaaatatttcaatctttctgttggaactatcttgcttcattattttataaatcatcttataaatcacattatattttcaatatcttcttaatcatctttatacaaaacataagtgaagagtaagacttttctgagtttcttacataaatatgaatagaatctttactgtggagaagaaatgtattacagtccggttttctcactattgtaggattctttggcctcgtcataattcctgtcttcttcccagggaagaaattaaagtttgttgggcctctcttatgtgcaaagcaatgtcgttggtgttgtgagatgacaagaaaatgcttcctattcagtagttgtttctggagtttttgtagtatttttcttttctccccattcctgccttatatgttgctgctggtttatcttcctagcagagatccaacttggctattcctttgtggggaaaaaataccagcaaggttccccattgtgtaaataaaaggctgaggccgggtacggtggctcacgcctgtaatcccagcactttgggaggccgaggtgggcggatcacgaggtcaggagttcaacaccagcctgaccaacgtggtgaaaccccgtctgtactaaaaatacaatagttagcccagtgtggtggcacacgcctgtaatccaagctactcaggaggctgaggcagggaggcggaggttgcagtgagccgagatcgcgccactgcactccagcccgggtgacagatcaagactccatctcaaaaaaaaagggggggctgaatatgaatatatgcttctgccacatgttcagagtccctcacagtttgttactgttctaccttctcagccttctctttcactactctgaatactgtgtgcttatcctggaacacattctgtgcatttctaccctccctttttcttgagccattcttttcccttgactggaatgcctttccttcatttggctaataagatctacccatccttcaaggtgctgtacaaaattccttgcttccaaaaagttttccctggtccttttcagttagaattattattcccatattatcacaaaacattattgaatagaaacatttattttcccacagaatggtgataacttttgggaagagaagacaaaatcatgtttaatatattttcctatggagaattctaaactcaaactctctagggaccctttctaagcatttataatatttctgcatttgggatttatttctgctttaaaatgtgtttgggtcaggtgcagtggctcacacctgtaatcccagcactttgaggggcccaggtgggcggatcacttgagaccaggagtcgagaccagcctgcccaacatggcgaaaccctgtctctgataaaaatacaaaaattagccaggcgtggtgctgggcacctgtgggaggctgagagaggagaatcacttgaacccaggacgtggaggttacagtgagccaagatggcgccactgcactccagcctgggcgacagagtgagactccgtctcaaaaaaaaaaaaaacaatgcttagtggaaaggaccatttcttttctatttcactattgagctttaaaattatgtatatgtattaattgattgaagctgatgactggaccatcgttggtaataataaatggctatgcttaccaaaaaggtttatatatagttcagatgatctaacctggtggcaagaaaagtaaattatatttattgtctgatgaatgttaccagtttgtgtagatccatggatggaagaaacagaccaaaaacaaacaaagaaacagaccaaaagttattggcatttaagtggcagtcaggatcagatagtttagataaattcgaagaagcacaaaatgtaacctggtttgcaaactttttactgccagtggagtaaagcagggctaggatttctttgataaagagctagcctttcttgtctgctctgattgcataccttggacagtgcctggaagtccacctagctgtctaaagggagtctgtctattttgacttcctaatcagataattaaatgtgaggcagttagagttatgtactagttgatctttctatatgtctctgtcaattcccgggatatggaaaaaatgattgccttttctttatggttagatgccgtgatctagcaattttgttaattttgaggtttttggagcattgcttggaagatgctattaagagacagatttgttccttgcagattgttagttgtaaatagtagtggaggttggaggttgaacttgatgacttctcaatatcctttcaaacctacaaattattttccagttcttcgtcctgtgattaaattttcttatcctaatgatcaaatttgtaatttaatatttgttgcaaattttactagtcttacactatatacacacacattgtatctaggaagtaggtttgttaactccatgtaatgaggaacatgagtgaacacattattgctaaattggctagagagttcttaaaacatgaatcatgaatcaagaattgcttgtttgttcagtgaatatttttttgtgtgaagtgctacctaattgttatggagattgtaatgtaagaggcacttttaaagatattcttcccttgagaatagtaagactatattataaattgctcttattgaaatagtgaatagcattctgtcttcttgcttattttaatggtcttagaaatggttctttctacatgcagttttcatcaagtaaaatattttgcaactttatttatattcatttacttattcgttaatttgtgaaacatgtaaatgctacatgtttacatcttaaggagtatgaaattaacattttataattgcaaaatttagaatttcattaagaactcatggatgagaacaatattttgttttatttttttagagacagggtctcactctgtggcccagactggagtgcagtggtgcaatcatcgattactataacctccaactcctgggctcaagcaatcctcctgcctcatcctcccaagtagctggggctatagtcacaggccaccacacctggctgatttttcaattttttgtagaaacggggtcttgtacgttgcctgggctggtcttgaactgttggtctcaagtgatccttccaccttggtctcccaaagcactgggattacagatgtcagccaccgggcctacctaagaaaaatatttaaatttaatatcagtatctgtggggaattggttccaggaccccctgaggataccaaaatccatggatgctcaagttccttatataacatggtatagtatttgcatataacctatacgcatcttcccacaaacttttaatcctctctagattatttatgatacctaatacgatgtaaatgctatgtaaatagttgttatatggtattgtttagggaacaatgccaaggaaaaaagtctacatgttcagtagagacacaacttttcattttctttcctgaatatttttgatacgcggttggttgaatccactatgcagaacccacagatctggaggacctactataatttaatttaattctaaggtaagttaattctaatacctctctttctgctccattttataaataacagcccaaacctcatagtggataacgggagataatatcattgccagtttagctgtttgtgtaatctagacgcctttggagctattgcaatgagtatccacactaattccctttattaatttttttattaaggaaaaaagaggcacagtggaattctgaacaaaaggaaaagagatttgatgtgttgatagctgctatttgatgtgttgatagctgctacctttttgttctttcttaaaatactgctccctagcccgtgctgtggcatgcacctgtagtcccagctacttgggaggttgaagcgagaggatcaccaagagttccaggctgcagtgtgctatgattgtgatgtgaatagccactgtactccaacctgggcaacatagcaagatcccatctctaaaaaaacaaaacaacaacaaaagatagtgcttcctttgttggccaagggaagagataagaggagtactattttgtgtttcttgcaggctaaacttgttattaatgtgaaaacctcatttcctcttggaaacttcatcagtattcccaaggctgtttctttctaccttccctcctttcaccttctgctctgttccctattaacttctagctgtacttaattaacagagcagtgagtattcattagtctggtttatgatatagctgaaatacttaaaaggatgttatatagaagaggaattaggctttattgtatatggcagcagaaggaagaagtagaacaaatgggtagaaatggaagaattgctcaaagtatggaacgattttcttacaggaatattcaaaattaagattagctgctttatgacctatgtaggaatgctatagtaagatagtggactaactgacctctaggattgtttataacactgagattccaggactttatgattgtatatctaccaatttatctcatatatgtatatgtatatccttctttgtctttctcaactgttatctcagaggttatagtttatgtctgatatgctgtagctctctctaatgtatcggtatggattcatttttatttaaatattctcagtctttatcactgaagattttacctttattcctctctttttctttctcaccctcctattagatatattatagagctgctcattttgtcctccttttctctgaacttctctttattatttttcatctgcttattctttctttagctgcttaactagtacattgagggtttgttgttgttgttgttgttgttttggtgggggcagacagagttgcactgtgtcgcctgggctggagcgcagtggcataatcttggctcactgcaacctccgcctcccgggttcaggctcactgcaacctccacctcccgggttcaagtgattctcatgcctcagcctcctgagtagctgggattacaggcttgcatcaccacacctggctaacttttgtatttttagtagagacagggtttcaccgtgttggctaggctggtcttgaactcctggcctcaagtgatcacctgtgtctgcctcccaaagtgctgggattacaggcatgagccattgcacctggccctaactagtacattgagttattaatatcagtgttcatggtagttttttgtttcattttgttttggggcagggtcttgctctgtcaaccaggctggagtgcagtggcatgaatattaatactgttagtaacagcaatccaaaaaactataatccaaatgtccatcaacagcagaatgaaaaatacatttggtatacaatggaatatacatgcaagttgtagctatgcacaacaattgagaaaaatctcagaaacaacgttcagcaaaatcatataaaactaaatggtatcttatttaggactatactgacattcgtgttaaagttgtaaagacaagcaaaggaataaggaacaaaatacagtttagaaatcaccttagagggaaaaggaaggagatgggttaggttggactacccaggagactttaaaggcaggtaatgttcttattttagactgaatggtgttatataaatgtttgttgtgtcattctttttaccatatacatatttcccaaatgtcttttgtacctacccaatattaataaaaaacattttaaagaccttaaagagtttaagtagaatatattttgaaagcaaatgaatccaactataaccgaagtatcagtgtgatatcttctttgaagaaataaatttactgagtttggagttgactatttcaaataattattgaattttcatttgatttgttaatagtagtttttaaaagtttgaagcagcaattttgtttttagatgctaatatgatacatactgttcttttttgtttatagcagaaaatattacataaaagtattaaatttcaaacatattttaaaaattacagttctcaaatctcatctattcccacccctatttagaagctccatgatgacagttaagccctgtgctatcttctgtattgattgacatgacagcagtctgcagagttagcttgtgattatgtacagctcagggttactgtaggttgttctttgaaaataggacttcaagcaaagcatcttgtattccttttgcagaaatgttgctgaagtgctgctgaaagggccagagatgcaaggatttgggatacattttgaacctttaagctgtctgacattgacctcctttcattattaataaagaagaatcaggagcttaggatgtattaacaccaactcattaatatactaaccggacaatgttctacaaacaattctacattgtaaaggactggattggcacaaaataaaataattttattttattcagcttataatatgactcgatggaggaaaatttgataagcatgagagaagaccattcttttcatgttcgttacaggtaagactattgctgtcttaatggatgacttttaatccttattttaaagtgtttttaactctgatgaccatttcaagtttcagttgaaaatactcaaatataccagccatagtattgtctgtagacaatattttctttttgttgtaagttttcctttctgtaagaaaatgatagtagagaccaattatgtactatggtttgtttaatgttctctggaagagtttatgaataatttctttataatttgtaactttttatgtaatgcaaatatgtaaatgaaatatgtttgaaaatctttggggctaaaaggtggattttttaaaaatgtggtcagctgaaggaccaaacctttgcattgtaatttaatgtgatcttttagacatgaactttttatttttgatttatttttattttttgtagtgtattgttttgattcccttctcatttcctttttttgtatattttttattttattaattttactttttctatattatcagagatgggagtctcactatattgcccaggcaagtctcaaactcctgggctcaagcaatcctcctgcctcagcctccagagtagcaggaactacaggtgtgtgccactgcacctggctttttattttatctttaaaggaaattttatttcacaaccattattactgttttaaatatgtacctaatccacattaatataaatacattattattaaaatacaaacaagcgctgttcaaaagaaatgtcatttttaagcttaatgtctagtgacattttgtgttgttttgctgatttaatacttaagaccacatttttacatgaagtagtggtttggtaatccctaatttactccagaaagcaagtcaggctgaggaaaggcacccacatgcattctctcacaagcttcacggtccctagggaaatggcctggctcctctaggacttacagtgttcccttggatgcccaaatggattgtctacattcctggtagaaggttgcagattgtaaggaccagtgttcccacctttgttctgcatccacaagtgtctttcacaaatacaacacactccctttggctacaccttatatataataggttatgcacatgtatgtgtgttggtgggggtggatgcttcccactgatctagatcaggatccaaatcagacatacacatcaggaaaggagggaagatagccaggaagtgatagctgggcagaatgaaggtacagaatgggcaggtcttcctgatttttcagaagagcccaggaaatctgaaaatctgaagagtgtgtgtgtgtgtgtttttgtgtttttgtttttttttttttggagacagtctcactctgacgcccaggctggagtgcagtggcacgagtttggctcactgtaacctccgcctcccatgttaaagcgattctcttgtctcagcttcccgagtagctgggattataggcgtgtgtcaccacgcccagctaattttttgtatttttagtagatacagggttttgccatattgaccaggctggtcttgagctcctggcctcaagtgatatgcccgccttggcctcccaaagtgctgggattataggcatgagccaccaagcccggccggaaatctaaatctttattgtgctgtctccaaattctgaaatgttggcagctaatgcaaatttttttttaaaaatgtgggttgaacattttaaggaggagaaagaggcctgtaacagacacaactctctaaaaaaccacacaggcaggtgggggaggtagagctcaaggttttgagaaagctgctctccaggacgtaacatacacttaccctgggactccgaggcgctaaccctcctgcacctcgaggcccagagcaccaagtgcgatgtccccatctcctggccttgcccacctcattgccctccatatctcctcatcacaccttcgattccccaaaccccataggtttctctgcctcccagactttgccccttattccttggatggcctagaatgccattacctgccatcctcccaggcactgcctgttgcaagccaggctcccattctcattcctcactcctagagggttgcatacagaccttcctattgcacccttctagatgggctgcttaggtcagtgtcacccacagacaccatgcacccagtgacagtctgtgagagcatgcagcctacccccatccgtgtgtggagctcagccttcataaatgagcatcttgaaggaatgggtattaaataaagtcggaataggtgggtactttgtaaacatgataaccaatagccagtttaatatttagtgttaaatattaatgacatctctaatgcaattaggaacaaaacaaggctatctgcactatgattattaatattctgcaagttctggtaattgcactaaacgataaaataaatgcaaacttaaatattatcatcatttaataaggtgattagggaatatgtttttgtttttgtttttgttttgaaatggagtatcactctgtcacccaggctggagtgcagtggtgtgcaatctcagctcactgcaacctctgcctctcaggttcaagcagtgctcctgcctcagcctcctgagtagctgggactacaggcgtgtgccaccatgcccagctaacttttatatttttagtagagatggggttttgccatgttggccaggctggtctcgaactcctgacctcgggtgatccacccgcctcggcctcccaaagtgctgggattacaggcgtgagccactgcacttggcctttttttccccgttgagacagagtcttgttctgtttcccagactggagtgcagtggcatgatcacagctcactgcagcctcaacctctcaggctcaagcaatcctcccacctcagcttcctgagtagctgggactacagctatgcctggctaatttttaaaatctttttgtgaagatgcgatctcactctgttgcctaggctggtctcgaactcctgggctcaagcagtccacctacctcagcctcctcaagtgctgggattacaggaatgagctgccgtgcccagctggtaatagattctttatcaaaactgttacaagttaattattagatgaacatcagaatatagtagcaattaatagaattcaaaatctcaggagggtgtaccaaattttagatgtcttaacatatttaggaaatgggagatttatcatcctgtaaatagttcacgttaggaaggttcatgccaaggaagttaacataggtaagatgaggacatttctattaaaaaagagtttcaagtaaaataaaatggaagacatttaagataattaagatgagcttttaatatacgaaatgctgccatcctaccctttacataaatttccagaaacctgggaattatatacttttttcttttctcattctgtatccagcatgaagtattgctggtttcatctcctaaatgtttctcagattcatctactcatgtgcatcctcccagttgtttgaaaggcttgttccccggtgctgtaaagaaatagcacttgaacataaatttaatttatttagtaaggccatttttacttgctgcagaaggggtacactcatcagcagttttgcctcgagagtacactgaacaaaggagacagggtcatttataacctgatgtatccaccctactgctgtgtctggtttccattaactggaacgggacctcacattctgtatttgtcccgattggctagcaacttagaactttttaaaagaggcaaaggtagaggggaacaaaggaaggaggaagtaacttgtggaatgttgagaaagataaaaacacttttaaataaggaagaggaacaggctatgacctaatgcttgcttggaccagtgtaagcatgctagggcaaatacttaggctaaattgtgggagctaagaacataaggtacattgatttccttattaccgctagcagatatttaagaatgttaacacagttctttgaataaattttgcgtctaaggaataaatactatttattcctaattagatggggaggaaagtctttgaagaggaacctttactttactttttacaccgccatagctataattgagatcctcaggatcttctttccagactgcctccattcttcacctcttggaacccgtcgttttgacttgtcactagtgggctcaatctcaaaacacagagctaaccgtgcaacctctctgcttaatacctagggtggctcctagtcacccggccaagctgaacatagaacacaagatcttcattatctggcttctgcctattcctgggaccttacttcctgccattcttcaccttgcactttgagctctggtttcctgcatgtcatgctgttttatatttcagtgtctttgctcatgctatgccctatgttgaactcccttcccactttctttgtttagctaattctactctaagatacagctcggagattatctcctcctggaaaccatttctaagctccatagttaggctctgtggcctccgtgtgctcatattacaatctgtgcatttttctttcttagcaccaactgtattaaaattaagttaatctgtttttatggtgctcccttcctcctcacctctccctttgagcattagctcctcagctgtggtcactcctcagcagccatgataattagcatgttgtctggcacatattgaacttcaatggaatatgaacgtaataagatgtttatctgtcttgctaaatgttttgaatagtattgtgctttctaatatggtaagaacagtagataagtaggaatggcttgtacctctgcctgttggaagatcttagaattgtcctttttctgtgatacagtctagatcaaacatggttgcactttgctataggacttcaccaagggaaacttaaaaatctgtactgtctgtaataggactataccaaacaaatctctggctttatcagtgctctaagaccagcattctgtatattgattggattgtcgtataattgggggtaatgatttgaactctttatgttaggccataggctggtataagttattcttctgctatagtaaatccttatgaaatgttttatccatctggttcttccattgtggaggtcctcctctatccctggaggagtttctgtggcacaatgaatttgtaattttgaatggaatgtttcttggaacactaagtaacctcctaaggggacatcagaatgctttattgaaatattttgcacctatttcaaaaggtagagactgatagcaagtacaatttaagttaaaaaaaaattatatggttgatttttaaggaattattaattttttatgtgtgataatggtattgtgattgtattttttgaaaaagattaatcttttaaagatacatactaaggtatttacaaattaaatcatatgctttccggaatgtacttcagaccaatctggggttggaagagtaacgatcagagtagagatgaataaataatatattgattatatatgtgtaattattgacgttgaaagatggatacattgggtttgttacactagttcctctggttttgtgtttctttggaaaatgtcatttatacttcttactgtgaataataagcattttaatactttaatattgtaaaagttagattcttgcatgtaagttgtgaaggaatacagatatggtgttgaattctttaattttgttagctcaatgtagttgttaatgtgctttcttgagtagtttaaggtaacatggagtgatggaaagaccactggatttggagacaaagataaattttcatatctcaactttgacatcccatgaccttaagcaagtcatttaacctgtctcagcatcactttctccttctgtagcaatacctatcttagaaggttatttttattttattttatttgagatagggtctggctctgtcacccatgctggattgcagaggtgtgatcttagcttactgcaccctctgcctactgggctcaagctatcctcccacctcagcctcccgagtagctgggactactacaggtgcatgccaccacagccagctaattttttttttttttttttttggtggagatggggttttgccatgttgcccaggctggtctcgaactcctgggctcaagcgatccacccccccttagcctcccaagtgctgggattacaggtatgagccactgcacccagcctcagagggttattttgagaattaagtttgataaaggttaaaatcacttttaaaactaaattaccatacaaatttttgttttttaatcattttcttccttcttattctatattattaatcatctaaccatacaaatgtaaatcaattgagcactacttttccttttacataataaatgagaacagctagatatatgtggtaaattgaatggatgaaatttgtttattggggctagcactggtgatggaaaaggttcatgcccaattagaatacagagaaggtagagctaggatttatgaaagaagatcacacaaccacagaaatggaaagcataatagagaaaatggagagtagtcttattttgcctcttaagtcctgaattccatcatttattcttaaatagtatgtaagccctttgaagcaagagtcaaatctggacaaaattgatgttattaagtcttttagaaagatgtagcatcatggttttatgttttgcattcactgacgtcctgtgaacacgaaacaaatttaaggaggtaaagaggataatagtcaagtgcaaaatctagtgtggaagagaagttaaaaattaaaagaaaaattgaaatgacatgagtttgcacagaaaatgagaaattctagctaaaatgttcactctattagcaaaaatgaaaacacgtcagttaaggatagtagtactgtgtctatttgaagtttattagaaacatattttctttgattatacagctagataggctctcagaagcataaaggaaactttgtatgtgggatgaattttaatggaggggtatgttcttggtttttcttctacatgtgggtatgttctttgttttcaacccaactggtaaacaaaggaagtaattctattctctcatagtgacagagaggatatgaaattactttctctgttactatttaatgatcttctaaaaaatttataaaccaagctgccctattttgcaggcataaatctatatttgattcaggtgttagagatttttgccagaatattaacttattttctaataaaatacaccagagcctgaatctatctaagaattaatcataaactagagtgtttgggacattatttcaggtattagtcactggaataacttttctaagatagtctctcctgtagggcattctcactacatggacttcaaggacagccatgtagccagcaagcttccagtttgctagtattgtttcttatgacaattatgtaaaatgcctttttaaaaacgtgtaacacttacgatgccattcaatctatagctaagttttgtgggatgccacatcatttggatcaatggttccagtaaaatgttctgtaaacttaaatccagaagatcagtcatttgtggtgaagttatttatttgaagaagatacttctcagttttatatgaatattggcaaacacttttatacttccgatttttaaatgttgttcacatgaatagccagttctgccttattcctaatttcccggccagcaacccagtcatcctgaactgatggtgctgtcatgtgtgaccatttcctcacttccccctcagtgaaatgatgcgccatcattagtaatccattgtatagtggcgtgtaattttttttacccagtactctattggtggacatttaattcatttgtggtttttttgctgctgtgaatatcctttcatatgtatcttcttaaatttgtgtaagtataccttaagatcaattcttagcactgaaaatgcttgagatataatttttaacataatttagaatgcttaaattaaaaactttttgtaggaaaagaattattttacaaataaaaatatcttttccatttttttaaataatatttcttagaaattcattggtttcagtttttgacaaataaagacaaccagttcaggtacttcatctagcaaaataatcctttaataaaaatcacattttgactgggcacagtggctcacgcctgtaatcccagcactttgagaggctgaggcaggcggatctcctgaggtcaggagttggagaccagcctggccaacatgatgaaaccccatctctactaaaaatacaaaaattagctgggcacggtggtgcatgcctgtaatcccagctactcaagaggctgaggcagaagaattgcttgaacccaggaggcggaggttgcagtgagccattgcgctccagcctgggtgacagagtgagactccatctcaagaaaaaaaaaattacatttttatatatcttttgttgatttatttatctttatacatagaatatgacaataacttcataaaatcttaaacagatatactcaattttttcttttatgaaatatctcattttcagaaatacaattctaaagggcagttttcatttttggaaggcaaaaataggctttattaattgtgaagtgacatataaagaaacataaatatagctgtttaaggtttctgatttaactgcttatcttactatgtattttagatcttctctcctgtatctaattggcttgtagtctaatattgtagcaaaatgttggaggtttacctgcattattttgcatagatccataaagtgaagatggggccagccatggtggctcacacctgtaatcccagcactttgggaggccaagatgggtggattgcttgaggtcaggagattgagaccagcctggccaacatggcaaaaccctgtctctactaaaattacaaaaattagccaggcatgatggcacatgactgtaatcccagctgctcaggagactgaggcacgagaatcacttgaacccaggaggcagaggttgcagttagccaagattgtactgctgcactccagcctgagtgacagtgagagactgtgtctcaaaaaaaaagtgaagatgagcaagcagtagccattggctaagtcatttgaattcttaaaaaaaaaaaagatacctagatagaaaacttgaaaattacctattggaattggctacatatatctgcttgttctaaaccagaagtctgctttgaacctttacaattggctcagtttatctttgtccaggcttttagcttcatcaggtacattttctactttacaatcccattttaatttatggctctaaggacccttgaaattttgcagactgaaaaacagcactcacaaaaacatgttaattgatctaccactagatatacagagtataatcatatttgaatgatattagggtgggtggtggtttaattcacatttcttataaaagcactgattctcaaccctaacttgtactttagaattacctggggctttaaaaaaatacaggtggccagacatcacccagagggtggagttcagcgttgggagttttagaaagtgctccaggtgagctctgctgttgtacagccagcattaagaacaactgctctattggagtggctcaaagctcattctagtaaggagtaacttaatgctgttccaaaaattaaaacatttgatgagcttaatcagagcttctcaaagagtgatatgtatgccactggtggtacataaggtaactttactcacttttagattttaataatttcatatttgtttaatgtgtattagaacggggttcccaacccctgggccacagaccagtactgttgtagcctgttaggaggtaagctgcaggtgggcaggacgagtgagcattttcacctgagctccgcctcctgtcagatcagcagtaccattagattctcataggagtgcaaaccctattgtgaactgcacattcgagggatccagattgcacattccttatgagagtttaatgcctgatgatctgtcactgtctccagtcacacccagaggagaccatctagttgcaggaaaacaagctcagggctcccactgattgtacattatggtgaatgtatagtaacaagaggaataaagtacacaataaatgtaatgcacttgaatcatcccaaaacaatcccctgccacccgtccatggaaaaattgtcttccacaaaaccggcccctggtgccaaaaagattggagaccgttgtattagaatatacatataagtatcgtatcaaattcacagtttcatgagtactgctttggatgaagctccatttttttaaaatgataagttaaagatagtgtgccaatttaaaggaaatttgccaaattacagaaataattaaacgaataggtagttcctacatatggcagaaatcatgaagatgctgaagaaacacaatggcaactttggtgaagggcaccctctaaaatttaggatttgaatccaaagtatcagtgtttttttctcccagatatgtttacagtgacttaatccttctttttcaattcagggacagactttcaaaattagtatttctgcaaatttttgaatcattgttttctaacttagtttcttgacacctagttctcttgtgaaaatgtgtcttacagatcaagaatattttgttcctctatttttctagggtataagtggacatgtggtggtaagaagaggaaggagagtgagtgtgtgttgtgtgtgtatgagagagagagcgagggatggatggctggatggtcagaggggctgatgaacaggtgactagattacttggatacctgggtagagaacaatattaataattgtagggcctcactttcctacatactcatcttctcagactctaaggaagtccagaggtctgttacaactcagaattgtttgggaaatactgctttaggctctttcactagtaacgtggattgctctgggccaattaaaatgagctccacataaagatatttagctatcctgacctctctgagcaggctcagagaaattcgaataggcaaattacctcttgctacaaataactgcttactgttttatcaggaatgtatataaacttcagttatagaggcagctgccctgaacaagagtagccgcttaaattatattacgggaagttaaaaatactgtgatgcagctgtaatgttatgtttaaatgtctgtcctgtataattttgtagaatggaagcttcttgcctagagctggccttggaaggggaacgtctatgtaaatcaggagactgccgcgctggcgtgtcattctttgaagctgcagttcaagttggaactgaagacctaaaaacacttagcgctatttacagccagttgggcaatgcttatttctatttgcatgattatgccaaagcattagaatatcaccatcatgatttaacccttgcaaggtaattaatttaagcttttaaatattcttccttctgaaattagctattactttaaaaaatatttctattcaattaacaaaaactaacttaatacatttaatgagttctacttcagtaacatcgcttttcaaaactaacctttaggctgaacacagtttaattgaatgaatagtagtgaattgaccctagagtttaattaaatggatgaaaactaattacattcaaatccagaaatgtaagttttaaatatttatttaaagtaggtttcaaagccaatgggtttttcttaccttaagcatgtcagtttgtcctcttggaaaactgtactctggctactttatattttaacaccatttgtattttaataccatttggttttttgttttttgttttttgtttttttcaggactattggagaccagctgggggaagcgaaagctagtggtaatctgggaaacaccttaaaagttcttgggaattttgacgaagccatagtttgttgtcagcgacacctagatatttccagagagcttaatgacaaggtaataccgcagcattagatggtaggcctaatattttcattcaaagggctttgcattttaatactatttaattattctatagtttattttaaaattaataccaaaaaagaaaacatttatagactaatagaagtaaaagaaaaaaaatttaatggagaaaaagaaggaaatagtaagaggtctttcataagtaattatttgattggttctgtatggagagccaatataaaaatttttttcccttgtccgtaatactaaggatattacaaatatatatgataaacctgacctctgttttcaaaatgtaaactttgctgatgtcttcatttaggtgggagaagcaagagcactttacaatcttgggaatgtgtatcatgccaaagggaaaagttttggttgccctggtccccaggatgtaggagaatttccagaagaagtgagagatgctctgcaggcagccgtggatttttatgagtgagtaggggctgatatgggcagtcatgtaggcccatctaagccgtggatctgctgtacgttctttattcagtagtaagtttttaagtttggcaaagattttaaagttatgaactagcaaaatcatcaattcagttgcttaaatgttacagtgttatattagtagtaatctgcagctttcatttaagttgcagaccagtgccacttagtggcaaaagcaagaaatgtcaatggttggtctgttatttagagtaatttagtcttttaccaatagaatttcatagaactacttaactataggggttccaagattaactctgtgcttgaccctgggcagaaacctatctgaatagtttaataaagtgttcccagctatttcctataattgctcttcatcatagatgtcatccttaaaatgttgcacattatggctgtaagcttccctacatttttttctgataaaaagaattagatatgtaaatcacatacataaaattgttctgcaaacttattttttcatcactttttgcgatcccttagggaaaacctatcattagtgactgctttgggtgaccgagcggcacaaggacgtgcctttggaaatcttggaaacacacattacctccttggcaacttcagggatgcagttatagctcatgagcaggtacagtggaaagccttggagccagatcatttcctccatcaaagttctgaacagtgattagatcattcttcagttttattttatctacatctaattaaaattgtttgtttcagcgtctccttattgcaaaagaatttggagataaagcagctgaaagaagagcatatagcaaccttggaaatgcatatatatttcttggtgaatttgaaactgcctcggaatactacaagttagtctaatatttctgtagataaatgtaaaatgaatactcagtcccattaattcataggctttaggtttaaaatctgattgtagcagaacttttggcatctaagcctcaatttccttatctgtaacagaatatatcaatacttcattttggggaatgctgtgaggattgaatgaaataatatactaaacacagtatctggtacacagtgctcaataaatattattgtacataagatttaatagcagcagtatgacccctttataatattggtttttatctttaaaagtaattgtttttaaatgaagttttcaacctttaatatcttttaaacctgtttagcatatgtggtgtatattgtgtatatgctttatttcactcagttatgggttagaagagaggccaaaagaaagccttgtaacaaaaatatttatagtctataccagtgatcactgaatttttttctctaccttcccaccctcttattgagcagttctccctttaccctctttctgcctatatttgactgtcactgtaagctgagtcccccattcacttacctgaagcatttacaatcccagcttcttctgtggcaggatctctcttatcagtagatttgagacatagatgatagaaagtttagacagcttcaagttgcctgatctgtgctttctagattgagttttccctagttagtggggattgaagcctcttacagattttgggtagaaggcagtttgactaaaccgaagacacagtgattgatttgtattttgttaaagaagccaatatgagacagttctggataatttgtcatcttcataaaaaaggtaaaattgttttaggcctatctaaaaaaattaaatagcattccactttgctttaaacatcaactaatggttaatatttgttggttaggttagttagatatgaaatagcctcccaaataaaatatatcactgtgtactatgtgaaggagtatatattttgattttaaatataaaaatttcctatatttaaagccaagggatatagagaagtcttaattattaaatggtgtatctgtgttaaatactgaaaggttctattataaaatggatagtggctatttgactaaagaagcatgaatataaagtaatgaaacttagtttttttcctcccaataagcaggctagaactcagaactttatatatattccaagtcgttggttagaaatatttttagaactcttctttagattttttttttttttttttttttaaatacggagttttgctcttgtcgcccaggctggagtgcaatggcacaatcttggtgcactgcaacctcggcctccccggttcaagcgattctcctgcctcagcttctgagcagctgggattacaggtgtctgccaccacgcccagctaatttttgtatttttagtagagacggggtttcgccatgttggccaggctagtctgggactcctgacctcaagtgatccgcccacctcagcctcccaaagtgctgggattacaggcgtgaaccaccacacccagcctggaattgttatcagggccaaacaagaaggctaacaatgtagatccatatccttccggatacaaagcagtagtttggtaaacctatgttagtaattgaatttggttccagaaagatttctgatcatttacaaatcaactgtaccatcaaagaataatggtatgccagaaagcattatgccacaggatctgaaagcaattccaaaagtctttcaaaaatatttgaaaagacaggcaacattagaataagtaggtagcctcccaaggtgacagatttgaaggtatcatcattaaatatgtaactttagatttgtttgcttaaaaaaagctatcacgttaccgcatagtaatttgtcatatagttataagtgatatgaagtaattatactatttgacagaaataatgggagggtcatttaaattactgaatccaaaagcatctataggtttaagcactgataataacacattaacatttatacagcaactactatgcacaagatgctattctaagcactttatacatattaatttaatcctcacaaaaatccttcgagatatttcccccattttatataagaagagactggtatacagagagattgagtgactttgcccttagcttagtaattggcaaagttgggatttaaacccagtctagctccaagatctatgctcttaactgctacgctagcttctcactggcaataccacaggtagaatttgggtaatgtttggatgtagtattcagtatttttcatgagttggtgactaatgcccgatacataagaattttacctaagtggtgactaatagcctacacataagaattttacctaaatattttaaattttgacaatgcaaaggtgacggtatgattgaaaacagatgtcatgtggaaaaaagcctcttttagctattgccaatactaaagggaaagtttttttaaatgttaaagatattatgttaatctctagaacctcttgattttatgtttcaatactcctttactttgatgaattgttaggattctcaaatttattctaaaagtcttgaatcttctttctgtgtttcaaaaacgtcttttcattttgtctaaaagtaatggagaaagtacgggatatgaatattaggctctcagagatttaaagacagcagaaagcagcagagaggaaaaatgagagttttgttttgtgattcttaaagcccaaactgagaatgatcattatataagaattaatttcttcttgtaggaagacactactgttggcccgacagcttaaagaccgagctgtagaagcacagtcttgttacagtcttggaaatacatatactttacttcaagactatgaaaaggccattgattatcatctgaagcacttagcaattgctcaagagctgaatgataggtatgttttacgtctttttaccataactaaggtaaaatatagatgcattattgaatccctagaatttttcctttgtttcttttcctttgttttccttaaaatcccttttaaggaattttctttcagtgatatcctctgtatatcattgtatgaagggctagtctgtgatagaggattagtctggttccatatgcccttgacccaagatcaatgactaggtcccaaactcaattacctcttcagaagtcttcctggtgaaaccccgtatctactaaaaatacaaaaattagccgggtgtggtggcgcacgcttgtaatcccagctactcaggaggctgaggcaggagaatcgcttgaacccaggaggtggaggttgcagtgagctgagatcacgccactgcgctccagcctggcgacagagcaagactgcatctcaaaaaaaaaaaaaaaaaagttttcctaactacataagtgtgggaattgtggtgaacttagagataatgtccagtgtgaagggggcaactgctacccaactccaactaattgttgccagccaggaatgaaaatccgttatgtccacatcttcctgttttttaaagagaagctggaagtgctgagttttatatgaaatctgatttttaaatgttagtggctaattcagtttttttgttttactgtattaaaaaacattattttccagcatttagtctgtgatgtttgctttagaagatcgattttgtttttacctcagtatgagagagaacttttcgatgcagatgttcaaaatgaagtatgctacctcaagaggtagtgcgttctctctccctgctgctcaaacacacactgaataattacctggtagggctgttatagaaggaaaatagggtagtggaccagaatacctatccttgagatttattactttataatgtatttcatattttaaaagcatgttttctatgttgtaatacttgactgtgagtttagtattatgtgggtattcttttttttaatctgggtattctagtatgtctataatatcatgatagtatgttatttatatgaaagaccaaatcaatccaaagcattctttatccctttagttcctgctagatagcttttattctatacataggacctcttttcaaataactgcatgttcgctttgaataacgttttagaattggtgaaggaagagcatgttggagcttaggaaatgcatacacagcactaggaaatcatgatcaagcaatgcattttgctgaaaagcacttggaaatttcaagagaggtatgaaactaaaaaaaatgctgtctgtgctattgtaatttacaaattagaggttgggggagggaaccctatttctctagattgatcatgtggctgaataataaatttgattatatatcattctcttggcataagaaccccagaaagcattttgaggtacagatcacagttatgtttgtattggctttcatgtaggaagacaggaaagtaaggccgggcatggggaagtggaaggagagtactaaaatatgcccctactctacccgcatctctacatggagaagtagcatggtattgaaggaaaagcatggttcttagaattaaggactgcttcctgttgtagttctgccacttactggctatttgagcttggaaaccttttctgagcctcagtttctctcatctgcataatgggaataataatatctaccttgcaaagtgttataacgattagagctaatgtatattaaaagtgcctagcaaaatgtctggtgctggcttaataaacattattattatactatgggaataaaatattctaagaaaattttattcatataccaagttaatgtgtccaggataatctacattattacttagtatgattccagagaacaagagcaatctaatgtttagagaactaaagaattaaaagaatacaattagctgtcctattgtgatattttagaagcttgctttttctttctgtattctttaagacaactattaatggaaaaaaattttcattcattcatagtctcataattctaatataactattttcatttctctatattttcttctagttttaggttcactacatttacaaataatcttcaccattctttctctttaaatactactctaaaatataaatgtttgtgttgtaggttggggataaaagtggtgaactaacagcacgacttaatctctcagaccttcaaatggttcttggtctgagctacagcacaaataactccataatgtctgaaaatactgaaattgatagcagtttgaatggtaagtaataggacttttaaaacccaatttttttatcctcaatatttagattaaagttatttatcacaaatttggcatattcagagagaatatataacatgggaagttcaacttattacacttttttgctgtacacagctctgtttgtaaatatatattacaattatatattttgtatataatatatatataattataatatataatttataagtgtaaaacaatattttatagtttttaccatgaacttaggaatggtgatggtattgttcttttcttttgtaaaaatacatttaaattctctatctctaagctcattcaaaaatttgtaaatgtgaaggtgccaaaattttaaaatgttattgtttatcctttttatctcatatcgttttacgtatctgttttctgtttagttctttttcccccatttcatttccaaggtgaattttcttaggacttttttaaattcagaaaatctaagatactctctttatttttctttctttttttttggtggcaaaacctatctttaggacaccttccttaggtgccgatttgtttgacatttctatagcgaggaaatttgctataatgtctctttttgagtgaaagaaaatctacttttaaagaaataaaagggataagattaggatcacatttttaaatttcatcagtatgtgattctatatgagatcattttcctaagcttgagaaattctcagtctaaaaaaaactactgacaaatattttgaattttaaagtcagtgataaatctacctttactttttccaatttttttctttaaactcaggaaaagaaattagtggctagtcatctgatttagattttcaaagaacatttagtgaaaagttctgaagtgtgaaccgtataataatttgtgactgcgtgctttgtggttgaatgatgggctaagacgtttttctgtgctgaactttcaaataggttatgccgttaagagctctcatctttaaaaagcaaaaacaaacagtcgcttgtcttcatagacccttctagctgtagacctgttcctttgttcgctcttataacaaaacctgaaaagacactaatattcattgtctttacttccttgcctccctttctctcttcaacccattcccgttgggctttgccctcaccatgtctctgagacctccattttaccaaatatatcattcagttttcacatgtcagcttacttgatttttctcagcaatatttcctatagccaatcattcccttctgagaaaactttcttcatttggcctccaggattactctgcttttctggtttgccactctcgtctttattctcttctctcctcttcttcatctttcctctacgtttgtagtgctcagggttcagttcttggacctcttcttcctaccttctttccctccctattttccatctctctctccttccttcttactgattttatcctttttccttctattctgtgctttaagtcagtgcttccaatagaacttttctgtgatgataaaaacgttttacatctgccatccaatgtaaaagccactagctacatgtggctgttgatcactagaaatgtggctactacaagagggagtgaatttttaatattacttaactttggttaattaaaatgtagagagccgcatgtggctactggctattggacagcacagctctagataatctcatccagttacttggcttttatattgtctatatactgattattttcagatttatatttccagccaaaatttctctcatgagtttgagactcatttgtttaaaattttccattgtcatgccatatctaattggcatctaaaacttagcatgtccataatgttttctcctaaacatgttcttcctgtaccccaccctatctcaggaaatagtatcaccattcactcaactaatcaggccaaaaaactaggggtcatacttgttccctttctacttttatttatttattttattttattttatttttaaagacagaatctcactctgttgcccgagctggtctcgaactcttgtcctcaagagatcttcccacctcagcttctcaagtagctggccttgttccctttctttcactcacttctacatcaaacctatcagaaacctgccttcaaaatatatccctaatctctcctacagtgtactctgcaacaatcttagtataagctaccgacagctcccagcagagtcctagcctaccaatgatttctcttacttcgattctgcatctctcacacttacttttccacacaggagccagagtgcttttttttttttttttttctaaattaaaaaaatattttggccaggcacagtggctcacgcctgtaatccccaacacttcaggaggctgaggcaggtggatcacctgaggtcaggagttcgagaccagcctggccaacatggcaaaaccccatctctactaaaaatacaaaaattagccaggcacaggggcacagacctgtagtcccagctactcaggaggctgaggcaggagaatcgcttgaacctgggaggagggttttgagatggaatctcgctctgtcgcccaggctggagtgcagtgacggaactataggcacgacctcctaggctgaagtgatcctgccacctcagcctttcaaagtgctgggattacaggcatgaaccatcatgcctggcctcagagtgctcctttagaatatacgtcgttcctctgttcaaaacccttcagttagttcccatcacacctagaacggaatcctcagtcctcaccatggttgaaaggccctatgtaatctgaacctatctcttcagcctcttttcctgccactccacctcttgctcactctggctgtatgaagacaggtgttttttggtctcttttgttcattgccatctccccagtgtgaggagaaaggatttgtaagaaaacttgtctatttctggtgttggctcaaggtagaaaaaaggagccttcgctaaaaatcttaattcatgaattcataagcctccctacatactggtttggaatttgatttataccatctgcacagtctaagaaaccctaatccattaaagcacttttgggttagaggtgttcctagagacttagcagaagtaagaccaaatagtttctgggggaaaggcatccttgattccaggtcataagcgtttcacaacaaaaaaattaccaaatatgtaaagaaacaagccaagatagtaaggaaaaaaataacaaaattaggtcatcaagttcttcagatgttagaattatcagatatagaaaataaaatgactgtggttgaacgtttacagaagtaacaaggaaatgaaaacaagagaataacaaaaatgttaggtagactgaaaaaaaaagctaacatttattgagtgcttatgatatgccaggcactgatttaagtgctttacatgttttaactcatttaattgtaacaattctagtagttaagtttctgttatccttaatttacaggtggggaaatggaggcaagagaggttaggtaaatttcccagggttacctgtgtagtaagtggtagagatgggagttaagcttagtcactctggctccagaatccgtcttatgtgatagttatgtcttaatgtgatgttaacacacctcaataattgataaaaatcagtcaggagtcagacatcagtaataaagttgagatttgaccaacacaattaataggcttcatctaatgcaatattttgcaaactatgtgtctgacccattcatgagttataaaatgagtcttatgagttgcagttagcattaaaaatacacatacaggggccgggcgccatggctcacgcctgtaattccagcactttgggaggccaaggcgagcggatcatgaggtcaggagatcgagaccatcctggctaacgtggtgaaaccccgtctccactaaaaatacaaaaaattagccaggcgtggtggcaggcgcctgtagtcgcagctactcgggaggctgaggcaggagaatggcgtgaacctgggaggcggagcttgcagtgagccgagattgctccactgcactccagcctgggcaacagagcgagactctgtctcaaaaacaaaaacaaacaaaaaaaacacaggaggccaggcgcggtggctcacacctgtaatcccagcactttgggaagccgaggcacgtggatcacgaggtcaggagatcgagaccatcttggctaacacggtgaaaccgtgtctctactaaaaaattagctgggcgtggtggcgggcacctgtagtcccagctactcgggaggctgaggcagaagaatggcgtgaacctggggggcggagcttgcagtgagccgagatcgcgccactgcactccagccgacagagagagactccgtctcaaaacacacgtgcgcgcacacacacacagccgacagccagactccatctcaaaacacaaacacacacacgccggggcagtggctcatgcctgtaatcccagctcttgggaggatcacttgagcccaggagtttagaccgacttgggcacacagggagaccgccatctctccaaaaaattttttaattatccgtgcatggtggcatgagcctgtcatcccagctactcgggaagctgaggtgggaggatcacttaagcccaggagtttagaccgacctgggcacacagggagaccgccatctctccaaaaaatttttttaattagccatgcatggtagcatgagcctgtgatcccagctactcgggaagctgaggtgggaggatcacttgagcccaggaagtcgaagctgcagtaagccatgatcatgctgttgcactccagcctgggcaatagagaaaaaccaaaaaactacacacgtatgtgtatgtatgtatataaaactgttgtgtgaagattttgttgtatgtttgtgtatgttctaggtatatatgtgtattttttaatatggggtcacaccttaaaagtgaaaaccactgctttaatggaaatatattgacctaactggtcaatttccattatttttaagtattcatgaaacatttacagaaaactgacaataaagcaaatctcaacaaatttaaaaggatttgtatcacatctgtatcacacatgctctgagcacggtgcatttaatttagaaattaataagataatatataaaacattaatctgaaaacataacatttctcagtaacttacaggttgagaaagaaatcttaaagttagaaagtaacttaggactgaattataaaaatattgtttcaattttgtggcatgtgacttacattggtacttagagcaaaatttatgttgtatttaaaaaggaaaaagctggccaggcgcggtggctcacgcctgtaatcctagcactttgggaggcccaggcgagtggatcacaaggtcaagagatcaagaccatcctggccaacatggt

SEQ ID NO: 32 - DNA, 6669 bp, Homo sapiens
  source 1..6669: mol_type = other DNA
gaggcccggctgcagacctctcccgagaggggaataatccgtgccggccggttccgccatggagccaggtgcaggtcacctcgacggtcaccgcgcggggagcccaagccttcgtcaggctctgtgcgacggaagcgcagtgatgttttccagtaaagaacgcggacgttgcaccgtgatcaattttgtccctttggaggcgccgttacggtccacgccccgctcgcgtcaagtgactgaggcctgtggtggagaaggacgtgccgtgccgctgggttctgagccggagtggtcggtgggtgggatggaggcgaccttggagcagcacttggaagacacgtgagtagtgcgcgcctcttcggcctgtcctgaggtcgcggcggaggaacttgagcggaacgaaaggcgcgagctgcgagtaccggccagggcgtctcggggacgtcgcgcgacccccgggacacgggatgagggggctaaactctacccaaggccgcagggcggggcgggtgacccggaattaaaatcctgccgggcaccgcacattccctcttgagcgagtctcccgggcccaggccacgggccaaaactgcctatctcgttgttgaaatcgtctttacggtcagggtggttctgcggaagttttagaaaacgggttgacttttgggaagattgtgccagttgtgcagtgtcgagccctgcagtgtaaacaaacacgtatctcctgtgtgtaacctatcagttacttggtgcttaagtagataaaaatcattctttaaatttttcgaacaagcagtatctatgtaaaattcaaaactggaaaagtgtaaagggtacagagagacacctgcctcccaccgatgtccctcagcttccacttaccctccaggaggtaacttgagtttttcaacagttgttttaaatgagttagtactaaaacatgcgtttttaacaagagtgaaaacatcctagatgtttttcacgcagtgtttgtggccctccagaactcagcagtacttagcacatttttttctctcatcagagagaaactggtttatttcaattaattaactagaacttaaattttttgtgttctttttttgagacggaatttcgctcgtcttccaggctggagtgcaatggcgtgatctcggctcactgcaacctccgcctcccaggttcaagcgattctcttgcctcagcctcccgagtagctgggattacagtcatgcgccaccacgcctggctaattttgtatttttagtagagacggggtttctccatgttggtcaggctggtcttgaactcccgacctcaggtgatccgcccacctgggcctcccaaagtgctgggattacaggcgtgagcaaccgcgcccggccctagaacttaatttttttcttagggtgtgacaatgaaaaaagattgagaaatattgatttaaagcacttaatgcctggtacatagaacacctgtatgtttgtacttatttaaatcctttttctcccattatgtacttcaactctcttgtgttcctggaattagaatgaagaatccctccattgttggagtcctgtgcacagattcacaaggacttaatctgggttgtaagtatctctcataccaactatttgatgaattgcatagcatctgatgttgacttggagcctagcgtgctattattttctagcttttatttcctgttaccttgccaggtctttctgagtttgagagtagagattatctccaaataacagtatcagaaaattgaaacttttcagttggtatttatgaaggaagatgttccttgcagtcctataacaataaatagttgtctctactaaaaataatatttgaatcattttaaattgagtctagaaaggacttcagataataacagctgttaaccatttattgaatgtatgccatatgctgagactgctaggctctaaatacattatctttaattttcacaacaacccggcaaggtgggtggtgtacaattttgaagctcaactacactaaacaagaagtgaataggcagtaaaatgggatttcagtgttggacatacctggtctcaatcccttgctctttcatttgttagtagtgtgaacgtggaccaaaaaactaccttttaggccctcattttcttcactgggttgttatttgataatggtaataatcatagaattatatttattgagctgttatgtgccaagcaccattgtaagtgctttacatatactcttttattcctcataacaacccagtgaggtagaaaaagaaattgagggaccaggtgcagtgtctcacgcctgtaatcccagcactttgggagaccaaggtgggcagatcacttgagcccaggagttcaagaccagcctgtgcaacacagtgagaccccccatctctatttttacaataaacatatatatatgtttttaaaatttaaaaaaagaggccggatgcggtggctcacacctgtgatcccagcactttgggaggcggaggcgggtggatcacctgaggtcaggagttcgagactagcctggccaacatggtgaaaccacatctctactaaaaatgcaaaaaaaaattagccaggcatggtagcaggtgctagtaatcccagctactcgggaggctgaggcaggagaatcgcttgaacctgggaggcagaggttgcagtaagccgagattgcaccattgcactccagcctggatgacaagagcgagactctgtctcaaaaaataaaaaaagaaactgagacacagaggttaaataacttgcctgaggtcatgcagctagtaagtcgttaagctaggatttttgtctggccctgaggcctcttaatcacttttttttttttttttttgagacgaaatcttgctctgtcgcccaggctagagtgcagtggcacgatcttggctcactgcaacctccatttcccaggttcaggcaattctcctgcctcagcctcctgagtagctgggattacaggcgcctgccaccacgcccagataatttttgtatttttagtagatacagggtttcactatgttggccaggctggtctcgaactccttatctcaggtgatccacccacctccgcctcccaaagtgcgggattacaggaatgagccactacacccggcctaatcacgatattttaaggttatataatatgtataaaatgcttacatagaactgagacataatacttaataaatggtagcaattacacatgaggaaataagtttggaaaggtaaataagtaaagcattcagttaattagtgacaactagtaaacccaagacttgttgctcctaatgcaggaatgtttaaagctctgaatttttgctggaagggtaactgaaagaggtaatcggtgtaactcagttatgtttaacatgcagatcagtcatttgggagaaaaagggtaaatttttggaagcatttgctaggcttactaatggaaagactgaaattcaggtatggaaatctaaaactaaatgagttccttcaagaaaccttcaaggctcaaacgtcggcatcggatctggtcaaaatgttttgtatagtaatagtacatccaaatgctctgccatagtggcatgtctattacctgatttggtttcaggtacagttaactttgtgttgcctttatatacagaaatatattgtaaagtacacttagtaattaattttcgtacctagaatttataggtacttttgtacccgagatttagttactataatatatacagactaatacagacattaataaaaagacaattctgtagacattttaaaacagccagctagcttattttagcagaaatactctatgagcaatcaggtgacatatatcatctctattttccaggccgcgggaccctgtcagatgagcatgctggagtgatatctgttctagcccagcaagcagctaagctaacctctgaccccactgatattcctgtggtgtgtctagaatcagataatgggtgagtagatttcagcagatcctttcctttttgttcagaaaaattcctggtaaaattggcgggggccggccctgtgttcatcagtgattccttattcagactactttgggaaaagttcttaatcttttgaatcacaggaacagacaagttgatccctaaagctaatgtgctctcaggccacaatgctatttaaatgaagaataagaattggcagaagctatcagtttaccaacaaaaagaaagtaacaaatagcacaaaggaaaactaatcagagaataaaaattactttttttttttttctttttgaggcagggtgttgctctggcaccaggctggagtacagtggtgtgatcatgggtcactgtgacttcaaccccaccgggctcaagcgattcacccaactcagcctcccgagttgtagctgagactacaggtgtacactaccacacccagctaatttttgtatttttttgtagagatgaggtttcaccatgtttcccaggctggtctcgaactcctgggctccagtaatttgcccgcctcagcctcccaaagtgctgggattacaggaatgagtcactgcacccagccaaaaattacttctaaagcaataaaattactaaagatattccaagtgatggtcctcagaataatatgtgaaaaaaagtatatatatacaactgctactatcacagccttgtaaaaagaaaaaacatacagtcatgcattgcttaacaatggggatatgttctgagaaatgtgtcaggcagttttgttgtatgaacatcatagagtgtacttaaacctaggtggtacaccctattacacacctaggctgtattgctcttagactacaaagatttgtagcctaaataatgtaggcagttataacagtggtatttatgtatctaaacgtagagaagatacagtaaaagtatggtatagggaaattttttaaaaggtatatctgaatagggcacttaccataatggagcttacaacactggaagttgctctgagtgagtcaataaaactttttgactttataataacacttaaaacagttgtacagctgtacaaaaattctttttttaaacttttttactttttagacttttttgttaaaagcaaagaagaaacacacattagcctaggcctgcacagggtcaggatcatcaatatcactggcttctatctccacatcttctcccactggaaggtcatccagggcagtaacatgcatggagttgtcatctcctgtaatgatgataccttctggaatacctcctaaaggacctgtctgaggctgttttatagttaaccttgtcttaataagtaggagtagtatactctaaaataatgataaaaagtaggcccggcatggtggctcacacttgtaatcccagcactttgggaggccaaggcgggcagatcacttgaggtaaggagtgtgagacagcctaaccaacatggtgaaaccctgtctctactaaaaatacaaaaattaggcatggtggcaggcacctgtaatcctagctactcaggaggctgaggcaggagaattgcttgaacccgggaggcagaggttgcagtgagctgagatcacgccactgccctccagcctgggcaacagagcaagactccgtctcaaaaaaaagaaaaaaagtatagtaaatacataaaccatagcatagtcatttattattatcaagcgttacgtactgtacataattgtatgtgctatactttttatgactggcagcacaatttgtttacaccagcattaccacaaacatgtgagtagtgtgttgtgctatgtgatgctgggacggttaaaaggtcactaggcaataggaatttttcagttccattataatcttacgggaccaccatcatatgtagggtccactgttgactgaagcattgttatgcagcacatgactgtatcatatacatgcaaagaaaacaaagaccagtaaagccttttttttgtagttccagctactgaggtggctgaagcaggattgcttgagcccaggagtttgaggccagcttgggcaacatagcaagacagtgcctaaaaaaccgaaacaaagaaccagggaaatattaacagtggttgtctgtgtgtagtaggattaaggattcatttcgtgttcacatgctatatgtttatgtatttcccaaatgttttgttatgtttaaatattgcttttatacgtagaaacaattacattattttaaatattgtatcctaaagcaaacaacatctttaatcttgcagtgaagtcccactgattacgttttactgaatattttcttcctgcatttcaggaacattatgatccagaaacacgatggcatcacggtggcagtgcacaaaatggcctcttgatgctcatatctgttcttcagcagcctgtcataggaactggatcctacctatgttaattaccttatagaactactaaagttccagtagttaggccattcatttaatgtgcattaggcacttttctgtttatttaagagtcaattgctttctaatgctctatggaccgactatcaagatattagtaagaaaggatcatgttttgaagcagcaggtccaggtcactttgtatatagaattttgctgtattcaataaatctgtttggagga

SEQ ID NO: 33 - DNA, 32742 bp, Homo sapiens
  source 1..32742: mol_type = other DNA
cgttgggaagttgggagggaggtgcgcgcttggccgcgcggggcggggcctctaccggcccgatggagcgcgcgggcgctactagccgcgggggccaagcgcctggcttcttactgcggcttcatactgagggccgagccgaggcggcgcgggtgcaggagcaggacttacggcagtgggggctgacaggtgagcgggctccgggcggacttcggccaggcgggccaacctattgggactgcctcttgcgggccgggggcgcagcgggtgggccgcccggtgggcagtttacccgcccgcgccagggccttccttcgctcctgccgtgggcggagagaaactgcgcccgggcttggtggccacggcccccgcctgcgcggcgcgcggggccggcggacgccagatgaatgaggtcgcgggcccggtagccaggcctggcccctggcctgtggaggggaaacgtggtgagatcagcgccacctgcaggcctccgctgaagagttggacggcctggtgcaccaaggatgtaggtttccagttgctgttccggtgggtttgggtcccggcctggggagtttattggttgcttctgtaaaacgatcaactcatctcccagcttcagcttctccgtttactgtgcgcgcgcagttattggagaattcgccacggattaattctccggatcgagttacgtgcggtagtgagcggacaaactcaagcaaagcactgtttatgaagctatttttgtgtcttgagtcattcataaatactgactgaaccacgtactatatgccaacttagcttgtccgctcaccaccgcacgtaactcgatttattgacactagcccttacggagagtctgcaaagcgcgaaccttgcatgccccccagccctgccgctgcatggctgaccatacttcctgcagctccgagaccccgctctcctcctgggtctgcgctgactcgccgctgaaccgccccagcctcgttttccttacttataagttgggaacgtagtgtgtgctttgactgtattgacagaatcatgcatcagtaataatacagtcgtttattcattacttattgaatgctactgggagcgtattcttaggcattggctacaaagatgagcaaaacaaatagggacccttcctacctagagttttagactagtgagagtgcatttaaaagtataaactaatttatttaagtgctcagtaccacgaaagagtaaggtttgtcattctaggaatgaaacaaaaggtgcaattctgtgttcagcttagaagactgaaagatgaagttgaatggagaggacgctgacatgaaagagaaagacctctctccttgattccctgagtctgtaagaatgtgtggctgtaaggagtatgtatccagttttaagtatgagcttgtagactggtctttttatgtttgactttatcttaacgaaagtttatgtttgtgggtttgcctatttccttgcaagtgttgggaatggttctttaagaacttgtgtgagagagggctcagaaaagtgtgccagttgatacttagctgtggataatatgccaggagaaacgtacatatgggcaagtgttttagtgaaaatgaggagacaagaggttgcaagtttgagtggatggaatggagtgagtaaattcagaattaagtaggcaaatgtggcaacttggataaattggtagtggagaaggaaaatagaaaagcagagtcaaaggaatggctactgaatattataacttgtaatttctatttctgtttaccagaataaactagtgttatgagaaactattcttcatgagttggttaaaaaaattcttactactttttttttcgtttggttacagaagtagtacgtattttcagtaaaacattcagggaaatagcctatgcataaagaaaataaatattaatctccataatctccttactgttaacatgttctctatcctgtataatttcttttactttctggtggagggggaaggtgaaaaatggagtttcatgtacatttttttgggaaatcataactttttttccttatcattcagtcttcttcaacatcattcttaatggttacagtttttcagtatatggatgtaccatagtttagacagtccctcttcttggtatttaggttctttttttttgctattgtaagtaacataaatatccttgtaaccaaatatttattataggtatggacgtttaattcctgaaaggtaccatttctagaataaagagtatgcaaaatttttgcttatttctctatactctcagcaacactggtattttctaatttgagaagttaatatgctatcgtattgtttaatttaatgtttatttggttaccaatattgatggacatttggatattcatctttggatcatgaagttaccttaggacctttttgtttctggaatatgcagacctattacttcttgctgttttgcttgctttttcactacttgtcatctccctgacagaagggcaaaagaatctacatctggaggttaaaaagctaaagactacctttcccagaccccactgtagtttggttgtaaacgtgacttggctttagccaggcacgtgactgggagatttggaaggggaaagtgaggggaaggacacagaggggtttggattttccgcttcccacttagctactacctcatgggtctctgggagggtacagagcattcattttgttatcatggattgtggctgcgttgataggtccctggggctgacagtaccgtggcctcctggttggttcctggcttccaggtcgtggaggtagatacttccttggtgtgtccatactgtggtgcttgatttagcagttgtacccagaagatcagcctagatgttactcctccaggcctttcgacaattttgtggtgatctaattccctgtattacattcctttctgcctaacctaccaagggtaatttctggtttttgctgttgactcctaagtgttaagtattgttatctttgtggatataattacatattatttttgaaaattcaactttttttttttttttgagataaggtctcactctgttgcccaggctggagtgcagtggcccattgcagcctcgacctgggcttcagtgatcctcccacctcagccttctgagtagctgggactacaggcatgagtcaccagttttaagaaataatacggaaggatcccatgtaacctttacccagtttcccctcgtggtcatatcttgcaatgtggcacattatcacattgtgtacacttgcaatgatggtacactatcacaacaggatattgacattggtacagtcaagatccagaacattttccatctccacaaggatccctcaacttgcactttgatagctacactcacctcccttctacctcaccaattccttaacccctggcaaccactaatctgttctccatttctataattttgtcactttgaaaatgataggtgagtaaaatcatacaatatgtagcctttggggactggctttttttcactcagagtaattctctggagattcatccaggtcgttgcacgtatcagtagtttctttttattgctgagtagtactccacagcacagtataccacagtttgtttcaccactcacccactgaaggatatctgagttgttcatagtttgtggctattgccaaaaaagaaaagaaagatattgtaaacatttgtatacagattttgtatgaaaataaatcttcatttctctgtaataaatgcctaggagtgctgtgagtgggtcatatggtagttgcatgtttagtttttaaagaagctgccaaactgtttccagagtagctgtactattttacattcccaccagcaatgtatgactgagtttggattctttgcatccttgccagcatttgatattgctacttttttatattgactattctaatgtatgtgaaatgctatctcattgtggcttagatatgaatttccctattggctaatgaaatatgtaacctctttgataaaatgtctttttctgtcttttgcccattttaaaataggatcctttgttgttgttgttttttcactgttgagttttgacatactctagtctttatataatctagatactaatattttctcagatatatgtcttacaaaagttttaaattttggctaaaatttatcagtttatcaattttttctcttatggatagttttcttgttgtttggtgtcaaatataagaactcattggctattcccagatcctaaagagttttttcctaaaagttttacagcttcttatttaagtccatgatctactttgagttaatttttgttgcacaaattttgatatgttgtattttcatttttatttagttcagtgtatttatttccctggagacttcctcttttgatggactgtttagaaagaagtgtgttgtctagtttccaagtgttgagagatttgcctctaatgtttctgtccatgaattctaattttattacattgtggtcagagaacatactctgtacaatttcagttcttttaaatgtgttggggttttctggccctgctttagtttggatatggattatctgtccccaccaaatatcatgttgaaatttgatccccagtgttggaggtggggcctaatgaaaggtgtttaggtcatgggggcaaatccttcctgaatagattaatgctctccctgagcagggagcagagagagtgactgacttcttacttactagcttccagaaagctggttgttaaaaagagcctggcatcccccacgcctttcttcctctctcaccatgtgatctctgtacatgccacccccacttccccttctgccattagtggaaacagtctgaagccctcacctgaagcagatgttggtgccatgcttcttgtacaatctgtagaaccatgagccaaataaacctctttttatttttaaattatccaacctcgagtattccatagcaacactaaatggactaagacaggccctgaatatgttgtatggtccatggcacttgaaaacaatgtgtattctcctgtctttgggtatcagcagagctgcattcctttctggaggctctaggggagaatatatttcccagcatccagaggctgcccagatcacttgactcctggcccctttcctccaacttcaaagccagaaacattgcatctctttgatccttctctagccagcttcctctctaaccacagctgttaaagtttctccgaatgatgcatgtgattagattgtatgtccattgcgttatccaggcccacctggataattcagggtactcttccatctcaagccccttaaccttgattatgtgttcagaatgccttttgccatataaggtcacatactcactgatgccaggatcagggcttggacatctttgtgagggccactattttgtctaccacttcttccttttacttttcacttatttaattatttttgggttgaatttcttgtagacaatttataattgggttatgtttaaaatccactctggaagtcttattttttttttttctttgagacggagtttcgctcttgttgcccaggctggagtgcaatggcacgatctcagctcaccgcaacctcctgcctcccaggttcaagtgattctcccacctcagcttcctgagtagctgggattacaggcatgagccaccatacccggctaattttgtatttttaatagagacggggtttctccatgttggtcaggctggtcttgaactccctacctcaggagatcctcccgcctcagcctcccaaagtgctgggattacaggtgtgagccactgtgcccagccaagtctttgtcttttaattggtatacttacaccatttatatttcaagtaattattactatgtttgagcttaactctgccatcttatttttattgtttttagtttatctctgtttctttttcttgccttcctgtgaattatttgaacattttttagaattttatttttgtttatttacagtgttttttagtttatctctttgtgtagctttttagtggtcgttacgggtattgtatgtaaatgtacgtatgtgtgtataaaatcacagactactgatattgtcattttacttatttgagtaaagtatggaaacattacttccctttatataaacattacttccctgtatatctatcttccctttgtatttatagctttactttttgtttataattgtcttaaatatttcctttagaaccacatcagacactgttataatctttgcttcagcggtcaaacataattttaaaaactcaagaaaaggaaaacctattgtatttacacgtttttgaatgctgcattctcaccttgatgttccaaggttccatcttttatcatttcctttttttccaagggcttcctttagccattctttgagggtaggtttgttgatgataaattctctttgttttccttcatctgagaatttcctcttcattcctgaataccatttttcttgattacaggagtctggattgacagttcttttctttcgatatttgaaacatgttgtggcatttctttctggcctttaagatttctgacaagaaatctgcttgcatttgaatagtttttcctctttaagtaaggtgttgtttgttttttttctggctgcatttaagatattttctttgtcttttgttttcagcattttaataattacatatcttggtgtgtatttttttttttttttttttttttgagatagagtctctctctgttgccaggctggagcgcagtggcgctatctcagctcgctgcaacctccgcctcctgggttcaagcaattttcgtgcctcagcctcccgagtagctgggactacaggcacccgccaccacgcccagctaatttttgtatttttagtagagatggggtttcaccatgttggccaggatggtctcaatctcttgacctcgtgatccgcctgcctcggcctcccaaagtgctgggattacaggcgtgagccaccgcgcccggcaatgttttgttatgtttgcggtttactcagtttcttgaaactgtagctctttagccagatttgggaagttttcagctattatttatttaagtactttttcagccctatcctccttcacctgtttttattggacaacattgaacaaatgttagatcttttgtggtagtcctgaaggtcccggagggtcatttgttttcagtctgctttctcttctgattgtaatctctctataacttctattctgtagagttcactgattctttcctcacttccttccattctgctgttgatcccatcaacagcatcagtagccttttattttggttatattatttttcagtttttaaaatttccctttggtctttatatcttttatttctttgctgaaatttctgtttcttacctgaggtttcctgtttttttcagttgttcaagtgcattcataactacttgttgaagcattttatcattactgctttaaggtctttgtcagataattctaccgtctgtgtcatctgggtgttggcacctattgattatcttttttcgttcagtttgaaatcttcccagttcttgatataatgaatgatttttataagaattggagccaggcattttttttaaatcatgtttaaacctcctgtttgactgtctttgtctgatgctgctctggcaggggaagagggtctgctgccttgttagtgccaggtggggatagaagtccaggctcccccttcagcctctgtccacatctggggattgggaaggggctcctccatcctgctgggtgagggtgggagttgtggctccctcctgagtctctactgatcctgcaggggaaagctaaggggtagggcctcgttattggttggtggggataaaaatcccagctccctacttggccttctcttataccatcctggctggggtgctggggcactcgttgtagctgtaggtagaagtctatgctttccacttagcctttgctggtgggaccacaggtttattcctgtggtgtttactagaatagagcagttattatataaaagtttcctgtcttgctaggctgccattttctagctggagcaggcttgtgaggggtgggggtggtatggtttggctgtgtccccaaccacatctcaccctgaattgtaataatctccacgtgtcaagggtggtgccaggtggagataattgaatcatggggtcagttcccccatattattctcatggtagtgaataaatctcacaagatctgatggttttataaatgggagttccctgcacaagctctcttgcctgctgccatgtaagatgtgactttgcccctcatttgccttccaccatgattgtgaggcctctccatccatgtggaattgtgagtcaattaaacctctttcctttataaattacccaatctcaggtattattagcagcatgagaagagactaatattgggaggtgttcttatttgttttggttttggtctacatcagttggtgtttccagttggctgatttcttgaactgtcagactgggatatataaagcaaaaataaattccagggaacttactaccctgccttccgcaggcccaaggtccctagccagtctgcttcttcactacacctttcagagttttatgcttgttttctgtagcatgtctagggtttttatttgtacttagcaagaggaataagggaaagtaagtatactcccatcagaaacagaaatctctgaattttctgattataaaatggggataatacctactccatagaatcattataagcattaaatgagatactgtaatttatttatttatttttattattatttttttgagacagtctcgctctgttgccaaggctgtagtgcagtggcgcgatctcggcttactacaacctccgcctcccgggttcaagcaattccccctgcctcagcctcccaagtagctaggattacaggtgcccgccactacacccagctaatttttgtattatttattagagacaggttttcaccatgttggccaggctggtcttgatcttctgacctcaggtgatctgcctgcctcagcctcccaaagtgctgggattacaggcgtgagatactgtaatttatgtaaagtgtttactactactctggtatttgtaagtgcctaagaaaaataacttattttttaaattttgtacaattatgtattttgaagatttttttaaaggtataagttaaaccagatagttatgtttttgctaatagttcttatataaagtatgtttaaggtctttcaccttcccaagatatggctattctttgaaattggatttttttcaccaagggaaagagaaaagagagtaagttccgtattaatttcacacgttttctgccatccctgtacacagttaaataccctttgtgaaacatcatttccattcttaaaaacagcgcttctgtgttgaagcattattcagtgtagtcctaagttttttcctttagcattgatggcatatttaaatgggtgcaattaaacaagcagacacatgtacaatccatgtgttgttgctctttgttaagttgcatcagtaatgcctcatttcccagaatggacactggtgtgagtctcaggcagtatagaggccagatcccaagttgactttctcatttatcaagtgaatcaggtaacaatgacaggctactttggggctttgaatataaaggtgaataagtctactcaaaaagtagtttggaagtcagcagatgtttagatatccataactcctcagcaaaagatacgtccagtgaggtttagggttatgtgaatttaggctgtgttcctcattcaaactcttagaacattgcctctgcatgtactgaaatgtctgctcttcggatttgctgtattttttgtttctagggattcacctacgctcttaccagctggagggagtaaactggctcgcccagcgcttccattgtcagaatggctgtatcctgggagatgagatgggcctggggaagacctgccaggtgtgttactatgcgacgagtactgctcaccgccactgcgatacttccttataactcattctggagctgagagctctggagctaaaacaaagctcagtttcacaaatgtccctgggatccaggctaactggctcttgcaccgggaaagggccttccctgtacagtcttctctgcctcagtcattgcagttcccctactgactttattcagggccagcaaatgctacttgtcctttctttggatgttcacatagctctgctttaagctctctaaaaagatatcacctccaaatttgttttgctaaaattttgtttagactttttgcatctatgttcatgaaagacattggtctgtaattttcttgtagtgtcattatctaattttagtattggggtaaagctggccttgtagaatgagttgagaagtatgcccttctcttccattttctggaagagtttatgtagaattgctgttaatttcttccttaaattcttgctagaattcactagtaactccacacttgttttgtagacacatctggtttatagtaataaaagataaactttctctaaattgcatcctcagggaaagctagactgaatggttttaattcaataagccacttattaaagaatggttcctggcacagcttgggctgagaagccatagataatttaaaaagaaaattatttctgttataaaaactacctaccaccctgtaatcaagcactctaaccataaccatgagttgcaatgcgtgttttgcatgattgaacttttgtttttgagacagggtcttgctctgtcacccaggctggaatgcagtggcatgatcttggctcactgcaacctctgcctcccaggctcaaggaatcctcagtctcctgagtagctgggactacaggcgcatgccaccatgcacagcttatttttaaatttttttgtagagatgaggtctcactatgttgcccaggctggccttgaacttatgggctcaagtgatcctcctgccttggcctcccaaagtgctgggattacaggcgtgagccactgcacccagcccatggttgaaattatagtgcgtatatagtttgtattttgttaatctaacagtgtcactgtaattttttacttcgttatattcttcacagtcattatcaacattgcataatattccatcaagagaatttataatttacttaaatgttctacagacgagaaatggtgattcctcccctttttgtgctgtttaatcttgataggaacatctttgtgcttgtagctttctcaggattttgaattatatccttaggacagatttttctcagaaatagctcagcatttgaagatggagtctcttgacacatttttgttttaaaataggttattttctctgtatattacagcaacattcaagtcataagtgtgtactagaatcttctgaagtatgcccatttgcctttaccaatatttccattttatacccttccttaagcttaggatcgtgtattgtctgttttccccgttagaatgtgtcctccaggagggctgggcgttttgtcggttctgttcactgttgtataactggagcataggacagtgcctagcaaatagaagacaccctgtaaatacatatggaagaaaggaagacagtaggggaaggtgggaggaagtgagggaggaaggaaagcatcctccctcactcgggaaagcctggcaggcagcagagggccaccatgcgattggccgtttttacagtcatatcttggcacttcttgcttaatgttttcagagtatcgcagatcttggccatcagttggattttcattgatttctattgtctttcctgactttttctttacagtagaggttcaattacctaaacattgagcctcattgcttgttaactactgaagtaattgagttccataaatttccgtgcaagtatattgaggcttacatgatttcgctctacgaatggattactcccctgatatgcggaagttcgtacaatatttctttgtaaaacaagtcttaaacaagagtgtgtgttccctacagggttgtgggaacttcatggttgtttctcatggggaaatgtgatcaaaactgcctttctttttctgtgttccagactattgctctcttcatttatttggcaggaagattaaatgatgaagggccatttctgattctttgtcccttgtctgttttgagcaactggaaagaagaaatgcagaggtacagagtagatgtagctgaaattttattgtttatcttgattaagattttttttctggatgatgtataaaatatgataaaacaacctattgtcgtaattagtaagtttattccagaaaactttgagctgatagagtgtaggtagacactgaggatataataggggaagagtaatattattactatttggcaatttaaaggtcagcaatcgtttgtagtaagtattgatgaacttagtagaagccattgttttttgtttgtttgttttgagacagagttttgctcttgttgcccaggctgaagtgcaatggcacgatcttggctcaccacaacttctgcctcccaggttcaagtgattctcctgcctcagcctcccaagtagctgagattacaggcgtgcgtcaccacacctggctaattttgtatttttagtagagaccgggtttctccatgttggtcaggctggtctcaaactcccgacctcatgtgatctgcccgccttagcttcccaaagtgctgggattacaggtgtgagccaccgcgcccggcctatttttcatagtgacgtaggaagtaactcatgtggaagagatcgttttatttttagagtcagcacaagacctttttagatctgatccctctacctgttcacataggaactcgctctgaggttcaaccatttttttagataagattcagagccccaagactctggttgtaggacctcatgagttctgtacattgcaatcctcccatgaaatgtaattttccagatatgcacatcctgtcacatggatctagtatttatgtttatctacttcttttcttggattcagatttgctccaggtctttcctgtgtaacatatgcaggcgacaaggaggaaagagcctgccttcagcaagacctgaaacaggagtcacgttttcatgtgctactgactacctatgaggtattcattcgtttctctatagcgagaactcctaacctgtgaccttagaagttgtagagtctgctgaaattatatttaagttttgttgagagcacacacttttctgggcagggagtctaccttcatcagattctcaaaagagggctgtaaccaaaagaagtgaaggatcattgtgcttcagattagttcgatcttttcctttcttggtggatcaagggggaaggcttctcaaggaagtggcacttgagctgcctcttggttgatgaacagaagtcaggcaggcaggcaggggaaagggttttgtggactgaggaatcacgtctgttactggaggataggaatggaagacagctccggccttattttaaatccttgtttttcagtctaagacagtgtgtgccactgaccttccacttaatcaggcttttctctttgtttttaagatggcgctacttagaaattattctcagaacttttttttacttagtgaacaaatgagacttagataaatcctatagtttaagagagttcacagaaaactagcttatcaatatcagagtttatcaatgccagcctttatacgtgtcttcctaatttttcagatttgcttgaaagatgcatcatttctaaaatcgtgagtaggttgtactatttaagaacttgggttgaatgtattatgaatgtcatgtctttccttcacgttttagtactttgcctctcctggcatgtctggtatgtcttccatgagttctgtttatgggtaggcggcatggtgggagtcctgtgtttacagtcctctactcattagctgtgtgtccttgggttagttatttaatctccatgaacttcagcttcttcatctgtaaaatgaggataattgtttcttacctcaaatagctgttacgaaaattaaatgagattaaatatactttgtatggttaatagatattaggctctttacatgcaacttgcatagacccctttcagtactaccatttggagagtttgctgtaatacagaaggagaaccatttgagctgtttgctggacataacctaaaatagcaatcagtgccgtggaattaactttttagaaagggagttttaagtgtacctctaattagttaacctcatattggcccatgaaatcagaaactcagcaataccacctaataatgggaatgataggatcatgtcaagataacagttacaatgcagattaaataagggctagagtttaggtaagaaagatatgttgacagggtttcattctctataacctctgtagttattacatggttaggtggatattctgtattttaatattcaaaaatctttgttttcaaagtattttatcaatattttaaatgttatttcttatccaggttcctgtgagctggatttctattttcatgttattttgaaatactagaggctaggtcatagatttcatgacttctatctagtatttcatttaagtgagcatattatcttatttttcttaagatatacattccctctctttttattattaatattcaacttaatatttgttgaaagtcagtcactggaaagacattgttctgagagttattggcaatatcaggaaagtaagtcatagagcttccctaagaagacaaactccagtggagggatgagaagtgtacagatatccataatacatagcaatatatgggaagtctcaaaagataataaaattgggacataaatgttgctgggtactttacataaattatcccatttaatcttcatgaaaaccccacgaggcagctattattcattttacgggtgaggaaaataagagatttggtaacccatccaaggttacattgctgatgataaatagcagagcagacatttaaacccagcatttggtgctgtggagcctctttttaagagaacttctcaaaatagctagttgtactggagttttacattattcagcagaaatagaatctttctatttcagatcatcggttttcagtgcattttcaggtagatttaaaaacctaagtaacagagggacatttataatgctgtcctgtagtatgaatcccaacaacatagatacattctttcaatatatttggaaggttatattgcttattgctgtattgtacattctgagaatagcagggaagtgtaatatcatctctgccctaaagagatttattatggagagttaaggctgtgcatgttacaaatatgaaaaatttgaaatgttttggacaatagacttgtaaaactctttggatcaagaggattagaagttacctcatccaactttccattcagtgctggatttcccccatcttttcctcttcaggggacatcatttagagtatcctttgataagtgatttgacctacttcctttcatgagccaaaatccaccactctgtagcctgtttcactgaacaagcattttttggacacctaaatgtctagttcttcacaagggaataggacctaatctgttttgaaagctaattcagacagagccaggcaccatcctagagaaacttccataccttatctcatgaccactgtgcaacttcaactggacctttgtttcttgtcatccttaaatgcatcctctgctcatgccacccaaccttctccttcgacttcctgcactctctttggaccctcagtcctccctctactcgcttctctcagtaggtgaatggtaatgtcatagggacctctgttcctctgcctgtcctctggagtttctctgtagcctcaggaagagggcctcctccttgtaaggtgaacctctgctcaagatctttctctaattttggaggaattttcctttccatacctactatttttccagtgttctgttttacctgtatatacatttagttttttaaatatgaaaataatgtaatgggattccagaatgtttataatcaaaataaaaagttaaacatcttataattttcactttattatcttttgcatggctttcacatttgtaaaagaggatacatgatatttatatcttttttattattctataggccttttaaattgcaacataatcatatttattatttaaaatgccatgtaatattttactacctattattggacatttaggttattttccattttttgctgttttaaataatacaacttgaaacattcccacatatatctttttctgtattttgaatttttcttaaatagcttctcagtagtatctgtcaaagtatttgcttttatgactgaaacttcttgagaaattgctgatgtgacacagtatgctacaaaatgtgctctggcaacagccactaatgacttccatgtcaacaaattcagtggatatatcttcctggacatctctgtgagatttgactctgctcaccacttacccattttaaagtcacacttcttaagttcctacaacaccactgtctatcttgatttttttcttctgtttgaacatcagctctgtctttatgaccttcaccaagtcacctaacctttctgagctttagtgtctttattagtaaaatgagcacaattgtctgcttgctatactcttttagactaaataacacataaagccctgaggttagtgtctggcacaaagtaggagatcataaatgtttccttttcctttctgtctctggcttcttcctttctgcataggtctttcccattttgttaaaaaaaaaaatcccttggttttactaccttatccagatattgtattatgcacatgtagcctctcaggaaggtaatttggtggcatttgtaatagaaggggcttactgttaagtctttttaataacagtcacagttttgtagtaagacttttgattgtgaaatatgtgtttaaattacacaaaactgaaagcttgggttttctctcacagattcccttggagtgttcttgttgtggatgaagctcacaggttgaaaaaccaaagctccctgctgcataagaccttgtcagaggtaaacttacagtgtagccttagtttttatataaccccttctttttaaatatacattatattttagagtaattttagattcacaacaaaattgaacagaaactacagatgtttcccatgcatatgtccccacacatgtacagctgtcccctgtccccacacttgtacagcttcacccattatcaacataccccaccagagtggcacagttgttgcaactgatgaacctacattgatacatcgctatcacccaaagtccatagtttacattcgggttcactcttggtggtgtgcattctgtaggtttggacaaatgtacaataccatgatatctactgttatagtatcatacagagtagtttcactgccctaaaaatcctctgtgctccacatattcatcttttcttcgtaactccctttaaaaaatactagtttaggcctatatagagtcaattaaattgaaaccttttttcgagttcgatttctgcagggctaaatgaacattttatagaagacagaagaagtactaaatatggcctaacttcttctttcttttatattggagataggtttactaatatctggtgaataagaaccctaccccaatagaatgcattttatttcagatgtttcaactctcttttgattatcttcaaagggacaatttctcttaaaaaatcttattataattcttctttgtgcaatagtagatatatcagacatgttgtacccttccccccaatttacctgttgaaaaaatttgatagttcacctgggttcatgaagagaccaattacatgctattgaatattacctccagtttgtcttgtctttgtcctacttttgagcataatacacttgctttcattcctttctctggatctcttgcatcattctggcaaagtagatgagaaataccattgtaccctagatgggcccttttttccgaggagtcagtgcgatgtgaaataccctttttattgacctggtaaagatttgttcattgatgagaccacatatgttaatttctgtgatgataattgaagtttggtccttgtcctataataaaccaattaataaatttagaggtcacttggaggaaagtcttagatatgaattctatttttactggtctgaaagttgtagtttttagagtcttaatgtagatacgatcactgtgtattattagcccagtctcaaaggtcgctgtcccctggtggggccccctctatccctggtgtcctttgctttctttgtagggacttttaacagtatctccttctgagagcttgtcttggtctgtttttcacagactgggtaattcatatgagcagaaatttatttatcaccgttctagaggctgggaagtccaagatcaaggtgccagcatttggcaagagccttcttaactgcatcctcacatgacagaaggtggacgggcaagagggagcagaagagcaagctatccaaatgctgcatgacacttttttttttttttaatatataaaggccttaatcttattcacgagggaaaagttcttatgaactaaccacctgttaaaggcgctacctcttaataatattacattgacaacacctgaattttgaaggaaacacattcaatccatagcagttgtcatatcctggcatctaaccttatgaaagatggcttcataaactactgtgccagtttactaatttaaaacgggaggagagaagcaggcatagtaaaagaacctggatttggagtgggaaagctaagttctgttgctggccccagagccttttcttgttattcataaggaaactaaggctcagggattaagtgaagaaatggttctgggtcatctaagcattcctttttagatgaagcttgggttgcagataactagttggaaagaaaatacatgtatttattgggctgagatggggagggggatactgccgttttttatttccccctaatattgttttcagtttataaaagttggacgcaaccagccgggcgcagtggctcacgcctgtaatcccagcactttgggaggctgagatgggtggatgacgaggtcaggagatcaagaccatcctggctaatacggtgaaaccccgtctctactaaaaaattcaaaaaattagctgggcgtggtggtgggcgcctgtagtcccagctacttgggaggctgaggcaggagaatggcgtaaacctgagagatggagctggcagtgagccgagattgcgccactgcactccagcctgggcgacagagcgagactctgtctcaaaaaaaaaaaaaaaaaatagttggaagcaacctaaatgtaaaatatagggaattggttgtacaatttatgcgacattcatgcagtgcatttgcaaaaggtaaggctaccaagaacaattatgtagaagaatatttaataacatggaaaatgtttgcaaagtattttatacacacacaaaaaagcttacaaaatactatttacaaacagagatggtctctgaatctttacccagttataaattttgatcccaaaatggacctaactgaatcaaaatgttaatttgtgtcatagggtaagttacctgtagcgactagcagccttggtttcctttgtgacctcacagccttcattcacctcagctctttacttggtgaacacatattgtaagaatgtgaactgatgattggaaacattacttttgacaagttcccatacttgaaatactacaaaaacatcacctaacaagcagaacaaccatgaatgggtagacattgattagacatttaaaaagaaacaaataaaaaagggagatggcaaaaaaaaaaattgtttacatctgttttcattgattgtgttattcatttatcattttttgtattataaaagcagtgtcttcctatggccccccctccaaatcaaaatatagaaagacaagaagaaaaggaaaacatcccagtaatcctactcctacattaacactttaatggtttaatggtgtatgtgctgccataatctttgctgtgtgtatacattcaaaaagtaatgtatatatgcatatatattatttaaaaagtcaaaatgtatattaaatatcaaaatattgtgtatatacgtgtatacatacacgtatgtaaatgtgtatatacatatgtatgtatgtgcatagatacacttacatacatacatatgtatatatacgtttacatactatgttttgacatttaaaacaggctgtaattacaggctcacacctgtaatcctagcactttgggaggccgaggcaggaagatcacttgaacccaggagttcaaaagcagcctgggcaacatagtgagaccttgtcgctataagaaaatttaagaaattagctgaatgtggtggtgagtgtgtgtagctccagctactggggaggctgaagtgggaagatcacttgaaccgggaggaggaggttacagtgagccgagatcatgcctctgtactccagcgtgggtgacagagcaagaccctgtctcaaaaaaaaaaaaaaaaaagatatacatacacaagatgtcaagatatggcttcctcattttgatgtattgtttaattctactaagttcttgtgaatgtcagtttagagaatatcttttgcttgacctaatatcttttcttctttttcctgaccttctacttcatgtctctcttactcttggtgttcttctctgttgttcaaaatttaaggacattttttttccatttgagattctctgtgatctccagagacaccagaaccttcctaaccttctacttcatgtctctcttactcttggtgttcttctctgttgttcgaaatttaaggactttttttttccatttgagattctctgtgatcaccagaaacatccagaaatcttgacatcttgcatcttggtgttcttctttgttgttgaaaatttaaggaaattttttttccatttaagattctctgtggtgctgtgtccagaaacatccagaaatcttgacatcttgcatctgatgcaccattaaattttataaaaggaaagtctcctattataaatcttgcttattgcttgcagtggtggggcctgatgctgtagcgttggattctcaaactgcatgagcatgtgcattgtgtctcagatacctcagtagactccccgacacaggcagtaacacatagtttgaatccccatctaaattcagtaataacagccatattaaattctcatgcaatacttcagagttcacaaagtgttactacatccttatataagtgttttcttcacaggattattgtccccttcttatagttgaaactgaagaggtattatttcatctgcatcaaacagctagtttgcagcttcaacctgagccatctgatttcatgtcccctcagtcatttcattaaatcatgcctctctctgtgtgggtaaaggttgtgatgggtaactcagccttgcattccagtgttatggaatttttattttatttatttatgtatttgagttctcagtagtcttcagtctcctgttgaccggaactcccatccagaacagcctccaagagctctactccctcctcagttttgtggagcctgatctcttttccaaggaagaggtgggagattttattcaacgctaccaggatattgagaaagaatctgagtcaggcaagttcctttcctgcaaatcatccccaagaagccttggcacagaaaccatcctcatgcataatggttataggtagaaaagaaggagaattgatgaccagaggacaccttccagggagacagaccgctgatattagggagatgttaagtcacacatgttgttcccagttgtctgctgttcatgcctctcttaattgtttgctatttgattctgcagtagggcttctttagttcatttttggaagaaatagaaagtgcctgctgatttgcagacttttttttccaacttgtaatttctataaaggctttgttaactttataagtcacttcctgagggagaaaagaatgtgggtgctgtagtcccaaactactgttcagcatactacagcactggtatttcttttaatgctgcaccaaaaccagaattctgggatgggaacccttcctcattcatacagccaagagttgtagtcttctgttcttgtacctttgcccctctgtgttgtaggattatccatctatccctgtgatattatcctgggatgatttttcaaaacaggtaggaggtatgccaactaatgagtttgtatgtgttgggtaagtatgagtttgagggggcttctcatagcaaaaatctccagaccatagactgaagatcacctggcgaacctgctctgattactcccatgttttgggttacctgacaaaatataagacttctagtcaaatgcatgacatacttgtattacatgggacacacttgtgttaaaaagttattcattatttatttgaaattcaagtttaactgggcatctgtatttccatttgcatatctggcaatcctacaggtagtataattctaatttagaataatttttgaaattcaagacatctggggaaagaagggattttaagtcaaagagccaaatttgaatgctggccacattcacatccagctgtgtgactttggataagttgcctaatttctgagcctcacttaacttagctataaaaatggggacagtattcctcacttgaaatttctaagctgttatgctgatcaatgagattaaacgcaaaaatattctggaaacaaaacagctttgtgcaaatgagataagaagttatttgagtgttcctcgttcttgggctaagaacaagtcatgattccagaaaaaagatgatcccaatgaaggaagaaatactataaaaaaatgatcatactggcctagaatgcaaaataagcgtgaaataagaaacaaaaataaatttctttaagttctctagggttcattgccttggttctacttttgtcccacacttcttgtatttttttttcttatgtagcaagtgaactgcacaaactcttgcagccatttctgctgaggcgagtgaaagctgaggtagctacagagcttcccaagaagacagaagtagtgatataccatggcatgtcagcattgcagaagaaatactacaaggccattttgatgaaagacctaggtaatcagagggcacttgtccatttagaaactaaatgaggatgtgatttcaggtagtaaaatattttataatcacactcatttgtatgatcccaagaatatgggatggaattttgtattctgaataattctggtcggctacagtgggactgtggcagagcatcttaaagataacagccttggttgttgcagttgtgaaatttccttttctcccctcactcagtttttcttagtgcctgtaattaagcaaacacttccaggtgtcccagtcatgtctttcatcctcccaccctgtcagatacggtagtccaccctcattcacagttttgctttccagggtttcagttctgcactgaactgcagtctgaaaatattaaatgaagattccaaaaataattcataaattttaaatcaaactctgttgttagtagcatgatgaaatctcactctgttccacccaggacatgaatcctccttttgttctgcgtatccacgccgtcagcgttagtagcctgctctgtcatcagtccaatagtcatggtatcacagtgcttttgttcaactgatctttattttacttaaaaatggccccaaagcacaagagtagtgatgcctgcattttggatattctaaagaagccataaagtgcttcctttaagcaaaaaaggttaaagttctcaataaaaaaatgaaaaacaattatatgctgagattggtaagaacaaatcttctgtctgtgacattgtgaatagaatattgttataattgttgtattttattatgagacgttaatattttactgtgccaaattaaactttatcataggtatgtatgtatgggaaaaaacacagaatacatatagggtttggtactatccatggtttccaatatccactgggggttttggaacatattccccatgggtaagggggaactgctgtatttaagagagtgcaaaacttttttgttgaatcaaattcactgggaggaattggaagtgacaagggaaagatagtgaaataatttctcaaattgcacttttttgtcccttgactccacaacaacagttaaagaaaatttagaatttgcaaaagagtaacagagtacttctgagttctatttacagttgagggtctttcttaaaacaaaatggttgagaaaattttatgtgaacatgctgttaattctcaatacaattcagtgaaatttgggaggttagtataggttcaaaggatataattgaaatgattaaggttacttgtaaaaactcagggttttggtttctgttttgttcagtaggccatctctttctgtctctctctttttttttaaatttcagatgcatttgaaaatgagacggcaaagaaagttaaactacagaacattttgtcccagcttcgaaagtgtgtggatcacccatatttgtttgatggtgagacagtgccttttccccccacattattctttggtaatgtttctgtggccaaatcataccaaaattcttcaaaataattgcatatacttactttgtttactttgtttattctcaatttctctgtattggtattaactcatatattcatgttcagatatcttcagttgtcccggtaatatcccttctggctatatttttctttttttgttaaatccacgatccagtcctagatcctgcagaccctgcattgcatttgccatgtctctttattcttctataatctagaaacattcttcagcgttttttttctttcattacatgaagagtcaagaccagtggttttgtggaatgcatgataatctgggttcttaaaaatcatttcttcttgattagatttcccattgtcttgaattgactcagtcagcctttcctcaccgctactccaggttcactaatgatctccctgttgcccaaccaatggttatttgttagttcacatttcagttaccctctcagaagcctttggcacagctaatcacttctttcttgaagcactttcgtccctcagcttctgggatatactttctcttctccatctgctccttctcagtctcctttgttgcttccccttcatcatacagacctcagtaaattttcccctgggcaccgctttagctgcatcctaggaattttgatgtgtggtgtttttgtttttcttcatactggggcttttttgattccctgattggtaacccttggagcaagcactcctgtggccatggagactctagataggatcagtacagagggcttgctgcagtcattttaagggaatctctgccaaatagtgctaagaactgtttaaagattgcacaaaatctcaagtaggtgcatatgagaactttttttaagaggagggggtgttgggaacacataggttttgaaagaagtcctccaggttattctgactgccattttgacttattttatagagtgagtctcgatttcagttttgggtctccttgacctttagcatcttcttctgtctcagtttcctgaagagtggttttattccttacacagatgtttattaggcttgttggatgtgctaggctgtgtaattggtgttaagcaggactgagatcatcatgcaaacaactacttatatgatgagcttttggcttctcttcctgtagcctagctactggcttctgcccttactgagggcacattactgggagtgggttctttcttttctaggtgtggagccggagccttttgaagttggagaccacctgactgaggctagtgggaagcttcacctgctggataagctactagcattcctgtattctgggtaggtggtaggttcacatttgctgctctgagctaatggctgttaaaacctgactattgaggaactcactgagttgttcaggccaattccagttttctttttttttcttaacactgattcaggttctgccttctctgtgactacactcccaccccattctatcccactccaccccttccacaatcattctttcgtttcctgaatttgtacagcacttataatcctaatccagcacttggcaatgtgctgccgtaatctgctgtctgattaactggtgtttatgtttaccattatcattccaactatatattgtttggctctacaaggacagagacaacactgagcatttcttttatagttgcctgctagtaacttggcattgaattgacacataatgaaggctcagtaaacattcatttttgttaacctgtggggtttgatttaaactcaaggggaacttgaaggactctttctcagggacatgagttgcgcattagaagacgaggttcagagccaggcactgtggctcgcgcctgtaatcccaatactttgggaggctgaggtgggcggatcatgaggtcaagagatcgagaccatcttggccaacatggtgaaaccctgtctctactaaaaatgcaaaaattagccgggtgtggtggcaggcgcctgtagtcccagctacttgggaggctgaggcaggagaatcactggaaccctagaggcagaggttgcagtgagccaagatcatgccactgcactccagcctggtgacagagcgaggctccatctcaaaaaaaaaaaaaaaaaaaagaccaggttcagttagtgttcaacagccatgtgttcagcttatacctaatcctcctagtcaccagagttctctctttctagaggagtctaggaaaagcccagattcccatgggtttcaaaattatccctttggaatgactgtcttaggtatggcctgaactaatctaaaacttcagatttggcaaaattgctcaactttaggaatgtgcaagttaaataatttcatgtcttactgtatttcattggttctcgtatatctgccataagtatgttagagttggagaaggacctataaatgccttctggccagttttttatttcacagacccagaaaggttatatgacttgcccaaggtcacacagccaacaaatggcagaaatgagattagaattgaggttttcaggttcattgctttctctacccatttggggcttgaatcttgaaagagttccccataatttttcctcttacacttgttgcaagctcagattaaataagtttttataatgagaatattgttttgacagtgctgtgcttctttgtttatgcaaatttaaaataacagccagtaacaagggactctaggcttgactttgttcttgacttactccatcattttgccgcctttcttccctcctctcgctatacaaaaattttctcgtgttatggaaaatgagacatcacttaccccttgcttctctaaagtaatgcttctcagacttttcaacccatatagctgtagatgagaggatagtgactttacacccccaaacagggcatagttgtagatgactgaccacaggctttcttcagagtctccagtttttcttttcttttttttttgtgtgtgtatttgaattttgcattttactcttcacatatctgtatttattttgctactaaaatgaaagcttatatttctttccattgagcaaattgacattccagaaagaggcaccttgtttattctagggcttatatcccctgttgcattgacacgtcccctgggaataatctccactctagtttgaggatgactgctctgagggatacagctacctgtggaggtgtattctcatagaaagcatttggaggttctgaggcagtctataaatcatacgacacttatatttctactttggtatttatttataaacttttattgtttggtaaattttgcctgagggaaattgaccttaaataccactagacttggcagtgtttccttttctttttcttgccaggggccatcgggttttacttttctcccaaatgacccagatgttggatattctccaagactatatggattacagaggtgacaccttttggccactacattacctaaggctctgttagacttaacagtccagataggtccatgaagaataatatgggatatgagaatattacaaaggaaagcagggtgagaacattattcagaaccaaaaaatcaaaaggcgagaggagagtgatgtgtgaaggcaaggatggacagcagagaacaggcacgtgggcagaaataaacacccacgttcccatcagttacatgatttaaaattatgggccgtggagcaaatgttgtggaaatgtttttgaaaatgtgtgataaagtttcagtgactagagcttttagcgtcttgtaacattcacctcaacagttgagcacttactcatgatcagtgaaaaggtgaacattgaaattatagagataacaaataagccaggggaaaagtaagagcaactttttctgcatagacaataaagaatgtaggttattacctgggaagtctgtttaatatgtaataagatttgtgtgagatgatgagaaaaggctctaacatgagttgatcttgagcccaatgttgaacagctccagaccttacaatttaaaaaagtagttcagaccgggtgtctgagttccgcagtatacctggtccagtggacacttgcagaatgccgttggcacatgccactggccattgaggggtccccagatgcataaacagcctgatcctgtagctccccttccccacacggatgcatggaggcaggtggcgaactctaaagcctcactgaaaggcagattgctggactgttagaaggggctcactcacctgcctccaagcgcttgtcttctgtttacataagaattacatctcagcaaagttgaaactatcacacaggatagatgctcagggttgcttgagaatagtcaaaactgagtattaacttcataagtgccaaagacttcaactgcatatatttaaaaaatccagaggagtatgttatggtgagttattttgtaaaatgataattgtccctgttaatttaaatttttccctttgggatttgcttaaagtagggctgtgcctgtatatggaaagggacaaaattggcctttggttttgggcttaattttttattccccaaagactacttgaaaagggttaagatttctgtttttcttcctctctgtaaaggctacagctatgagcgtgtggatggttctgtgagaggagaagagagacacttggccattaagaactttggacagcagcccattttcgtttttctcctgagtactagggcaggtaggctgcaaaggcattgatggaaacagacaaatgagggataatagagtactattacatcccaacggttagtacacttttttccttaattctctgaaaggtgaggttactattgaatgtaaaacaaggtactggacatcaagcatggtgctgttttctatccagcctgtccaaactgtcatctcagcaaagaagtaaggctgaaacctggggttattggaaagtaattctaatctgctttgaccattgacctgggaatgtcctgaaagatttatgtgattttgtggaatgtttcatttacattcagtggaagtagctcttcttcccaaccgtgaatttgggaaataaggtaacagtttgtctactagttgtccttcctctataagtatttctggaatagtgctgaaaagcttaacaaaaatctagttgttaaaaaatgtgattatgttgaaaataccaactttttagaattatttatgacatcatccatatatgatttaaatcgtgaatattacgacatttgtaatgctttaccagttacagagtgctttcatttactgttacataatttgaaatcagctcttggagatgaaatgattctctaagtcattgtggtgtctggaaaaaaaaaaaaaaaaaggccggcacggtggcccatgcctgtaatcccagcactttgggaggctgaggtgggtggatcactggaggtgaggagtttgagaccagcctggccaacatggtgaaaccccgtctctacttaaaaaaatacaaaacttagctggatgtagtggtgcgtgcctgtaatcccaactactacggaggctgaggcaggagaaccgctggaatccaggaggcggaggttgcagtgagccaagattgcaccactgcattccagcctaagaaatttttctcaggtcctggagcaagctgaccttagttttcaactcataggatcctagtttcattatcttatttttgtagacataaatcttgatggagtacatgcaggaacatgaaagagatgtgtgtcctctattaaagacagattgacatttttctaaaaagagagttcagtcttatttagaaagctttctaaatgcctgctgctataagggtatatgaaagaagtgttagatataatttttgattataaggagattatttcacctgtgtttgttttatctccctaataaaattaataacataagattcatttggcctcactcttccaagatcatagactgcacatggagtctcagccattttctcatgtgatcagttgcctcagggttagtctcaggagaaactgaaagaatcaggcagtgcatcatcactgccgggaaaacagttttatttatgctttaatgatttcatcatcctcatattcagagagcagcattatgtttgaaatgtctaaaattaggaaaaaagagatctctgcttttcagttaatctccttggaggactcagagtagatctgggagctgaagcagtcctggacattagtcttctccaaacactgttgtgtttgctgtcacagttttgttgtagttttgcagtattttcatttatttaacaggtttccttccaaatttcaaatatttctgtgatgagtcatgttgccaccagatggcagtgatagctcatgaatatgttcctattcatggatgtgggtgtggcttatttataaaaatctcacccctcggtgaagagctgcacttagacaacatgaattcaagaagataattttatggaacacattttaaaatgaaataagcacctgaaaagtattatagtatagtggataaaagcacgggctctggaccaagactgcaagggaatgaatcctggctctttcaccttctaggcttgcaacttcagagaagtcccttaccctccctttcaacatctataaagtggggaaaatcgtagcaactactcaacttcccgacagggttgttgtgagggttaaaggagttaatatagagagagtgcttagaataatgcctggcaagtagtaagcacagcgtaagtgtcattatcattattattaggtataatttagcatctctcagtaatcggtcatgattacctccttgttccaacttcaacttgatacgaagactttaattagaatattcctgcctgatttgtctggagatccagcttatggtcagtagtccttcttaaaagttagtccttaattcaggtttatggaacaagccctttcaggcttgcttgtttcagcaaccagctctaacgaccctggcaagagggagtctgttttgtacttgttttcacattaatcaaagagaaggctgcaatgtaccttcacggttctcttaattaattcctgtaactcaaggtacctcctcagctctcttcctgcagcactgaagaaagaccagcaagagtgttctgagcaagcctcagaacactcagagtaaatgacaagagtgttcttgtcttgccgttggttttgttactttctttttgattaatgtggaaaccagtacaaaaaagactcactggagttttctctaatcagagggaggaggtttcccactctgctcaggagtataatatcatccactcttctcattaactttttatcagagatcttgctacctagttgtaacttgcaagcgacattcggcactcttctcttgacagtgcgcattgcagacctctcatatttagatctgttttctgaaagagcatgtgtccttttcctcagactactctaatcaaaatctaatcaaggtttttaagcagaagagataaagtggctccatggcactgacttaagtatccaccttggccacttgcccctgctccgctcattctgttccattcagtaataaaaattttcccatcaggcaataagaggtcaggtagcacttctcaccgctggaacaaggctttggagttaggggtgtgggtccatttgaaggatgaagccaattgttttgactgatttcagtttatcagtctgacccactctagccttgtgcttattttctagctcctcgtctttgtgctgctgattacattcctttttgcattgttttcaggtggagttggcatgaac

SEQ ID NO: 34 - DNA, 12428 bp, Homo sapiens
  source 1..12428: mol_type = other DNA
tgggtggctctgaaaagagccttttggatacgatggaacctccggccgaaccgccacttcttaagcccgctctccacggatgcggcgggccagctggatgtccttgggcataatggtcacgcgcttggcgtggatggcgcacaggttcgtgtcttcgaacagccccaccaggtaggcctcgctggcctcctgcagcgccatcacggccgagctctggaagcgcaggtccgtcttaaagtcctgcgcgatctcgcgtaccagccgctggaagggcagcttgcggatcagcagctccgtggacttctggtagcgccggatctcccgcagggctacggtgccgggccggtagcggtgcggcttcttcaccccgcccgtggccggcgcgctcttgcgggccgccttggtggccagctgcttcctcggggccttgccgccggtcgacttgcgagcagtctgcttagtacgggccatagcgaaccaaaacacaggcttaccagcgcagcggcggggagaaaaacgagctcctagccccgccgcagccgtctttataagcacagtcttttcccgattgggcggaacaataattgaaaatcccgcgctggctgtccattggctgtgacgtcacccgtcctaaagtcaccggttggcttgggcagattcctccctaatcccgcccaccccgcctcactttctacttaccagttggcgaagtttcgcaagcttgtttttcccctttccttcagggtgaaagtcattttccattgcagctttgtcagattgttccctttccgcccttcgcttccttagaacacactgcccgcaataccccccctttcttgctgcgccctacagctcccgcgtggaacctcattcttccatttgccccccgcccccagttgctacttggcggatcgtttttcgcctgtcgggtgccttttgggtgggagaggtgcccgcccccaggacgcaagattccgcctccgaggcccttactctccgccgccagggcgctttggaaaacaaaacagaaactaagacttaagtcagctcagtgaagccaagacccagctccgccacactagcgagcactacccgctcagggccctccccatcgggggtggggacgaggagcacgtcccgctggtgccagactaggtctaagtgtccggccatagcctgcggaaaccactagggaagcgcgcgctccgcgcgcaacacttcagcgcgttgggtactgcccgcggcgctggtgtttgtgactgtgtggagcggaccgtggcggcgcccaggacgtttggtgcctgcacctgccctgggaagtcctaggactggggacccactcatcgaagagccaaggcagttacgtgctccagatggaagacggcgcgcacacacacacaccccgccccgccccgccccgtcccgtcccgtcccgtcccgtcccgtcagctccaggttcgctattcactactgaggaacgctggactgagagtggccagcattaacaactcttttatttgaaaacgtgggtggctctgaaaagagccttttgagttcacaggtgccccttcgagacgcgggccgggctgggcccacttgggccggacgtcagcctcacttgccctttgccttgtggtgactctccgtcttcttagggagcagtacggcctggatgttaggcaagacgccgccctgggcgatggtgactttgcccagcagcttgttcagttcctcgtcgttgcggatggccagctggaggtgacgagggatgatgcgcgtcttcttgttgtcccgagccgcgttgcccgccagctccaggatctcggcggtcagatactcgaggaccgcagccatgtagacgggcgcgccggcccccactcgctccgcgtagttgcctttgcgcagcaagcgatgcactcgccctaccgggaactgaaggccagcgcgggacgagcgcgacttggccttggcgcgggccttgcctccttgcttgccacgaccagacatgacagcgatagtagtcaccgagagaaactcctgcctggcgatcgggaaagtcgccgaaaacgccgctgcttcacctttttatagacagaacggcgattgtccacggagcactttgattggctcaagcaaattttgtcccgatagccaataggatagctcagccagaatccactcatttacataatctcgtctccctcgcattgcgcgccgcggaaaactcgcgaaccataacgcagcgtcatgcgcacagcctctgtaagtacacagtcgtttccggtagaccccgagcctaccgctctgcttgcgttctcgggggtcggtgtcggtcttgggtctggccatgcctgagcctgcaaagttcgcgccggctcccaagaagggctccaagaaagccgtcaccaaagcccagaagaaagacggcaagaagcgcaagcgcagccgcaaggagagctactccatctacgtgtacaaggtgctgaagcgggtccaccccgacaccggcatctggtgcaaggccatgggcatcatgaactccttcctcaacgacatcttcgagcgcatcgcgggagaggcgtcccgcctggcgcactacaacaagcgctccaccatcacgtcccggagatccagacggccgtgcgcctgctgctgcccggcgagctggccaagcacgccgtgtccgagggcaccaaggcggtcaccaagtacgccagctccaagtgagtccctgccgggacctggcgctcgctcgctccctccctccctccctccgcgggtcgccggctgctttgtctccaaaggctcttttcagggccatttaaccacctcagttaaagaatctttcttgtgttgtcagtcccagttgatgtttttggcttcacgtctggttaactttaggagagcacacaacaccaagcacagataactattttcttttcacataggcattgctataagtaagcttacatagattgatagtggtatcttactatggcatagataggttggggcttgccttagagggctgctcttgaactgtctttggcctggttacgtacccgtgaatatgtgcccaggagattgtttcctgttgagaaacgcagtgttaattttgataagtttatgtaagatcaaattgtgtatatgaacaaaggttgggtccgctcttcagtggtaaaatgaaggtagagattaaatgcattgtatgctctcagatgtgtacttaaaagggaatagctcaacttttatatatggtatcgagaaacctgaggtttttatatcattggttcacaaacacgtgcctacaccaccactcatgtgaaaattccttaaggaggtagatggaagttcgattttgataaccaggagttaacaccgataaccttctgcgctttctagttgagataccctaaaatctacccaataccattaaatggtttttttccccaagagttatcactcggaaaagcttgtccagtttaagggtttgttccatacaatagcaacaaaatatacgatttctgaagccagagtttgggatccctgaagaggagaaggaccaccaatttgcaagggaggttgattaggtttgttttctgctttgggaacactggacttggaatcacacagcctcattaacctcaaaatattatactgattgctctggggatcgtaaatcctaggctggccacaatagaagcgaggaaagcaattaggaggctgttgcagtgttgtgggctggaacagtgattaagacttaaagtctctccagaccagcagcatcagcattacttgaagttactaaaaatgaaaattcccaggttccattatttgtgttaagctttctgggtgatggtgatatatgctaaagtgtgaaaaacaacggataaatgacatgctggagtgcaatggtggtaatggaaacaaatgttggattttatctttgaggtagaattaataggtgtggctgaggaacaggatttagctaacagtgaaacccctagatttttggcttgagcaactgtgtacatagtggtactattaggatagaacactgagagaagatattcgttgggacactgaagggagatccagagttccgactgaaatttgagaagctctttgctattcaagtggatatgtgcagttgacagtttgagagatgcatctagggttcagtaaagacaacacaagcctgtctttagggtctacctgtgaactgtgaacacagcaatgagaatgatggacatcacctttaagtatttttctagactttattactcatgtgtttgtcatgaggtgtaacttagtagttcatagtcctataatgtatgttattgactaggtagcatttatttttctaattgtttctgttatagtgctgccacatgtgtttcccagaaacgcattttacccacagttcttagggttggcctgattagtttaattgctgtctgaacctgcttcttactgtgattagttcaggaatctagatcaaactcattggcatttaacatttcaggaagtgaactgagtaacaactaactcagcaggggagtgtagtatgctattatcttttgggaaagcagcttatttgctttcaagaggcagcaggaggatggactgtctttaggtatgaaggcaagaatgattatagacaatatgcagaggaggacacagtgtgggagaatcagggaactgagccactcatggagttcagccaaccttggatccctgctgcacctttggacttccagttaagccaatttgtctgacatatttacttataccagtttgaatcttgaaatatttcaggaataataatttcctagataaaaggaaagacctttcatgaaaggtctcaagtcaaatagggtcaattaggacagagttgctccaattacatatttggaacagatgtccaaatgttaatacttgactaaggctaaagactaatattaccatcacaggaaaaatgtccagggttttttttcagatgtgaaattttatttaaaaattttaaataaactaaatcaaaaaattttagtagttgtactaatttcctggggctgtcaaagtaccacaaactgtatggcgtaaaacaacacaaagttattctttcatggttttagaggctagaagtttgaaatcaacgtgttggtagggccatgctctctccaaacccactaggggaagactcctgtctttcagtgtctggtagccccacttgttctttggtttctggcagcataactgtaatctctacctcagttttttcatgtatgtctccatgtttttttactttctttcttgagatggagtttcactcttgttgcccaggctggagtgcagtggcatgatcttggcttactgcaacctctgtgccccgggttcaagcaattttcctgcctcagcctcccgagtagctgggattacaggcatgcgtcagcacgcccggctgattttgtatttttggtagagatggagtttcatcatgttagtcaggctggcctcgaactgacctcaggtgatccacctgccttggcctcccaaagtgctgggattacagatgtgagccactgcacccggctgtctccatgtcttcttataagggtatcagtcatactggattagggcccaccctaaagacctcattttaacttgattacctctgtaaagaccctgtttccaaagaaggcaaaattctaagcaactaggggttagacttcaacatatctttcggggggacacaactcaacccataacagtagtcaatggctgtggcaggctaaatgtggctcccaaatatgtccatatcctaatccctacagcctgtgaatattaccttatatagccaagaggattttgcagatgtgattctgagattgagagattatgccagattatccaggtaggccccaaatgtaatcaccacagtccttataggagaggcaagaaagtcaagtgtagaaggaggcgatagaaggagagagggatttgaagattaataggctgcttgctttgaagacagagggaagggaccataaaccagaaataaacctctagaagctggaaaaggcatggaaatagaccctcccttaaggtctctggagggagtgcagccttgatttctaccgagtaaaattgattttgtacttcagacctccaaaactgtaagagaatgactgttgttttaaaaccattgagtttgtagtaatttgttgcagcagccacaagaaactaatacaacatctatatagaattttttcaataattggagaaatttgaatatggattgcatattaatattactgaatcagcattaaatttgttaggtgtaataatgtgattgtagctatttaggagaatatcctatttttaagagacatgccaccatatttagggagaagtgccaacatatttgcagtttattttcaaatggttcagaggctgtctgtgtacatgagaagacaaagataaggcaaatgcagcaaaattgtaataattggtgaatccaggtgaagggactatggctggtctttgtacttttttttccaacttttctgtaggtttaaaattttcaaaataaaaaaatgggaaatactttaaaaattgtaatcaaagacattagtacagaaactttcataatgtattttatttttacagtaaaattaatttatgtaaattgatagaattttactaatttcactcccaagttacattaaaaggcttacatatgtttgataatagcatatgtaaactagaactctgaatgatatccattggtcataatacgtactatgtagcggtaatggtgacttttgtgattgcacaagtctagagatgccccaaatgacattgacttagacatctggttattctaaggctgaaactgaagttgaatagaaggttttagtcaaatactgagatgaaaactgaggcagtcctggcgggggggagtgagtgtgtgtgtatatatacacacatagacatcatgcttctaaacatttacagaaagaaagggtagattatctacaaaaaaataagaatcagactgatatgagatcttacaaacctaacccccttctctttcctaaactccagattctcatatttctgacttcctatttgatatttacacttcgatatttaccaggagtcttcaacattttgttcaaaacagtactcttggttttcttcctccaagactactccttactcatatcagcaaatagcagctcttttcaagtgctcagtgtaaaaacctacaattaatccttgatttctctttcagtcagcctatactaaatcaatttcatttaaaatatctcggctactactctgcatctccactgctaccatcggcctctccagtcacattctccaagagcactctatctcatttaaaagacaaaatctctgcagtggcctgtgatgctccttaatggcctacataatccagccctcaagcacctccgtgatctctgtaaaactttcccttggtcactgtgcttcagccacattaaccagcttgcatatttctcacattcaccaagcttgttcctgccttggggcctttgtacttaccatgttctgttctgagaatactctgcctcaagatatcctacaactatcttactgtattcagctctctgctcaagtattaactgatgaaacctgtcatccctactccactccatgttctgctttacttaacagcaattgcacatatggccccctgaataatatacatttagtcacttatttttacttatctgctaattaaaatgtagactttttctattctgtttactgctgtattcccagcatgttttatccgaatgtgcagtggtttcttttcttctcccttatcgtgggaagtgatgtgcacaaatacacataatggagcctgaatgtcatattgctttcatacctgtgtgaattttggtaagaaaggaaaagtagcgattgacaggtaatataattacattaagtcactctcatagttagctgtttattgctttcctgctcttattctcagtccccaggaccaaatgttgaccactaccttcccccacatataattaggttatttaccgaacgccatgcaggtggctgttaaaaggaagatatatacttaccttataaactcaacttttccctgttgtctttctgtctcacccctacctccatgctttaaattaacttttcaggcttaggccttatctctcagtagagccatataaggtatgtgtaaaagcaggaaaatgtttcctggggatgaagctttgaaaagcttttttttttttttcttttggcaataaaataaggtagattcagcacaatacctaataactaaaaaatctgtttttaattgggtggggcagacagcaagtgtgtcatcctggaagatactatttgggattttatgtaggtacataagagaaaaaagtgaacaaaagcaaggggctaccaggacgccgcagtatgcttaacatgtattttctaagtttgtattatgcctttatcttggtacttttatcttctgttctcacttgatctttttgaaatgtattttaaatcctaataaaaatatataaagtctggaattaataaaggattaaatgaaacttttgtatatctcactgaaattctcagaaaaaaggggggtgtggggagggggaattgcctggggtagtgagtgaaaattgtgaccaggttcttactaaggaatatggcaactgcataatcaaatgtcagtggttaccaaacttatgaatcacctggtgttgtgtcatagattgtctatccttgcctctcgcccccagtgatttagatcagtggaactatgtggggtttaagaaatatacaatatatatttgtatatatttgtgtgtctcgaaagcttcagggttaaataagttttaactgtttaggaaacactattgttttaggtatccagtctcaaagacgaaggcctttaaaacttacttaatttttcattacatttcttgcccagaaaattgtaaaatacccaacgataacaatggggaattgtctatcagcacttgactaaaaagctttactatccatgacagcagcctttgcattactcaattctgatggcatttaacgtcttgaaacccagaaataaatacctatagactcacagtacctgaaaggaataccaaattgagacaagagagctatataaaccaaaaattgcttcaaccacagaatggaggtctacaggtgcggaaggaaagtttatatggtgaggcttggtcgcaaaactattaggaatattttcaggttactacacaattttgcgagctcaatatgcagttaacactttttccctcgactctcctgagcagatttacattgaccgcacccgtagcatatcgtctcactttggaaaaggcaaattatgtgcacatgaccctgtcactacaaggtagttctcgaccaagctacatcttatagctttatcttatattcctctcccatcatctgcaggaaaagggataggtgctgagggaaaacccctaagtagaactcacagtaagcagtgggaaaacagcttatttcactaacggggttaagtggccctgaaaagagcctttggagacaaagcagccggcgacccgcggagggagggagggagggagcgagcgagcgccaggtcccggcagggactcacttggagctggcgtacttggtgaccgccttggtgccctcggacacggcgtgcttggccagctcgccgggcagcagcaggcgcacggccgtctggatctccgggacgtgatggtggagcgcttgttgtagtgcgccaggcgggacgcctctcccgcgatgcgctcgaagatgtcgttgaggaaggagttcatgatgcccatggccttgcaccagatgccggtgtcggggtggacccgcttcagcaccttgtacacgtagatggagtagctctccttgcggctgcgcttgcgcttcttgccgtctttcttctgggctttggtgacggctttcttggagcccttcttgggagccggcgcgaactttgcaggctcaggcatggccagacccaagaccgacaccgacccccgagaacgcaagcagagcggtaggctcggggtctaccggaaacgactgtgtacttacagaggctgtgcgcatgacgctgcgttatggttcgcgagttttccgcggcgcgcaatgcgagggagacgagattatgtaaatgagtggattctggctgagctatcctattggctatcgggacaaaatttgcttgagccaatcaaagtgctccgtggacaatcgccgttctgtctataaaaaggtgaagcagcggcgttttcggcgactttcccgatcgccaggcaggagtttctctcggtgactactatcgctgtcatgtctggtcgtggcaagcaaggaggcaaggcccgcgccaaggccaagtcgcgctcgtcccgcgctggccttcagttcccggtagggcgagtgcatcgcttgctgcgcaaaggcaactacgcggagcgagtgggggccggcgcgcccgtctacatggctgcggtcctcgagtatctgaccgccgagatcctggagctggcgggcaacgcggctcgggacaacaagaagacgcgcatcatccctcgtcacctccagctggccatccgcaacgacgaggaactgaacaagctgctgggcaaagtcaccatcgcccagggcggcgtcttgcctaacatccaggccgtactgctccctaagaagacggagagtcaccacaaggcaaagggcaagtgaggctgacgtccggcccaagtgggcccagcccggcccgcgtctcgaaggggcacctgtgaactcaaaaggctcttttcagagccacccacgttttcaaataaaagagttgttaatgctggccactctcagtccagcgttcctcagtagtgaatagcgaacctggagctgacgggacgggacgggacgggacgggacggggcggggcggggcggggtgtgtgtgtgtgcgcgccgtcttccatctggagcacgtaactgccttggctcttcgatgagtgggtccccagtcctaggacttcccagggcaggtgcaggcaccaaacgtcctgggcgccgccacggtccgctccacacagtcacaaacaccagcgccgcgggcagtacccaacgcgctgaagtgttgcgcgcggagcgcgcgcttccctagtggtttccgcaggctatggccggacacttagacctagtctggcaccagcgggacgtgctcctcgtccccacccccgatggggagggccctgagcgggtagtgctcgctagtgtggcggagctgggtcttggcttcactgagctgacttaagtcttagtttctgttttgttttccaaagcgccctggcggcggagagtaagggcctcggaggcggaatcttgcgtcctgggggcgggcacctctcccacccaaaaggcacccgacaggcgaaaaacgatccgccaagtagcaactgggggcggggggcaaatggaagaatgaggttccacgcgggagctgtagggcgcagcaagaaagggggggtattgcgggcagtgtgttctaaggaagcgaagggcggaaagggaacaatctgacaaagctgcaatggaaaatgactttcaccctgaaggaaaggggaaaaacaagcttgcgaaacttcgccaactggtaagtagaaagtgaggcggggtgggcgggattagggaggaatctgcccaagccaaccggtgactttaggacgggtgacgtcacagccaatggacagccagcgcgggattttcaattattgttccgcccaatcgggaaaagactgtgcttataaagacggctgcggcggggctaggagctcgtttttctccccgccgctgcgctggtaagcctgtgttttggttcgctatggcccgtactaagcagactgctcgcaagtcgaccggcggcaaggccccgaggaagcagctggccaccaaggcggcccgcaagagcgcgccggccacgggcggggtgaagaagccgcaccgctaccggcccggcaccgtagccctgcgggagatccggcgctaccagaagtccacggagctgctgatccgcaagctgcccttccagcggctggtacgcgagatcgcgcaggactttaagacggacctgcgcttccagagctcggccgtgatggcgctgcaggaggccagcgaggcctacctggtggggctgttcgaagacacgaacctgtgcgccatccacgccaagcgcgtgaccattatgcccaaggacatccagctggcccgccgcatccgtggagagcgggcttaagaagtggcggttcggccggaggttccatcgtatccaaaaggctcttttcagagccaccc

SEQ ID NO: 35 - DNA, 29454 bp, Homo sapiens
  source 1..29454: mol_type = other DNA
ctaacttgtctggccgttcttgcgtagggggcgggactaaggctgtcaattggtctgtttttgtgccgatcaatgagatgggtgcggtgattggcgactaccttgagagtagcgggttgaggtgtaagccctgaggaggcagcgttttctgggcttctgtctggttctctctctccagaaggttctgccggttcccccagctctgggtacccggctctgcatcgcgtcgccatgatgggccatcgtccagtgctcgtgctcagtgagttctggggatgccaggaaatggacccccttttcgccctcttctgtccatacttttcagtgttgccccagctccgtcccccactgaccgggccactgagccttccaatcatcgtcttcattttggaagcccagtgtcccgctttcctctcttctcttaacctgttcgcttctctgcacaaactcaaactggccttattctcgccgagcctctttccttgacgtgtgctcgtcttgggaagctctttcccactccgcgttctgtccctcagcccccacgcttcccccgcccctgcgccctttctagcctgattgtcgctatgtagctgcacgaataacgtttttttttgtttttttttcagttaggtctagctttatattcttggcccatcccttagtagcggtaatttaaatgtttcaatctgtattacggagttaacagtatttcctagtagaattgtgagaattaaatgaggtaagtcggtagactgcttaaagagggtctggtaaataggtaatatccttggtcactttacgttacatttattttcagtaacagtctcttgaacagcaatcccttttcccgaagtaaccgtacttgcctcactgatcttagatgtaatcgttccctccgtgtccccggcgttgtactctttcccactaaccagttgggttttcccagatttctcgactggtcaccttttccttttggaagatcccttattttttttctttttatattttgagacaaagtctcgctctgtcacccaggctgggttgcagtggcgcgatctctgttcactgcaacctctgcctcccaggttcaagcgatcctcctgccttagcctcccgagtagctgggagtacaggcgcgcgccaccacgcacggctaatttttgtatttttggtagagacggagtttcaccatgttgaccaggctggtctccaactgctgatgagctcaggtgatccgcccacctcggcctcccaaagtgctgagattacaggcgtgagccaccgcgcccggtcccttatttttttctgatgagcaccacctccattgtcttcctttggtatgtttccattctgtgtgtaacttctgtacctcatctgcagagcctggctagccatctcccctcccttaccgtcttctgtatactgactgcctttcagagttattattcattatctctgtacctgggaaataacttttaaggaaaaaaataaaataaaaacgctattttgaaaaaaaaaagccgccttctttctgatggattgtaggtccatgcaggtttttggttacagctccctgagatagatgtaaatcctaagcattgtgggtgttttggtttgatgggactggattgaaagatttacagacttaaattgtaaaggaaggtaatttagagagaggaaggaaataaacattatgttggtttggttataaccactggcttgtctccactgacatggcctgggggtgagtggtgtatttgcaaagctcctttcaggtctgcattaatctctggcattagttggctgtgaccgattagcctcccagttaaagtatgtagtcagttcttagtgatggtaaatgggttactgaggccttcttattacatccaattatgaggtgactatataatttatcttgcaaactgttgagtgtgttctaaacagtatgctgtgggggcgctatcactaattatgctggacctgttagagtatgatccccctatccaagcagaaaaatgtgaatccccaaactctttccctgcttacgcaaagcaatgaatggtcatttcttagggtcaccagccctttgagaatctgataatagttgtggatcctctttccggaaaaaaaaaaaattgcagtatctctcattttctcacataatctcagggagttcgctatcccactaaggcccattcatagatctcaggttatgaatccctgctgtaaatataggaatatttggttagaagaaaagtattaaccaagattccaaagttatttcttaatataccaaggattgaaatacagaaggaagttaacagccataaggacatatgtttacagttttttgagatatggttgacatataataaactgcacttatttaaagtgtagagtttgataagctttgctctgtggatataccatgaaacctgcattcttatttttcaaagacggggaaataaatagcttgtgtacgatggggcagtcctgggctgttgacttgtgtttttgtctattttaggccagaacacaaagcgtgaatccggaagaaaagttcaatctggaaacatcaatgctgccaaggtcacaaatcttttaagtgtttatggtagtttgcctccagctatctttcctggtatttggtcatagccatgtgtcctgtgcatctagactttatagagtaggcaaataggcagaggaaaagttgacctctttcagaacattttcctgatgatgttaggggaaaggaagccctccccttctgagttaggactgataatcttctcgtattaacttgtgcattattctgttgctgtgtattgttttatagtattctatttgtgtttgtctcccatactaaactgagttacttgaacataagtactttattcccttttgtattcctagtgcccaccgtagatcttggatagatattcggtaaatgtcttttgaatgaaatagtgaaatagccttatatctgatttaggatggtgtagaggccaccgtcatggaaagaaatactaagacatggacttctagtaattaggactgctgggaaacaagctctgggagccatttcccccttattcttgtgaaaagtcatttctgtatccattctgaaagcattcccaaggggagaaaaacaacagagctagccacatcctatatctaaagtggcatgctatgtctaaagtgatggctaaccatgctttaggggtgtcattaaaaacactgactctggctgggcggaatggctcacgcctctaatcccaacactttgggaggctgaggcaggtggatcacttgggcccaggggtttgagaccagcccgagcaacatggtgagaccccatatctaaaaataaaataaaattaaaataaaataaaacactgactctgtgggttgttcatgccccttttccctattactccaacatttctcacactgtcctctgatttgtgcttgcgtattttatgttccctttccattagactattgcagatatcatccgaacatgtttgggacccaagtccatgatgaaggtaggcttatctcttcctaaaactcttaggctacaatttttttcttcctgttatctaggacactttaaatataacttttgctttcatcttagatgcttttggacccaatgggaggcattgtgatgaccaatgatggcaatgccattcttcgagaggtgtgttttgtttttggttttgtttttttgctttctgacagttctgtaaacataaaggacctgttaagatacaggctctgattagttttttagggctgctataacagattaccagaaactggttggcttcaacaacagaaatttattatcttatagaatgaagctagaagtctgaaataaaggcgtcagtagggccatgctccttctgaagtctctagggaagaactccgcttctcccttctgatggttgctggctttctttggcatgaacttggtctctgccttggtcttcatgttattccccttgtgtgtctcttacacaaggacaccggtgattggtcttcgagcccaccctaattcagaatgaccttatctaacttggttacatctgcaaaaaccctattttaaaataaagtaaaattcacaggttctgggagttatgacttcaacatatcttttttttttttttttttgagacggagtctcgctcttgtcacccaggctggagtacagtgatgtgatctcggctcactgcagcctccgcctcatgggttcaagcaattcttctgcctcagcctcctgattagctggaattacaagcgcatgccaccacacccggcttaatttttgtacttttagtagagacagggtttccccatgttggccaggctggtctcgaactcctgacctcaggcgatccacctgcctccgcctcccaaagtgctgagattacagatgtgagccaccatgcccagctggcttcaacgtatcttactgaagaacacaattcagccacaatagtgcttccagtaaataagctaaaagatatcgttctgtcctctggcagctttaatagttgagttcatgtaatacactttttcccaaaaaggatttggaaagtggtttacttaagctatttggggtgccaattttaatctttcaagatatggtaaaacattaaagggaaagtaagtacgtatagaagcaagaagcccaagagttagggccaagcttcatgagttcagaggtctttgaatagtgtgaattcactagtgatctacctttttagattcaagtccagcatccagcggccaagtccatgatcgaaattagccggacccaggatgaagaggttggagatgggaccacatcagtaattattcttggtaagaggagaataagaggttgataaggaaaaattagaagtaacacctgtgtcatattttaagaaggaaattctgttacagatccactaattacagatatttaaatagcttattggttattttctatgtattctctccagttgggtataaaacatttatatgaatagggtgagctatgcaaatctggctgataaactaatagttaattctctttattcactgtaagttataatattcttttttttttttttttttgagacagagtctcactctgtcaccatgctggagtgtggtggtgcgatcttggctcactgcaacctctgcctcccaggttcaagcgattctcctgcctcagcctcccaagtagctgggactatagtcacgtgccaccacgcccagctaatttttgtatttttagtagagacagggtttcaccatgttggccagatggtctcgatctcttaacctcgtgatccgccctccttggcctcccaaagtgctgggattacaggcgtgagccaccacgcctataaagtcaccacaaacactgaattggcaaataataaatcattgcttctataggaaatacagggttagatacctataagcctctggtcacactttcatcaactgataaatatataccttattgtatgtgtttgtcttcaagacacccatttaatatatatagttgatttattagcattgaactcatagcccatagcaatataactcatgcctggacaaagctcacctaacgtattttctctgtaaggcacatcacagccttcttgcacatagaagcattagctagcacttaagcactacacttgtgagccattataaataccgaaatcatcaagaaaaatgtgaaaaacataaccttaaatatactgcataaaggacacttttttttacagtgtgagagctaaaggccttgtttaacctcacctaggaatgtcattgggtgactcaaattttttgccattctgtgaatttccatgaatgactatgaaagtgtcatgaatgttgattttggggttacaaataataagaaatgaaatctttaggataatgaccctgggctatgtaagtttaaagactaatctttctacttcctataggatcataaagaattatttttcaaatcttggcctattgcctttattgtgtaaatgtcaagatgatagtaaaatttttatactagaaacactggttttaaaaaatctgattgcaaccaagtgtggtggctgacacctgtaatcccagcactttgggaggccaaggtgggcagatcacgaggtcaggagttcgagaccagcctgggcaacatggagagaccgcgtcactgtaaaaaataaaaatcggctggatgtggtggcacacacctgtagtcccagctactggggaggctgaggtcggtgaggcaggaggttgaggctgcagtgagccgtgtttgtgccactgcactccaacctgggcaacaaagcaagaccatgtctctttttttttttgagatggagtctcactcttgttgcccaggctggagtgcaatggcacaatctcggctcgccgcaacctccccctctcgggttcgagcgattctcctgccttagccttccaagtagctgggattacaggcatgggccaccatgcctggctaatttgtatttttagtagagacggcgtttcttcatgttggtcaggctggtgtcgaactcccgacctcaggtgatctgcccgcctctgcctcccaaagtgctgggataataggtgtaagccaccacgcctggcctgagagggactattttaaaataagggatgctaattttatttatttatttatttatttatttatgtttttgagacagagtcttgctctgtcgcccaggctgcagtgcattggcgcaatctcagttcactgcaacctccacctcccaggttcaagtgattctcctgcctcagcttccctagtagctgggattacaggcatgcgccaccacgcctggctgatttttgtgtttttagtagagacagggtttcaccatgttggccagactgatctcgaactcctgagctcaggtgatctgacaacctcggccttccaaagtactgggattacaggtgtgagccactgcgcccagccaagggatgctaatttatagtgttggcccacatacctaaaaataaagttcttaatcaaaattattattatttatttttcgtagagatggggtctcatgttgcccaggcttgcctcaaactcctgggctcaagcaatctcctgcctcagcctcccaaagtgtttttctttttgagatggagtcttgctgtgtcacccaggctagagtacagttgtgcaatctcagctcactgcagcctctgatcccgggttcaagcgattctcctgcctcagcctcctgagtagatgggattacagatgcccaccaccgcgcccggctaatttttatatttttaatagtgacgggatttcaccatattggccaggctggtcttgaactcctgacctcatgatccacctgcctcagcctcccaaagtgctgggattacaggctgtgagccaccgtgcctggctaagcctagctaatttttcaaattatatttatttatttatttatctttgagacagagtcgcccaggctggagtgcagtggcacagtcttggctcactgcagcctccacccctggggttcaagtgattctcctgtctcagcctttctgttagctgggattacaggtgcccgccactgtgcctggctaatttttagtagagatggggtttcaccatgttggccaggctggtctcaccacgcctggccttatttatttatttttatttttaaattttatttatttatttttgtgtgacagagtctcactctgtagcccaagctaaagtgcagtggcatcatcttggctcactgcaacctctgcctcctgggctcgtgattctcatgcctcagcctcctgagtagctgggattataggcgcatgccaccaagcccagctaatttttgtatttttagtagaggtgtggtttcaccatgttggccaggctggtgtcaaactctatcaacctcaggtcatccacccacctcagcctcccaaagtgctgggattacaggcgtgagccatagcgcctggccctattgtactgcattttaagaatggtgagttgaataaaaatgtccttgagagtcacagtcaactagtccatctttagatccagttcttttgaggattcagaacatagccagttatggacttttagggaaaacctggaaggatgaaagaggagggaggaaagatttcatactcttttttattttttattttttgtaatagaacatgagctttacatatcagagaaaattttctagctgataatttcagttgaatcatctagagatagtgggtagaataagtatccatgagtctaagtatcttagatgtagatggatttaagaatgtgaaaaagaacacttgaccagccctaaagaaatcttctgttacagttctaataatttcttaatagggtatatccttttctaagttatcttactcaggcttttgcttttttttttttcgagacagagtttcatactgtcgcccaggctggagtgcactggcgcgatcttggctcactgcagcctctgcctcccgggttccagcaattctcctgcctcagcctcccaagtagctggggttacaggcacccgccaccatgcccagctaatttttgtatttttagtagagacggggtttcaccatgttggtcaggctggtctcaaactcctgacttcaggtgatcctcccacctcagcctcccaaagtgctgggattacagacgtgagccaccatgcccagccactcagccatcttttaaaatgcaataatatgctgcttaatgatggggatatgggctgggcgcggtggcttacgcctgtaatcccagcactttgggaggccaaggtgggcagatcacgaggtctggaattcgagaccatcctgaccaacatggtgaaaccctgtctttgctaaaaatacaaaaaatgagctgggcatggtggcgcgtgcctgtagtcccagctactcgggaggctgagtcaggagtatcacttgaacctgagaggtggaggttgcagtgagcccagatcacaccactgcactccagcctggcaacagagcaagattccgtctcaaaaaaaaaaaaaaaaaaaaagatggggatacgttctgagacaaatgcgttattaggcagtctcattactatgcagacttcatggagtgtactttacaaacctgggtggtacggcctactatacacttaggctgtatggtatagcctattgcttctaggccacaaagctgtataacatgttactgtactgaatacagttataatacagtggtaagtatttgtataataagcatagctaaacatagaaaaggtacagtaaaaatatgatattataatcttatgggaccactgtcatatatgtggtccattgttggctgaaacattaaatggtacgtgactgtattttttgattatttttctttcaatatacatgattgacactttggaattgaaacaaaatatattgaattcaaacactggagcacatactaatgaataacatgtacattttttttttttatttttatttttattgatcattcttgggtgtttctcgcagagggggatttggcagggtcataggacaatagtggagggaaggtcagcagataaacaaatgaacaaaggtctctggttttcctgggcagaggaccctgctgccttccgcagtgtttgtgtccctgggtacttaagattagggagtggtgatgactcttaacgagcatgctgccttcaagcatctgtttaacaaagcacatcttgcaccgcccttaatccatttaaccctgagtggacacagcacatgtttcagagagcacagggttgggggtaaggtcacagatcaacaggatcccaaggcagaagaatttttcttagtacagaacaaaatgaaaagtctcccatgtctacttctctctacacagacacggcaaccatccgatttctcaatcttttccccacctttcccgcctttctattccacaaaaccgccattgtcatcatggcccgttctcaatgagctgttgggtagacctcccagacagggtcgtggccgggcagaggggctcctcacttcccagtaggggcagccgggcagaagcgcccctcacctcccggatggggcggctggccgggccgggggctgacccccctacctccctcccggacggggggactgaccccccccacctccctcccggacggggcggctggctgggcagaggggctcctcacttcccagtaggggtggccaggcagaggcgcccctcacctcccggacggggcggctggctgggcggggggctgacccccccacctccctgccagatggggcggctggacccccacctccctcccggacggggtggctgccggacggaggggctcctcacttctcagacagggcggttgccaggcagagggtctcctcacctcccagacggggtcgcggctgggcagaggcgctcctcacatcccagacggggcggtggggcagaggtgctccccacatcccagacgatgggcggccgggcagagacgctcctcacttcctagatgggatggcggccgggcagagaagctcctcactttccagactgggcagccaggcagaggggctcctcacatcccagacgatgggcggccaggcagagacgctcctcacttcccagacggggtggcggccgggcagaggctgcaatctcggctctttgggaggccaaggcaggcggctgggaggtggttgtagcgagccgagatcacgccactgcactccagcctgggcaccattgagcactgagtgaacgagactccgtctgcaatcccggcacctcgggaggccggggctggcggatcactcgcggttaggagctggagaccagcccggccaacacagcgaaaccccgtctccaccaaaaaaatacgaaaaccagtcaggcgtggcggcgcgcgcctgcaatcgcaggcactcggcaggctgaggcaggagaatcaggcagggaggttgcagtgagccgagatggcagtagtacagtccagcttcagctcggcatcagagggagaccgtggaaagagagggagagggagaccgtggagagggagaggggagaggggagaggcgagaggctatgtacatttttaaaagcttattttacctgccagtaagcaggtagtacaagcaatttgtgcaaaaggcttttgacaaaaagaatatttacaatactctctttatactttttctagaaacaagcttttttgtgtgtgggtttgcatctatgtatatgttattttgtgtgtgtctattagaaagtaaagacaaattttatttgtttatttattttgagacagagtctcactctatcacccaggctggggtgcctgggcacagtctccactcactgcaacctctgcctctcaggttcaagcaattcttgtgcctcagcctcccaactagctgggattacagacacccaccaacacacctggctaatttttgtatttttggtagagacagtttcaccatgttgtccaggctagtctcaaaactcctggtctcaagcgatttgcctgcctcggcttcccaaagtgctgggattacaaggtgtgagccaccattcccagccagaaagtaaagacaaattttaaaagaaggagatgttttaccaataatcccttatccagagggtaaattgtgtacattttcttttttttttctttttctttttttttttttttttgagatggagtctcactctgtggcttaggctggagtgcaatggcacgatcttggctcaccacaacctccgcctccctggttcaagcgattctcctgcctcagcctcccgagtagctaggaatacaggcatgtgccatcatgcctggctaatttttgtatttttagtagagatggtttcaccatgttggccaggctggtcatgaactcctgacctcaggtaatccatctgccttggcctcccaaagtgctaggattacagatgtgagccaccacacccagccttaattgtgcacattttctaattttaattttttatttttttgaaacagaatcttgctctattgcccaggctggagtgcaatagtgtgatcacggctcactgcagccttgaccttctgggctcaatgagtcctcccagcccaggttcccaagtagctacaggcacatgccaccatacctggctaatttttgaattttttcgtagagacagggttttgctatgtttctcaggctggtctaaaaattccagagctcaggtgatctgctcaccctagcctcccaaagtgctgggattacaggtgtgagctaccgcatccagccctgaatattctttcagaggtagggttttgtgtgttttgtttttagttcaagcagtttgactacatcctaaggtataaaggtactaataaacaagtcagtttttcttttgtgcatttttctttattttagagccttcagggaaatttttttttagaaagatcaagagaaggccaggcgtggtagcttacgcctgtaatcccagcactttgggtggccgaggtggacagatcacctgaggtcacgagttcgagaccagcctggccaaccaacatagtaaaacccgtctctactaataaagtacaaaagttagctgggtgtggtgatgcatgcatgtaatcccagctacttgggaggccgaggtgggaaaatcgcttgaatctgggaggcggaggttgcagtgagcagagattgcgccaccgcactccagcctgggcgacacagcgagactgcttctcaaaaaaaaaaaaaaaaaatcaaaagaataagtaagccctagaatcagtctttcatcattttattttttgagatagggtctcactctgtcacccagattggagtgcaatggtgcggtcatggctcattgcaccctcaacctcctgggctcaagtgatcctcttaacctcagcctcctgagtagctgggactgcaggctcataccaccacactaagctaaattttaaatttttttgtaaagacagggtctcactgtgttgcccaggctgatcttgaatttctgggattacaggtatgagccaccatgcctagcctgggcaacaaggatgttttctgtataaattgccgtcttatacaatgtgtagaatttggaatagtatgaatggccaaatgtcataccttttgggagagtctgatttaggagagtattttttggaagaataattaagttacttgccttgatatccagatgctttaaatattactatggtgcttgtatctttttcagcaggggaaatgctgtctgtagctgagcacttcctggagcagcagatgcacccaacagtggtgatcagtgcttaccgcaaggcattggatgatatgatcagcaccctaaagaaaataaggtatcttgggggcaagaaataggtagtatcaaatatgagaggcctggctagacgtggtggctcatggctgtcatcccagcactttgggaggcctaggcgggtggatcttgaggtcaggagatggaaaccatcctggccaacatggtgaaacctcgtctgtactaaaaatacaaaaaattagttgggcatggtggcgcatgcgtgtcgtcccagctacttgggaggctgaggcaggagaattgcctgaaccagggagtcagaggttgcagtgagctgagatggccccactgtgctccagcctggtgacagagcaagactccgtctcaaaaaaaatcagctgggtatggtggcgcacacctgtaatgccagctactcaggaggatgaggcagaaaaattgcttgaaaccagggggcggagattgcagtgagccaagatctctccactgcactccaacctgagcaacaagagcgaaactcccatctcagaagaaaaaaaagaaaagcatatattacctctagcttcagggaattttagttaaggtttaacatcacgtagagtcatgtagagcagtgtcttgaataaaaatttttgtttaaaaagtaaaacctggcagggctcggtggctcacgcctgtaatcccatcactttggcccaggtgggtggatcacgaggtcaggagttagagaccagcctggccaacatggtgaaacctcgtctctactaaaagtacagaaaattagctgggcatggtggcaggcgcctgtaatcccagctattcaggaggctgaggcaggagaatcgcttggacccgggaggcgaaggtttcagtgagccgagattgtgccactgcactccagcctgggtgacagagtgagactctgtctcaaaaaaataaaaagtaagacttgggctgggcatggtggctcacacctgtaatcctagcactttgggaggccaaggcgggtggatcacctgaggtcaggagttcaagaccagcctggccaagatggtgaaacctcatttctactaaaaatgcaaaaattagccaggtgtggttgcatgcgcctgtaatcccagctactcggggggctgaagcaggagaatcacttgaacccgggaggcggagtttgtggtgagccaggatcgcaccattgcactccagcctgggcgaacaacaaaactccatctcaaaaaaaataaaaatagggctgggtgcggtggctcacgtctgtaatcccagcactttgggaggcggaggcgggcggatcacgaggtcaggagattgagaccatcctggctaacatggtgaaaccccatctctactaaaaatacaaaaaaataagccgggcgtggtggcaggtgcctatagtcccagctacttgggaggctgaggcaggagaatggcatgaacccgggaggcagagcttgcagtgagcagagattgcaccactgcactccaggctgggcgacagagcgagactccatctcaaaaataaataaataaaaataaaaatgtatattttttccacgcccaactggaaatagttttttttttctttatttaaatattctactcatatggttgagtcactagatgcataagtgtttagtaatttggtgaggtttatattatactgcctgctcttttttttttttcttgagacggagtttttgtacttgttgcccagtctggagtgcaatgaatggcgcgatctcggctcactgcaacctccacctcccaggttcaagtgattatcctgcctcagactctcgagtagctgggattacaggcatgtgcatccacatccggctaattttgtatttttagtagagacagggtttctccatgttggtcaggctggtctcaaactttcaacctcaggtgatccacccaccttgacctcccgaagtgctgggattacaggcgtgagccaccgcgcctggccatatactgcctgctcttaaacaagttgtacattaatatctttgtctggcacacttaagaatgaggtgtttgatctaattatttttatgcagtaagctctgtgagaatgtagaggtacccaaaggttttattgtgtggagcttcacgcttagaaagccttttttttgagacggagtttcactcttgttgctcaggctggaatgcaatagctggatctcagctcactacaacctctgctccctggcttcaagcagttttcctgcctcagcctcccgagtagctgggattataggcatgtgccactacgcctggctaattttgtatttttagtagagacggagtttttctccacattggtcaggctggtctcaaactcccgacctcaggtgatccgcctgcctcggcctcccaaggtgctgggattacaggcgtgagccaccgtgcctggcctgaaatattttttttttttaatcaagtaataactgcctacctagaacactttaatcttattaaaaaaatttttttggggtggcggggggtctcgctctgttttccaggctggagtgtgcagtggcatgatctcggctcactgcaacctccgcctcttcggttcaagcaattctgtctcagcctcccaagtagctgggactacaggcgcataccaccacacctagctaattttggtatttttagtagagatggggtttcaccatattggtgaagctggtctcaaactcctgacctcaggtgatcctaccacctcggcctcccaaaaaaattattttttagagatatggtctcactctgttgcctaagctggagtgcggtggtgcagtcacagcttactgcagcttccagctcctgggctcaagcaatcctgccccagcttcccaagtagctaggactataggtatgtccaccacgccctgctaaatttttcatagagatgaggttttgctatgttgcccaggttggtttttaactctgggcttccagctatcctcagtcttccaaagtgttgggtttacaggcgtgaagcatggcacccagccccctttatcttagataccatttttggagtcattgcttcttcccaaaagtccataattcaaccatttaataattggtatattatgtgcctttcactgttaaaagagggattttgtttattttggggtttttttgagacggaatctcactctgtcacccaggctgtcgtgcagtgacatgatctcaggtcactgcaacctctgcctctggagtaactgggactacaggcacatgccaccactcctggctaatttttgtatttttaatagagatggggtttcaccatattggccaggctggtctcgaactcctgacctcaagtgatctgcccgccttggcctcccaaagtgctgggattacaggcgtgagccaccgtgcacagccaaaaaagagattttagcattatgtgaaaatatcttgtgaggagtgaaagtaatataaaaatggtaaatacataaaatgtgtttacagtaacataaaaacacaaagatgaccagttggtggtcatctttgaccactgtgacacaccatgagctaaaaataaaatttgctgttcaaatgaatgatttgataaaactcttaaagttggctagttatgggataaagtttcataaaaaaaaatgtgtcttgacctgagttgtaaaagttgaaaagtttacttggttgaagcagaagataaggaacaaattattttactataatctttgtatgtaagtgtaaagggttgctcagggaattaaggcaccgtctacagatgagttgtaatcttgctgaaaggcagaggaatggacaaaggttacctcctaatgtccttttagtttcctccaaaggaacaaatccccttgttctgcctcttggtccattattatagtcactgaggtatagataaggcacatctctacatatctaacatgccttcttcacatatcgtctggttttcttttctctagtatcccagtcgacatcagtgacagtgatatgatgctgaacatcatcaacagctctattactaccaaagccatcagtcggtggtcatctttggcttgcaacattgccctggatgctgtcaagatggtacagtttgaggagaatggtcggaaagagattgacataaaaaaatatgcaagagtggaaaaggtaaactttcaaagtgtatacattgggtcaaattatatgttagcatgagtcatctcacttgtgaggaaatagtctgtttttcatgccgttgttttgttttgtttttgagacagagtctcaccttgttgcctaggctggagtatagtggcacagtcacagcccactgcagcctcaaactcctggcctcaagcaaatcctctgatttgctaggactacaggcacatgccactgtgcccagcaaattttttttctttttgtagagatgagggtctcatgttgcccaggctggtcttgaactcctggcctcaagtgatcttcccacctcaggctctcaaagtgctgggattataggcataagccatcataccctacttgaatgaaatagttttaaatcagagcaaggtatgttttttgtttgtttgtttttttgagatggagtcttgctctgtcgcgcagaggctagagtgcagtggtgcgatctcggctcactgtagcctccacctcccgggttcgagtgatctcctgcctcagcctttaaaatagttgggattacagatgcctgccaccacgcccagctaatttctttttgtattttaagtagagacggggtttcaccatgttagccaggatggtctcgaactcctgacctcagtgatctgcccacctttgcctcacaaagtgctgggattatagggtgagccactgcgcctgaccaaagcaaggtatctttagttagaactaggaagaactatacttgctgcctggaaacaaaaacctataagaggctaccaagtaggaatttcttcaaatagttttgttgttaccttcactgctatccctacacaaggtttatgaggacaagggacaggcttattggtgtctccatgtttgtgtatttgcatacatcagtcatttggtcaggatataagcttaacaagggctctattatgtagtgctattaaaatagtaagccccagaaagctttctctcctgtccactaaatttcattaagatccaaaagtttagtagtatagcttgtggccagtagatggagccccaagcctaaaattctctggcaatatatttatttttttaattggagagacctaagcccttatttatttatttaaatagcaattgggtctcaatgtgttgcccaggctggtctcgaactcccggcctcaagggatcctcctgcctgagcctcttgagtagctgggattttaggtgtgaaccactgtgcctggctcataagcccctctaagtcttttgtcaagtcattgaatttcagtgagtctcagcagaccttcaagttgagtgtcatggtctaaaattggtgtatttcctaatgggaaaaaaatgtgattccaataatatttttgagcttcatcaaagaaaggtactttagaaacctgaaacactgggccgggcgtggtggctcatgcctgtaatcccagcactttgggaggccgaggcgggcggatcacgaggtcaggagatcgagaccatcctggctaacatggtgaaaccccatctctagtaaaatacaaaaaaaaaaattagccgggtgtggtggcgggcgcctgtagtcccagctacttgggagtctgaggcaggagaatggcgtgaacccgggaggcggagcttgcagtgagccgagattgcaccactgcactccagcctgagcgacagagcgagactccatctcaaaaaaaaaaaaaaacctgaaacactagctgtttgggaaagatgaacatctgggaaggaaattaagaaattgtctcttgattgtggattaaagtgcagttgtcttttgttcagatacctggaggcatcattgaagactcctgtgtcttgcgtggagtcatgattaacaaggatgtgacccatccacgtatgcggcgctatatcaagaaccctcgcattgtgctgctggattcttctctggaatacaagaaaggagaaagccaggtaaggttcttggccttgttccttaaagtagatgcaagaatctgactgcaaatatgaacaacagaaataaaacgtatgtttattgcatgccttctgggtgcatagtgtacactgactcttagaacaatcctttagaatagttggtattgatttcattttacagatgagggatctgaagctcaaacaagttaggttaattgcttgaggaatacagctagtattggccaaaatcaagatttgaacctggttgtgtttggcttgttttatacgatcatgctgcctttcctaatgcaccaggggaacataaggtaggagttaattcagctttgaagtactaaaggagaatttcagcttaatgcagtggctcacacctataattctagcactttgggaggctaaggcaggtggatggctcgagcccaggagttcaagaccagcctaggcaacatgtcgaatactgtctttatttaaaaaaaattaattgggcgtggtggcatgtgcctgtagtccccactacttgggaggctgaggtgagaggattgcttgaacccagaaggtcaagggtgcaaggagctgtgatcacgccactgaactccagcctgagcaacagtgagaccctgtctcaaaaaaaaaaaaaaaaaaattctagagggcaggaggctcacaaggctccatcacatttggaaagaataagaatcaattagtgggaagaattaagacccaggattttcctgcacactgccaggacagatgtaggattggactgggtggtcagagaccttagaaaggccaaactcaacactaattactgtgtgactttcagttctggttgttttataatgatataactggagctggccgggcgtggtggctcacgcctgtaatcccagcactttgggaggcagaggcgggcggatcacgaagtcagaagatcgagaccatcctggctaacgtggtgaaaccccgtctctactaaaaatacaaaaaaaaagttagctgggggtggtggcaggcacctgtagtcccagctactcgggaggctgaggcaggagaatcgcttgaacccaggaggcagagcttgcagtgagccaagatcgcgccattacactccagcctgggtgacagagcaagattccgtctcaaaaaaaaaaaaaagcaaaactaaagctaaattggcttacagaggtgttgaggtcatggctttaacataattctgactctgagatacgtgggagaggtgggtggaaggagtataatatgacccttagagcttcaccagtccagggattttaaaatcagtgtcttttctttaccacacagactgacattgagattacacgagaggaggacttcacccgaattctccagatggaggaagagtacatccagcagctctgtgaggacattatccaactgaagcccgatgtggtcatcactgaaaagggcatctcaggtgggactttgttactttttccagcctacctttgaggtagacgagggtgggtgatttgttttctcccctcatgtttggcaggggcgtaatagtgtcatggttaagagtactttgattataaaaccagttcagaacccagcttgacatctctactcttggatttgtagatttagctcagcactaccttatgcgggccaatatcacagccatccgcagagtccggaagacagacaataatcgcattgctaggtgagtaggccaggtaaaaacaagacttttcttcccgtgtgtttcctttttgtagttgcgtaacagtcatcattacctgaaaaggtttaataaaggatatagtaacaggtagaaataaccttggcttagctgcctgccctcttcagaagtcctctagtccaacagttatttactgcgtgagtctcatctgtactgcccctaaccattagtgagcagcttgtgcttagacatttgtaattgctaccttggtgggtgtccgttacatttctaaataactgcctatctaagaggttttctttaatgtcattatgatgatttttgaatgaacatttccagagtatcctaagtggcctggattatagcagaaccatcagtttcctcagctacatccttagctgcgatttatgcgattctagattgcattcactacttctgcactgatgtctgtgctcatagaccattctttttaatagacaaggtcttgctgtgttacctaggcctgtctcaaactcctgggctcaagcagtcatcctgttgtcagcctttccagtacctgaaactattggcatgcgccaccatgcccagcaaagttcattcatttttaatttatcaaaaagctgacaaatctaccccaacataatatatcacagatccaaatcatattttatacttttataccccaaagggtattaacatgcatacacatagttgacttcacatggccatgagttggagggagtgacaagcaattagtcctacattcattaaacttcggtcagacgtatgcagtcatcccttgatatccacagggcattggttctaggatccccgcccccttgaatactaaagtttgtggatgcttaacccttatataaaatggtatggtatttgtgtataacctatacacatccttctatacactttaaatcacctttagattgcttataatgcctaatatagcataaatgctatataaatagttgctatactatattgtctttaaaatttatattattttttgccgttgtattattgtccatccccccaccccaccccccctgccatgttatcagtgcatggttggtggaatctggatgcgggacctgcggatatagagggccaactctacttacatgtttattcgccttcctccttgcttgacctttgcatctttggtacagtctttattattcgcctggagactcaactgggcagtacaggatgggttatatctagaagttaccattatatagtatagacatgttaatttttttcttttatctttcttttttgcaggttctaattctctagttgaaatatgtacatgttagatatgcatgagaactaatttgtccagattttagtaaccacaaagtatattttgaattcaactatatctggttatagtagtgatgactagttgccttaagtgtacagttgacccttgaacaacttgggggttaggggaatcagtccccaaggagttgaaaatccatgtataattttttgactcccccactcctaatagctgaccgttgacccgaacccttaccaataacacaattaactatcacatattttgtatatcatatgtgttatatactgtattcccttaaataaagtaagctagagaaaatgttattaagaaaatcataagggcagggcacggtggctcatgcctgtaatcccagcactttgggaggccaaggcaggtggatcacctgaggtgaggagttcaagaccagcctggccaacatggtgaaaccccatctctaataataatacaaaaattagctaggtgtggtggtgcatgcctgtaatcccagctactcgggaggctgaggcaggagaattgcttgaaccaaggaggcggaggttgcagtaagctgagatggtgccattgcactccaacctgggcgacaagagtgaaagtccgtctccaaaaaaagaaaatcataaggaagagataacacatttactatgccttaagtggaagtagatcatcaaaaaggtcatcatcatcttcatgttgaataggctgtggaggaagaacgggctggtctttctgtcttgggtgtcagaggcagaagagtggtagaaggggaggcaggatgggcaggaggcacactcagtgtaactcaatggaaatacatcgtgatttgtctgacttctgcttttttgtttctctaaaaatatttctgtatagtaccagtccctcttccactgcttcagtttcagtgcctctatcatagaagggtccatatcataaaagaagtcaaaagcagtcttgaataatcagaagccttctgccagattgtctaatgtcagtttgttttctggcactgctgcttctacatcatcttcctcatcgtctggcactgctttggaagcagtcgtctccatcaagtcatcttctgtttggttttttttgtttttattttttatttttttgagatggagtttcgctcttgtcgcccacgctggagtgcagtggcacaatcttggctcaccacaacctccgcctcctgggttcaaacgattctcctgtctcagcctcccgagtagctgggattacaggcgtgagccaccaagcccagctaattttgtatttttagtagagacggggtttctccatgttggtcaggctggtcttgaactcccgacctcaggtgatccacccacctcagcctcccaaagtgctgggattacaggcgtgagccactgcacctggcctgtcatcttgtgttaattcctctgatgtaatgtctgttagctcttgagtttctccaagattcatatcttgaaacccttcaccaccgctatgccagtttttttagccacatccacagtctctttcatgatttccttgattggctctgtcataaatcctacgaagtcatgtacaacatctggacacagtttgctcctgcagaaatctattgttttgggcttgatggctttcataagctttatctataacaactgtggcatcttcagtaatgtaatcctttcatattttcatcatgttctctttgttggggttctctttcataatgttgacttttttttttttttttttggagacagagtctcgctctgttgccaggctggagtgcagtggtgtgatcttggctcactgcaccctccgcctcctggttcaagcgattctcctgcctcagcctcccgagtagctgggactacaggtgcgcaccaccatgcccagctaatttttgtatttttaggaaagacgggttttcaccatgttggccaggatggtctcaatctcttgacctcgtgatccgcccgccttggcctcccaaagtgctgggattacaggcatgagccaccgtgcccagccgacggttctttacatgaagtaccatgtgtaataagccttacaggtccttctctgactgtgtggtctagagtatttgaatgtcttcagtgttgaactcatggggctctgggtagccaggggcattgtccaatatcagaagcactttaaaaggcagtccctttctggaaaagtacttcctgacttcaaggacaaagcatcgatggaagtaatccagaaaaagtattcttgttgtccaggcctggttgtacactacaagacataaacttgactgcccaagggacaggctaactcctttgcacaaaatcctggtgctcccttctctttcttactaataaatgtcatttgtggcataatcttcctgattaggtcgctttcatatacattaaaattgtatttaggcagataccatttctcctcaatgatttctctctctctctctctctctttttttttttttctttttttttttgagacagaatcttactctgtcacccaggctggagtgcagtggtgaaatctcagctcgctgcaacctctgcttcctgggttcaagtgattctcctgcctcaggctcccaagtagctgggagtacaggcgtgtgccatgacacctggctaattttttcttgtatttttagtagaggcggggtttcaccaggctggtctcgaactcctgacctcaagtcatccacccacctcggccttccaaagtgttaggattacaggcgtaagccaccaagcccagccctcaatcattttcttaatggtatctgggaacatgtctgctgtttcttggtcagcagaagctgtttcctgctatcttgacattttaaaagccaaacaaacctctttctaaaattatcaaaccatcctttgctggcattaaattctccagctttagatctttcaccttccttttctgatgaggtatcataatgatttcacattttttcaaatcatattagtgtatataggtatgctgttcttacctatataaaacctgcattttcaatatgagattaataggtatatttctcaaaaagcacagggttttcacagctgctggcatagctgcagtgctgctgtaactgcaatgatggcttcagttttttttgttgttgttttttggggtttttgtgtttgtttttttttagatagggtcccactctgttatctaggctggagtgcagtggcatggtcacagctcactgcatccttgatatcatggtttcaagggatccctcacctcaccctcctgagtagctggagctacaggtatgcatcactgtgcccagctagttttttattttttgtagagacagagtcttgttatgttgcccgggctggtctcaaacttctgggctcaagcaatccttttgcctggcctcccaaagtactgggattacaagtgtgagccactgtgcctggccccctgaaaatctttttcaccggacaggcaagacctcttaagtgatgtttccaacaatccacttttgcccttatccctagctacagaccctagagactagggaaatgggtacaagtatctgaaatcatctgattctccccacctcttccgtccattagagcctgtggggcccggatagtcagccgaccagaggaactgagagaagatgatgttggaacaggagcaggcctgttggaaatcaagaaaattggagatgaatactttactttcatcactgactgcaaagaccccaaggcctgcaccattctcctccggggggctagcaaagagattctctcggtgagtcagccttggatgtatgaccagatgaagtagatcactgaacttcttgagagtttcccaaagggcctaaaataattctgtggtccatttatagctatttaatttggacctatagccacaaattccttttctgcttcctttttttaattaaataatttaaaattttaaaaattgtagtaagcataaaatttaccatcttaatcattttaattgtacagttcagtaatgttaagtatattcatgttattgtgcaagagatcttcagaactttttcatcttgcagaactgagactctgtacccatcaaacaagatatctcatctcctactccctagcaacaactgttttcttattttttacgttgaagttataaatattacttttttttcctcattgaggctaagtaactttcccaaaggcacatagctagtaagtaggagagtgtacaacaccatgcaacctcctaaaagatacaactaggaaggggtggaataggttatggctcttatctatcaagatacatgctgtttatttccatataactggcaagggatgaaataggttattgctcttaatctagcataatggacaaagacctaactttatggttgggtgacacccccaaaccctttgcagataccactccccgccatcctatattatagtcgtgtgttatatattctcaggtaaataatctgccctgcccagtaggggttccaaggaccttttctagttgccctccttggtggtttactaactttggcagttaggaagtccttttggtgcctccgattttatgagtcatcaagctttggcttcatactgtctgtttgcttctccaaggaagtagaacgcaacctccaggatgccatgcaagtgtgtcgcaatgttctcctggaccctcagctggtgccagggggtggggcctccgagatggctgtggcccatgccttgacagaaaaatccaaggccatgactggtgtggaacaatggccatacagggctgttgcccaggccctagaggtcattcctcgtaccctgatccagaactgtggggccagcaccatccgtctacttacctcccttcgggtgagttcctctccaagcttttctcttgatggagcagggaaagctgtgtttgccctgaggggaagattcttatctggctatccaaattctctttatagtctattccttgaaatctttctctccttttagtctttgacttgtttgctgtcattgccatttttccctgtcccttccatactggtccattgttttttacttcatttcttacctgatgtttcctgttaacttattttcccctttacttcttgcttcaattgcaggccaagcacacccaggagaactgtgagacctggggtgtaaatggtgagacgggtactttggtggacatgaaggaactgggcatatgggagccattggctgtgaagctgcagacttataagacagcagtggaggtaaggcaccctaagatatgtacacgctgttttaattaatttatttatttatctatttatttatttttgagacgcagtctcagtcacccaggctggagtgcagtggtgtgatctcggctcactgcaatctccgcctcccgggttcaagcaattcttgtgcctcaacctcccaagtagctggggctacaggcatgcaccaccactcccagctaatttttgtattttttagtagagatagggtttcactatgttgttcaggctggtctcgaactcctgacctcagatgatctacccaccttggcctcccaaagtgctggagttacaggcatgagccaccatgcccagcctggtctagtcttgaagggaggggtaaagaaggcagaatattcctctaaggtattccaaggcattctatctctttaattatctttagctcgtactaaaagcaagataatatagcacaatctgtatcacttgcttagggagaagtgcatttttttttttttttttttttttttttgaaacagactatcgctccgttgcccaggctggagtgcagtggcatggtctccgctcactgcagcctccacctcccaggttcaagtgattctcctgcctcagcctcccaagtagctgggattacaggtgcctgccaccacacccggctaattttttctatttttagtagagacggggttttaccatgttggccgggctggtctcgaactcctgaccttgtgatccacctgccttgaccaaccaaagtgctaggattacaggtgtgagccaccacacctggctgagaactgcattttacattcaggactgaaaaggccgggcatggtgggtcacgcctgtaatcccagcactttgggaggctaaggcaggtggatcacgtgaggtcaggagttcaagaccagcctgaccaacatgaggaaaccccatctctactaaaaatacaaaattagccaggcatggtggtgcaggcctgtaatcccagctgcttgggaggctgaggtagtagaatcgcttgaacccgggaggcggaggttgcagtgaaccgacatcatgctactgcactctagcctgggtgataagagggaaactgcgtctcaaaaaaaaataaaagactgaaaagatagatttcagacaaaatggcagttccatagtagcatctaggtgatagatctaaaggaaagaaaagtgtcctttccttctctgctgacctctttgcatctgtggtttttctcctagacggcagttctgctactgcgaattgatgacatcgtttcaggccacaaaaagaaaggcgatgaccagagccggcaaggcggggctcctgatgctggccaggagtgagtgctaggcaaggctacttcaatgcacagaaccagcagagtctccccttttcctgagccagagtgccaggaacactgtggacgtctttgttcagaagggatcaggttggggggcagcccccagtccctttctgtcccagctcagttttccaaaagacactgacatgtaattcttctctattgtaaggtttccatttagtttgcttccgatgattaaatctaagtcatttgagaaagt

SEQ ID NO: 36 - DNA, 26723 bp, Homo sapiens
  source 1..26723: mol_type = other DNA
gccggaggcggcgagctgagcggctctgacaggacgggtcgcagggggtcgcctggccggagctgggctccgagaatcccgggtgccagcaccagagcagcggctctccgcactaactctcctctcctggtcagctgtaacccctgccgcagagcccggcaactttcagctgtcgcccgcggagccccgagggccactcgcctcacctgtgcgtgcagcgcctcgcgcgccctgtccggctgcggagatgagcgaggtgagcggtgcggcccccggcgctgtcggcagggctgcggcggggagggtgctgcggctcgggatcccagggaggcgagggagagcgaggcagaccggagccgcgaagaaccctccaggggcgccccactgccctcctaggaaagctcccacctcggggcgctgggaaacgattggaagacggggtgctttcagtctccctactgtggacggcgcttttgggggtaattggaatcggctgtagagtccggaagcggggatgctgagctctcaggtggtaggtcatcccctctggatactgccccctgcatctgtcttactgcccgagattattctggctccccttacccccctcacttcgcttctgtcctctctctcctagggatgtaaggcactcacattccttctgtagcatctaacaagaactccatccctggcccccggggagggccactgtgccccttttagaaaggtggcatcctgccctccactcattcagtcaggaacgttggagggacgtgttccggtatttagaagcccctgccagttgctggggagatttccccttcaagaatagacctccctctgcagtgcttgttacaaactaggtcttccggcaggctctgtggtgttcaccgtggccagacccaggccattaactgatttactgttttcaaagaacactgttcatggggtgggggagtggggggtcaaagcagagactttggaaagacgtctcctattgtctatttgtaggcacagtctcatctccagaaacaaggatcagcctttccaagtgaagtcagtctggttagtggcatcacaagcttgccctctgcaacctctttcctagtacccacatcgttgtgttaaatccaactcctctgctatatgtcagatatgtatgtaggccagctacttacctgtgatgtagccttaggcaaagtacaaaacctttgtttcattttttgtctgtaaaatggggataatactggttgttgtaataattaaatgagataatatatgccaaatacttgaaacaggacctggcactcaatctatattagctattatctttctgtttcttttttcttcctctcccattagagtattacagaaatttaacagaagaattcccaaagacattagattactgaaggaataggaccctggagcctgggttccagtttagatactaaaaatgaagatctctatgactcctaccaaaagttgtcacccagggagctaattagtgccaactgctgtgttgtcttggttgccgtgttcactaattttatcctggaaaattcggctagtctgggggctgcagatgaaccaaagtggtttccagtccctcagctggttgtgactctgatgatggcaatctttcagaaagaaaagaaaaaaacgcatcaacctcctctttcacctctaatgtgggaagagaggttttctttgccccttttcactgaggtctagggttcatactactcctcccaccccgagcatttctaaatctgaaagttgtaatccaagccatcccctgggagtttgtgatctgaaggctatgccaacgtgaggatttgcagttagcctgtgttttctggggtaagtgcacagcccctttgtaggacacactacaggggctggcatttagagtggtatttggtggaatgagaagcctgttttgtagcaaaggaaacaattcggtgtttgaggagaaagccaagtccgctccctcctgactcagcagctgaatttggttagccttcatcaggggctcagtagaatgatgagagaaggatccacggatggagactatcagtgtacccaagtctgcccagcctcctaggctatcagagcaaactggttttaactagcaatttagtcatagaagctgtctcctaatacagagctgagcctggtcttagggatgaatacttataaaatccagaagcagctgtctctgaatcaggtcacaaaggggtctctgcttctctaggggccgagatccagcctgttttcttcctcttgtaaaagctatggtaaaaggtggaagtgttgcccagagctctagggagactccaaactgcttcatttctctcaggccagccccatggggctcctctttcaggtggaagagccccgcccaggaaagccctgtgtaccttgaatcttacgtaagtttcacctcccccaactgcttattttcttgcttcagagaaagtgcatgaagtgagacaatttgggatgtctttaagagactcctatttcaactgaagaacaaaaccagggaggagtctccagacctagaacaaccaacagtgcaggggttctggtggggctgctggggaggatctctggctctgccttgcctttgtggctctttgctgtcactcattactgcagtagagcatttccctgtgagtgtgtgtgtgcgttcgtgcacgaaggagctgcagggactcatctccaatttgtctgcattcacagctgcaggcgggacttgattgctgtggatcacactctatctcctgtggtttaataacttttccctagtttcagtgaaggatgggaatgagagatgtgttcagtccctgagggctcttccctataatcctttttcatacagtgtagctggctgcttaaagcagaattgcaggttcttttgtaatcctgttgtatttctcatctgcgagaagcctagctaggggaatcccttggtccagcagtcgttctgctgaaatgggagtcatggaccattggtgacagtcttcatggtgtctgtcctgtgttttggctggcaggggctggggcaagggacagatcaactagaaatatcatttaggggagagcttagacctggtgctccttcattatcctgtttgctctcttcttatctaatgagaatgggatatcacactttggagatccacacactctttcctgtgcacatctgtctgcatctgccaccttcccaacaagggaagttcagtcagagtgatactattctgttatgtctcctgtgaaccagttgttagggaacctggtgtggacttggaggagatccaagtttctctctctcattggtatgttacttttattatggttatattggatatacaaaatagaaagtctagtcacttactgctattgaaatgccttctaccggccaggcgcggtggctcacgcgtgtaatcccaacacttggggaggccaaggtgggtggatcatgaggtcaggagatcgagaccatcctggctaacatggtgaaaccccatctctactaaaaatacaaaaaattagccaggcatggtggcaggcgcctgtagtcccagctactcgggaggctgaggcaggagaatggcatgaacccgggaggcggagcttgcagtgagccgagatcgcaccactgcactccagcctgggcgacagagcgagactccatctcaaaaaaaaaaaaaaaaaaaaaaagaaatgccttctacctctggaaacatctgcgttggagtgaggaaaatgagaacttgctcatccctttcttagtctcccatttatgttgctggttttagctgcttaggcaggagcctctgactggtagaagtggatgactttgtcatcctgtgacctggaaatatggatgattctttctctcaactacagctgtgatttgttagctctgagaatgtcatctttatagggtcaggcagccataagtaatatggctgaagtccaagtgcacaaacttgatgcatctttcatgtctgcctatggagggtcttaactgatggaagtggtggagatagagttgcaggcagagaggatgaagaaagatgaataattgtctcttcaaggtggtggttctatgcatgcctcccactattttctttttacttttctatatttctaaattgtctttcatgagtctattttatcatagagaaaaataaacttagttctgcaaaaaattcttcaaaatagaaagatatatctttcacccagaaaacctcaaataaaatatcaaaacattttagtgatgcgattttagatttgttaaggaacgctaaagatcatctggtccaatattctcattttacaggtgagaaaactggggcccaaaacttatctaagtttacactgtactagaaccaaggctagggcactgtacttctgacttctcattccaaaagaacattccacaagactcctttaacattttacttcagtaaatacagggtttttgtttttgtttttgtttttgtttttttttgggttggagtcttgcactgttgccagggctggctggagtgcaatggtgaatctcggctcgctgcaacctccacctccggggttcatgcaattctcctgcctcagcctcccaagtagctgggattacaggcactcgccaccacgcccggctaattttttgtatttttagtagagatggggtttcactatgttggccagactggtctcgaactcctgacctcaagtgatctgcccacctcggctcccaaagtgctgggattacaggggtgagccactgtgcctggccacagaattatttgattagcatgtaaacttttaatgaatatatttcaagtactttttttttttttttgagacaatatctctgtcacccaggctggagtacagtggcatgatcatggctcactgcagcctcaagctcctggacttaagcaatcttcccacctcagcatcccttgtagctgggaccacaggtacacgtcaccatgcctgcttaattttttttgtattttttgtagagacaggtttcaccacgttgcccatgctggtctcgaactcctgagctcaagcagttcacccatctcagcctcccaaagagctgggattacaggcatgagctaccatgcttggcctcaatactttctttccttttttttttttttttttttttttttttgagatggagtctcactctgtcgcccaagctggagtgcagtggcgccattttggctcactgcaatctctgcctcctggcttcaagtgattctcctgcctcagcctcccaagtagctgagattacaggcgtgtatcaccaggcccgggtaatttttgtattttttttagtagagacgagatttcactatgttgaccaggctggtctgaaactcctggcctcaagtgatccacctgtcttggtctcccaaagtgctgggattacaggcatgagccaccatgcctagcctcaagtactttttataagaaatataggctgggcactgtggctcatgcctgtaatcccagcatttgggaggccaaggtaggtggataacgaggtcaggagttcgagaccagcctggccaacatggtgaaaccccgtctctattaaaactacaaaaattagccaggtgtggtggcagccacctgtaatcacagctactcgggaggctgagccaggagaattgcttgaacctgggaggcagaagttgcagtgagccgagatagcaccactgcactccagcctgtgacagagtaagactctgtctaagaaaaaaaagaaaaagaaatataagcaatgtagctgagtgtggtggttcacgcctgtaatcccagcactttgggaggctgaagcaggaggactgcttgagctcaggagtttgagacgagcctgggcaacatgacaaaaccctgtctctactaaaaattaaaaaattagctgggcatggtggcacatgcctgtgatcccagttacgtgggaggctgaagtaggaggatctcttgagcctgggaggtcaaggctgcagtgagccgtgatggcaccactacactccagcctgggcgatagagtgagaccctgtctctcacaaacacgaaaaagaaatataagcagtgtgatctaataatgctgagcaagaggatagagacaggagaccaacattagataatattttatcaacagggtacattctggtagaatactagtcagggcaggtactatccatcattacgcaggatgcctagtcaccttaaaaatgggtgcagaaaattgggtggagtaggtaagctgataggagtgaaggaagtagggagcctggaggccctcttttcatgagttcttaatttcaatgttcatcattgattcccataattgcaggcaagcaggtgtctaagtaaaattggtgcacctgatgaacaaacagcctctgggtattcagtcctctttcgtttggccgtttgacttccaagtcaggagttcaaaggctttgggaagagaatggtaaggccagatgtgatggctcatacctattatcccagcactttggaaggctgaggtgggaggattgcttcagcccaggagtttgagactagcctgggcaccatagcaagaccccgtctttacaaaaaataaaaaattagccagatatggtggtgtgcatctgtagtcccagctacttgggaggctgaggtggtgcttgagtccaggagatcaagctgcagtgagccgtgattgtgccactgcattccagcttaggcaacagagcacgaccctgtctcagggaaaaaaaagcaagaagatggggaaggaagaatgagaagaatgcattaggctggcaaggtaagtgatgaaatcttactgggattcaagcatcctgagtgcatgattttctaaatccatactccgacctgctgctcaaaatggcttgacttgcgttggaattattttagttacaaaagtaagctaaatcagagcagatccaaaaccactttttttttttttttttttttttttgagacagtttcgctcttgttgcccaggctggagtgcagtggcatgatctcgtctcactgcaacctcacctcccgggttcaagcaattctcctgcctcagcctcccaagtagctgggattacaggcacccaacaccacgcccggctaatttttttgtatttttagtagagactgggtttcatcatgttggccaggctgatctcaaactcctgacctcaggtgatccacctgcctcggcctcccaaagtgctgggattatgggtgtgagccaccatgctggcctcaaaaccacttttctaagagatctgcatccctgaaaggtgcccataaacaggtacctagaaatctagaccttgtcacagtctcctcactgaaggctgatttctatttccctccaggcttattcccgaagccatgcccagtaccccacccagggaaaaggggtacatttatcgttctgttgtccttggtgctgcctccctcccacacaaagccctccagctgagtgtttgctttgtaggctgcagcggggattaatacgtttattttgggacattaacaccatgggtgggatgcacattgaagattatagtaataaatgatgctttggcactactctctctcccccattccctaaacctcagtgtggggtgaaggcacagctctaagctgtgtgcagagcaccacaaataaccactcattaaactgtggcagcccatgctggggggaacaggctggggctgttgactcactgcataccatgagctggcatggccaaggaattctgcctctgactccagttgggggtacttctattccaggaaacagggatggggtggctaaggggagaatcagacaagggggcttgggagctagggttgtttaggttctatttttgtctcaggatgcatctgagatatagggcattgggggaaatagtatatatattaagagaggaatgtgtgtatgtagaacctgcagtaaggattcctagttctttttctgttattatcttgagggtgaccttgagcaagtctttctgaagctgtttaaggactgcagctggttgctgcactgaaagaattgaaatggttccaacggtgctccaaaaacagcagtctagggtcttccaggggcactagaggatcccagaggcctctataaggttttttagcagttactttcatttaacattggaggagaatatgtcagaagggataaaagggtcccagggtggagtgggagggtgcaaagcctctttgtcgccacttggaagcagatccactaactctcctgtcccccttcacttcctgcacctctagaacaagcagggagcttaggaagcctaggatttatgtcaatacaaaggcaaggaaagggatttttaaaggctagaatttaggatttttaggattcagtccctttttaggtttctctgccttggactgtaggacaggattctgagttcctgtgtgtattcatccaaactaagtattctggcagtaagtaccaaaatgtgtttataatgtgtttttatttacacagcacccaagctatgtcatgcaaatacaggtataggtagtctaggtatgatgaggtgatccttgttcctgtctgttgctgctgttgacagcctgtgatctctctttaaagagcccagtgggctgaggaatatggggaaatctggatagtttatcttttccaaggttctaactcactgcttggagcagaaggggcaacactatcttcccttttctggtgacagtggttgctgtggcaacgctattaaagatgaaagccacaaaggaaggaggaaacacagcccaagaagggagcggggaagattgggcctagagttataggggatctgttccccagtagtggcagcaggaaaacagcaccaaagttgctaccgttttgaatgtctaggtgcttgctaccacaatactatgttttgtttttgtttttttagacagagtctggctctgttgcctaggctggagtggagtgcagtggtgcgatgttggctcaccgtgacctctgcctcccaggtttaagcaattttcccacctcagcctcctgagtagctgggattacaggtgcccaccaccatgcccggctaatttttgtatttttagtagagacagggtttcaccatgttggccaggctggtctcaaactcctgacctcaggtgatccccctgccttggcctcccaaattgttggaataacaggcgtgagccaccgcacctggccgacaatactatctggtgaggcaaggaatagacttacacaatcattttcatgacacaaaagtggacgaaaggactcaatcaaggagtatagtttgttgactcctgagtactaatctccttttccctgtggtgtataacttaaaaaaagagatgtctcagggttcccagaggtttagagccattctcagcacttttggggacagacattgggaagacagggagattgtgatttctagggcttgtttagaaggggaaaaaaaaaagtatttatgaaactcctacggtagcagaataagcctccagggcccttcgagcaatcccaggtattctcttcctctttcagttccacttagagaaaaactactctgtggcaactccactctctgattctagtattttaaccctgcaataaatacctcagcatcttgacctaaacctattcttatattcaaccccaggttatattactttggaataataactatttattgtaatatgtgctatgtattttacatacatttttctctggttccttttacctttttttttttttttttttgagatggagtctcgctcttgttgcccaggagtgcaatggcacgatctcagctcactgcaacctctacctcccaggttcaagtgattctcctgcttcagcctcccagatagctgggattacaggcatgcaccaccatgcctggctaattttgtatttttagtagaggtggggtttcaccatgttggtcaggctggtctcgaactcctaacctcaaatgatccacccgccttgggctcccaaagccctgggattacaggcgtgagccaccatgccctgcctttttacctttcaagatagatattatctctcttctgcagatgagcgatctgagcacagcaaagctaagtaatttacccaatgtcacacagctaggaatgacagagctgagatttgaacagatagtcaatgcagatccagggtatgaatccagatctgtctgactagtgtgccacattgctgctcccaggaatttgaagcctaacagaattttattttattttttttcttttatcctcatcctctatgtaatggtaaggcctaagcaaattttaattcacataaatatccattaagtacctactattacaagacatgggttgtagttattgtagcctagacataaacaaatggaaaacatggactgtgcttcaaaggaaataaaatctatcagggtgctgagggtggggaagggggggtaagacattacctgtacctgtagtacaggtaatatgaaatatacttcatgagaaggtctttccttcattctcagctctttttcaggcacatatgttaaagtgaaggaaagcaatgacttggcttctgaatcccttttccacaacctctgaactggctacagaatggaggccttcaacttctgaaaacaaatttgatttcagaagtttagatgaggttgcaaataaaacagagagctcccttcatttatttaaaaaattattagtgtaaatcatatgtaaaggatcaaaaaggatcaataggaattaatgatacaaaaaggaggcagggataagagaaccatatgccaaggtcctgaggtgggaaggaacatagtatgttccagagatgaggttattgaggtaatcagaggctgaacaatgtagagccttttaggccgtattaaggattttgggctgagtgtggtagctcacacctataatcccagcactttgggaggccgaggcaggagtactgcctgagtccaggagtttgagaccagcctgggcaacatggcaaaaacccatctctacaaaaaatacaaatattagccgggtgtagtggtgtgtggctgtggtcccagctactcaggaagctgaggtgtgaggattgcttgagcccaggaggccaaggctgcagtgagctgagattgtaccattgcattccagcctgggcaacagaataagaccttgtctcaaaaaaaaaaaataaggactgggcgtggtggctcacgcctgtaatcctagcattttgggaggctgaggaagctggatcacctgaggtcagaagttcaagaccagcctggccaacatggtgaaacccggtctctactaaaaatacaaaaattagctgggcatggtggtgcatgcctgtaatcccggctactcgggaggctgaggcaggagaattgcttgaactcaggagtcagaggctgcagtgagctgagatcatgccactgtactccagcctgggcaacggagagagactctgtctcaaaaaatatataataataaaattaaaaagaatttcatcttttatcctaagagcatcagtaaccacttgggttgttacaattgctcatgtcagagccaactgtgttagggtgtgcaatggtctgaatgtttgtgtacccccaaaatccatatattgaaatcctaacccccaagatgatgatactaggaagtgagggctttgggaagtgattaggtcatgagggcagagccctcataaatgggattagtacccttataaaagagaccccaggctcaaaaaaaaaaagagagaccccaggctaggcgcagtggctcatgcctgtaatcccagtactttgggaggcttaggcgggaggatcacaaggtcaagagattgagaccatcctggccaacatggtgaaacgccatctctactaaaaatacaaacaaaattagctgggcatggtggcatgtgcttgtagtcccagctactggggtagctgaggcaggagaattgcttgaacccaggaggtggaggtcgcagtgagctgaaatcgtgccactgcactccagcctggtgattgatagagggagactccgtctaaaaaaaaaaaaaaagagaccccaaagagatccctctccccttctaccatgtgaggatatagcaaaaagatggccatctacatatggaaagtgggcctcaccagtcattaattcaggttgtttccagtttttggcaattacaagtagagctgctataaatattaatttacaaatgtatgtgtgaatataagttttaatttctcttggataaataactagcaataggattgctggttggtatggtaaatgtatgcttaagaaattgccaaagtagctataccatcttgcattcccaccaacaacgtatgagagttccagttgctctgtatctttgcctctacattgtattgccactaaacagaaaatttttaataggtatgtggtgatatctcattgtggttttaatttgcatttcccaaatgatgatgatgttatatatcttttcatgtgcgtgtcatccatgtatcttctttggtgaaatgtctgttcaaatattttgcccatttaaaaaaactgtgtttttattatagagatttaaaagttctttcaatacttattctggatgcaagccttttatcagatatttgatttgcaaacattttcttctagtctgtactttgtttctttttttttcccctcacccccaagacagagtcttgctctgtcgcccaggctggagtgtagtggcatgatgttggctcactgcaacctctgcctccagggttaaagcaattctcccacctcagcttcctgagtagctgggactacaggcacgtgccatgacgcccggctaatttttgtatttttagtagaaactgggtttcaccatgttggccaggctggtctccaatgcctgacctcatgatctgcctgccttggcctcccaaagtgctgggatgacaagtgtgagccactgtgcctgatctttttttcttttttcttttttgagacaagctctcactctgtcacccaggctggagtgcagtggcatgatcatagctcactgcagccttgatctctgggttctagtgatcgatcctcatacctcagcctcccgagtagctgggactacaggtgcatgtcaccacacttggactaaccttttttttttttagtggagacaaagtctatgttgcccaggctggtctcaaattcttggcctcaagtgatctgcctgccttggcttcccaaaatgctgggattacaggtgtgagccaccgtgccctgcctaattgtacatattcatgggggtacatagtgagtgatattttgatacatataacttatagtgatcagattggggtaatccctttttttttttttaagcaaattcttctagatcctgatttctttttttcttttttaaagcatttccctaaacttttaacattggtattcctgggctgggcacagtggctcacgcctgtaatcccagcactttgggaagccgaggcgggtagatcatgaggtcaggagttcgagacaagcctggccaacatggtgaaaccctgtctctactaaaaatacaaaaattagccaggcatggtggtgggcacctgtaatcccagctacgcgggaggctgaggcaggagaattgcttgaaccctggaggcggaggttgcagtgagccgagatcgtgccactgcactccagcctgggcaacaaaagcgaaactccgtctcaaaaaaaaaaaaaaaaaaaattggtattcctcaatattgacaattcctattgtccgagacctgcttctttcgtctctaatggtagttggaaaagaaattcaggttgagggaggcttttatttatttatttatttttatttaaggataaatatatttatttatcctaagtcatatatttatttacttcttaaggagagagggaagctttatatgtgagagagtaaagggaactgattgtcaagattcctgaggaggagaagggtgatgggatctagagctcagatggaaggacaagacatcatctgacaaatgctctgggaggaggcagataggcaagtgtgtggtgcttctctttcctggaagtgggaggaaatgaaaagggtaggtactcctggggaaagtattagggaaaggaggaatgttactatgtcatgttcctctctgcaatctcaaagccgaaagaaaaaaagacccttaagccaacaagactctccttcctttccttcttccccatgggaagggagaatctgcagctttgagctgcagaggaaacaaaagagtactcatggggaattggcagtatcaccaagatgatggaatggaacactggtacacatcaggctcagaggcaaggattaaagaaatataggaaggtaggcaaggaaagcaactaaaaccctctagggaaaataaattaaggaaaagaaggagttgatgggcctcacagttgctaattagtgtttggtatctattgagaagtgagaaacatttagtcctggctggggagggtgtgggtggctcacacctgtaatcccagcactttaggaggctgaggctggagtattgcttgagtgagaacctgtttcaaaacaaacaaacaaacaaaacccccaaagtcccattcagtcctatgtgggcagtgaggctgaacgaaccaagctccaagctcactagaaacttggaataacaggcttgaatgacagtgagggaggcatttgaaatggaagccagtagaatgatcctacacatggaattctcagactctgaagggctgggttctggctctgggagtaaagaatgtaaactatggctgtcctccaggagtcagcctcgtgtatcaggaggcccactgagcaaacattaagatgaaaaccagaatcagggtgattagatcaattagagcagaaatctgagtgataggcgtggtctgggatcaggttgtcaaatattaataacatgtaaaattgccccataatggcaggactggaccctgttccccaagttccctttggagtatatgtgaagatagcattgtatacgcatgcacatacatactcatacatccccatacttttgattggagattgagagatagtgtaggataatgatcaagagcatggattctagagccagactgcctgggttcaaatcctagctttgtggtttgtttgttctatggctttgggcaagataacctctcaacttcaatttccttctctgtgaaatagaaataataattatacctattttatagggctgttataatcattcaacgtgttagtgtttataaagtacttagaaaagtagctggcacatagtgtattatatatgattgttcataaagtaaagcgaggtgacattctgaaatccttgatttcttccagttcccccagttgggtcctataaggagaaggaaggatttcctaaaccatgtcattgttgttatttctggtcagaaaagctcagtatcgaaaggagtagaaggctaggcactccagcctgggtgacaagagcaaaactctgtctcaaaaaaaagaaaaggagtagaagagcacctgagaggtttgtgatccatacctggctagaatgaggagctgagaagtgctgacctgttacagctcttgcagtttggcctcactcctctgcaggtatgagtttttgtgagaaacactagagtatgtggtctctggtcccagggtgtacctctgtgcctcctttgtttatgtgaagtatggttagtctgatggcttgcagatgcgtataccagaggaccttaattcatctaaaattgctgcgtttctggaagataaacaggagggttgaggcagagaccagagactaataaaggactgagcaccacatagagggtgggagcagacaacttgtgatctaactgcccccacccctaacctcagcaaatcacaaacaactaaatccagaagagtgtccagagtggctatttcgagaactggctagaaagagggaagaggggcaggaggtaaaagctcctgcacccctttcagtggaaggtaaaagggaaatttcaaggggcattgtgagtaataggagttttcttctccttgcagcatcctttgctggtttcccaagtggagaccccacttttagattattatctctcataaatttaacctaaatggagctagaaaccccggggggtggggggaccagatggcagctgagccactgctccattccagggccagtgatctccagagagacttgggagggaagcagctggcagggcagagggaaagtggcagcctgtgtggtttagtcctgacacacattcctgcttattctcaaggtctgctgatatgagaaggaatgtagaggaaacagccacctgagggaagatatttagaatcagagtccagtggccgggtgtggtggctcacgtctgtaatcccagcactttgggaggctgaggcaggcggatcacgaggtcaggagatcaagaccatcctggctaacacggtgaaaccccgtctctactaaaaatacaaaaaatcagccaggtgtggtggcgggcgcctgtagtcccagctactcgggaggctgaggcaggagaatggcatgaacccaggaggcagagcttgcaatgggccgagatcgcgccactgcactctagtctgggcgacagagcaagactccgtctcaaaaaaaaaaaaaaaaaaagaatcagagtccagattttccttcaaagaggaggggttggggtgagagaaaagatctgatggattaagggaataggcttagagtcagacagagggataatggctaaatcatagatcagagtccgagatttactggcaaaagagagcataggatttgaagtcagagatcatgagactatagaacttgcctcttaacctatgatcctcttgtctggacagttgctgttatcctattaactgcatactccatctaggtcatactttttttttttttttttttgagacagagtcttgctctgtcacccaggttggagtgcagtggtgtgatctcagctcattgcaacctccgcctccctggttcaagcagttctcctgccccagcctccccagtagctgggattacatttgcctgccaccacgcccagctaattttgtgtttttagtagagatggggtttcgccatgttggccaggctggtctcgaactcctgacctcaaatgatccgcctgcttcggcctcccaaagtgctgggattacaggtgtgagccactgtgcccggccaggtcatatttttacagtgtggacaaacctcttgtgatgacagtattcctgtggaaggtgtcacctcagtaactattgggacattttatcgattatgtgcaaaattaagcaaagaaaaacatttgaccacagggggattatggggagagaaagagtaacaactgggtcagtctcctaagtctcaggaacagtccttcctctcatggaatctttcttttggtcaaaggggaacaagcaggaattccatagggtttcaggaacacctttatgtatgttcttccagattttaaaatgaaaatacatatgggcctggcgtggtggcttgtgcctttaatcccagctctttgggaggctgagataggaggattgcttgagtccaggagtttgaaaccagcctgggaagcatagcaagacccagtctctacaaaaaatacaaaaattacccaggtatagtggtgtgcctgtagtcccagctacctgcaaggctgaggtgcgaggatcgctggagcctgggagatcaaggctgcagtgagacatgattgtgccactgcactccagcctgggtgacaaagcaagacttatctcttaaaaaaaaaaaaaaggaaaatatgtgtgtgtgtgtatatatatatgtgtgtgtgtgtatatatgtgtatatatgtatgtatatatataaaaaatatacatataaatataaacacatatgtatcttacacaaaatttggaccatataaagttataactgagtttgaaaaacttgcccatgtcaaatacaatatcgcattagcatttttaataatttttttctaaattattattttctttccccctaatgttttattggaaccatttaccagaaatgaaagaatagttcaagccaggtgcagtggcattacacctattatctcagctatttaggaggctgaggaggaagaactgcttgagcccaccagtttgagaccaacctgggcagcatagtgagaccccatctcgaacaaacaaataattagagttaataaatgatttcagcaaagttgttggatacaagatcaatatataaaaatcagtggtgtctctaaacactatcaatgaaaactccaaaaaaggaaattaaagcaatcccttaaggaaagaaaaaatagttcagtacatatccacgtcttccacttagattcagtaattgttaacatattagcatatttgtgtcagcatgtgacaatatttggtcttatggagacagtacagcctgttggctaggagtatggagtcggtctacctgggttccaaagccaggttcactgttttctattgtgtgatttgacttgggcaagttcctcaacatctttctaagcctgttttccttaactataaaatagggtgccatcttcttagagatttcagaggattaaatgggataatgtttgatatataataaacaatacatattatttgggtccttatctcctctaaaatcacttagcctggaagataggaagagtatcttgattggtttcaccttaaattcacagccattaacccccaatgtgccctttgtgctatctggtaatcctgctacatctttagggtctagttgtgttgcctaggctggtcttggacccctgggcttaggtgatcctcctgcctcatcctatatctcaccagctcactcgctctcttactttcttagataatcctttcagtcattctcctctttcctcaaacatttaatacttccgtgccttcttcactctcagctgacaactgtctttcgtgtttcattgagacaatggaaacaatcagaagaaaacttttatacatttctacgtctgccacctttcctgcatctattccttcattcctatattgtagataaactgtctgtattcttatcgaagggcaacccctccacttatgcaccagatctatttcctcttgcctattcaagatatcactctggtaattatcccctctcctgtatcatcagtttttttcttccttactaaatcatttccatcagcatttaaaatcccccatcttaccaagccctcccataaccccacattcatctccaactaatgtccaattcctccaccgccctttaaagaaaggctctttgatagagctctctgtactgaaaaatatacaggcagatccagcttattttaccatgaaacttgtctcaagtcttagtatttcctattatctccatcactaccaccctagtccaggccccatcatcttgcttgtaccattgcaagactctcttgttttccctggtttcttgtacctctattttctttctttctttccttctttccttccttccttcttttttttcttttcttttctttttctttcgagatggggtctcgctatgttgcctgggctggtcatgaactcctgggctcaagtgatcctcccatgtcagcctcccaaagtgctgggattataggcatgagccaccacgcccagccagtagtcttttttctacccatctgtcagaacaatcctttaaaaacatgacagaccatgttttcctctgccccaaaacctataatgccttttcatcagctcagaaaaaaatcgaaattctttgtcctgttccaaagacacatattctggctatctacctaacctcatttcttatactctctcccttacatagctccagccatgatggtctttctttctctttcctcttccccttcccattccctcactcttgttgctgaggctggagtgcagtggcgcaatctcagctcactgcaacctccgccttccaggctcaagtgatcctcccatctcagcctcctgagtagctgggaccacaagtgcacgccaccatgcttgattaatttttgtagtttttgtagagattgggtttcaccatgttgcccaggctggtctcaaactcctggactcaagcaatccgcccaccttggcctcccaaagtgctgagattacaggcatgagccactgcatctggcccatgatgattttttttactcttccttgaacatacaggcacaaacctgcttcagggactttctagttgatatttcatctgcccagaggatcttttcccacacattcacatatcttattcttacatcgtcattaaagcctctactcaaatgtcagtcttcagagagactttcctagactactctgctttattttctttcatggcatttgtcactaactgatgtatttgttgaataagtgcagggactttcttttgctcactgctgtatgcccaacacctagaacaatacttgccatgtgattaggcactgacatatttgttgaatgaatcttttgcttcttttatacctcttgagtgtatagaacagtgctgaacacaagtaagtgcttgataagtatttattgaagtgagatggaaacagcataatctacagaacataaattggattctatcagtttctcaaagcagaacccttacgtctggcagtcattcaacagaggtctgcatctgtaaaatgggggataatattaaatactccactaagctgttccaagaattagatgagaaaacatttatgaaagcacccagtttttgtattttgttaaatataaagtacttaaaattgtgaggtgaataaacagactccaaaagtaccaagtgcaggaatgattctgtctccagatgaaccataccttgagactgatgaatgtccagatgaagtagccttattaatataattttgaggaaggggaattactatttttttttaaagagctaggatcttgctatgtcttgccaggctggtcttgaactcctgggctcaagggatcctcccaagtagctgagactacaggtttatgccactgtacctggccttactattacgtttaactctccatctgagcagggaacctgggaaaaagcatagacatcagctgattagtctcacttcaaattcatgacctcctgccttatgaggggccttaatgtctccagcaatcctatcactgttccttagtccatttactctcctacttgcctaggtgagtatttctcccttcctttctttaatacctcttccctcctcctcttggatgatgaccttgttacatattttacttcaaaatatagaagcagttagggagaccctccaaatgttccctctgcttgcgccagggcctataagctctgccttccctccagttcctgtgggtatcctagtctagctcttattcaaggccagccctctactgatgcactagatctcaccccctctctcctattccagtaatgattctctttctctcctacagtttttccttgtctactggatcatttccataagaacacaaacattctgtaatttctgtcatcttaaataaaatcttcttgtgacctcatgtctgccaaaagttatgcccccattcccatttttggaattccttctatatttgctgctgcaattcctctcttccttttccctcttgagcccattacaatcatgccctccccttgctcccctccttcatggacacttctcttatcagtgtcaccagtgatctccccatagcaaaactcaatggtcaatccagttctcatcttacttggcttacctgcagaattagacatagtcattctctactccctgaaatattttcttcacgtggcttccacattactgtaatctcttggcttttctcctacctggcttcttctccatcctgttgatttttcttaatttctacaattctttttttttaatgttatttattttatttttattgatcattcttgggtgtttctcgcagagggggatttggcagggtcataggacaatagtggagggaaggtcagcagataaacaagtgaacaaaggtctctggttttcctaggcagaggaccctgaggccttctgcagtgtttgtgtccctgggtacttgagattagggagtggtgatgactcttaacgagcatgctgccttcaagaatctgtttaacaaagcacatcttgcaccgcccctaatccatttaaccctgagtggacacagcacatgtttcagagagcacagggttgggggtaaggtcatagatcaacaggatcccaaggcagaagaatttttcttagtacagaacaaaatgaaaagtctcccatgtctacttctttctacacagacacagcaaccatccgatttctcaatcttttccccacctttcccccttttctattccacaaaaccgccattgtcatcatggcccgttctcaatgagctgttgggtacacctcccagatggggtggtggccgggcagaggggctcctcacttcccacaaggggcggccgggcagaggcgcccccacctcccggacggggcggctggccaggcggaggcgccccccacctccctcccggactgggcggctggccgggcgggggctgaccccccacctccctcccggacggggcagctggccgggcgggggctgatccccacctccctcccggacggggcagctggccaggagggggctgacccccacctccctcccggacggggtggctgccgggcagagatgctcctcacttcccagacggggtggctgccgggcggaggggctcctcacttctcagacggggcggccgggcagagacgctcctcacctcccagacggggtcacggccgggcagaggcgctcctcacatcccggacggggcggcggggcagaggcgctcctcacatcccggacggggcggcggggcagaggcgctccccacatctcagacgatgggtggccgggcagagacgctcctcacttcctagacgggatggcggccgggaagaggcgctcctcacatcccagacgatgggcggccaggcagagacgctcctcacttcccagatggggtggcagccaggcagaggctgcaatctcggcactttgggaggccaaggcaggctgctgggagatggaggttgtagcaagcggagatcatgccactgcactccagccggggcaccattgagcactgagtgaacaagactccgtctgcaatcccggcacctcgggaggccgaggctggcggatcactcgcggttaggagctggagaccagcccgaccaacacagcgaaaccctgtctccaccaaaaaaatacgaaaaccagtcaggcgtggcggcgcgcgcctgcaatagcaggcactcggcaggctgaggcaggagaatcaggcagggaggttgcagtgagccgagatggcagcagtacagtccagcttcagctgggcatcagagggagagcgtggaaagagagggagagggagaccgtggggagagggagagggagggggagggggagggagagggagaaggatttttacaattctaatcactgggatacctcaggattttatcctcttctctatctgaactcagtttcttggtgatcccattcagtctcatggctttaaatgctatccatatatcaatagctccctaactgatatctatagcccaggcccttctctttaactcatcttgactattcaactgtttataaaagcatcttctcttggataattaatagccatctcaaatttgttaaaaaataagctccttatcctccccctaaaacctcctctccctgttttctacatctcaggaaacggcagctctatttttttcagatcatcaggccaaaatttggaatcatccttgacccctctctttctcacaatgccatctttcgaatcaacaaatcatattggtcatagctggaaaatatacccagaatccaaccatttaccatcttcatcgccaccatgctgattcaagctaccatcgtctcttgcttggttttctgcaataacctcttaacagatttttctgcatcctttctctttcccttttatgcaaatcagaggtctccagcaactcctcatctcacttgtagtaacagtcaaactccttaaaaagacttctaaagccctacataatctgcttccacccccagttaactctgttctcatctccattaatctttcctctttcctctctccactccaactacactggtctgctattcctcagacaggctagtcacacttccaacccagagcccttgaaaactcctgccagatatctatgagccttacttcctcatctccttcagctatttggtcaaatgctgcttttcagagaggctgttcctgactactctatgtaaaactgtattcctccatttccaccccagtacttactatttcctttcgctaccttttctccatagcacttatcatcatagtagtcattttatgtgctttatttgtctctatatacactggaatgtaagctccatgagggcagaatttctttgtctgttttgtcctctacactttctagcatcagtaaatctttgctggatgaattttgataacttttcctctggtctctgatctcaagacttgcttcttcaaaagactaagggaatgcacctggtaatagggtttgagagtatataagaggtctaaggtgatgatgccttcaaattacttccatgaatatctaatattctgatatcctaatattttttccagcttaataccaaaacatccccagcaaccaaccaggcagctggccaagaggaaaaaggtgagtggggttgggctaggcagtttgtagagcaggtgactgtagagacataaagacaagtagggtgagtctggaatttcctaaagtcagacatgaaaggaataagaatgtggataagtgaaacaaagtaccagtttggaactacagtactatatctataggcttccttctatttttcctagaaagtaaacgatcagtatttcctccttgattttagaaactgggtctggagtgttggggggagagaggtacaagataagaagaaactcatcaaaagtcccagcattatctccatcagaaactgagagaaagctgaggaaagtgagtgtgcattggaacttgaactgtaggatttatgaataagtgatgaaagaagacatttgttgtttggtccaagagtagcagagctcccctaagtaactatagctaattcccagcctaagtaccttgactcagacttctaggggaattatcaggcattcataatcctagcaaaaatttggggaccccacagagtctggcacaaggtggaccttacccactgtattgggggcctggagaaagggtctagagcaggtcagattaactcattaatgagtctcccaactatctgcaggaaaagctggcaatgtcaagaaggcggaggaggaggaggagattgacattgatctgacagcaccagaaacagagaaggctgcccttgctattcagggcaagttccggcgatttcagaaaaggaaaaaggatcccagctcctgaatggccaggcttgcccttcaccttcaccttcatgctggtcccttctctccccttctccacacccatgtatctttatcccttgtccctctagcctttccttgaggcaagttcaacctttatatactcttgtatctggccccctcaagccatcacagaagtagaggcacaagagaggtggagaagatgaagacttcaatcagcagtcactagtctaagggtggaacaatttcttcttggtataaggttctttgatcagtagctatgcctgccctgtagggctaaacaagaggcttcgaggctgagagatctccccaaagaacaatgtgggaaggaggggaaggctttcagagtagggtgcctgagggtgggacatatgcactgttctgctagttacggcattcacactttaggtaacattttttttccccttcagatccttctgcaccaactccaacttcccctcccaggatctaagccacagtggggactggagcctcgttttccccctaggcagacctaaatcaagcagcttaccacaatagtgcatgctgagtagattagttccaaggaagggagactggaatgctggtgtcaaggaaaagcctccctcatcatctagtctaagaccataacgggcagaagcataagaggttccagggccataggagaatgagaagtagggcacatatagggaggaaagaaaagtgaagaagggggaaatctctgaatttttttactgctgggaaaagtgtactacatgaaggatgcttggggctttgctaacctgctcaccgctaaccctccaagtctaaccatccccagaggccacacaaaccaagtgactcctgtagttcccatttgccccactatggagtcagggcaaaagtggaatagccactccatgtgattttagcatgtttaatcattttaacaataaaccaccccacaaatggggtcatttaacctcta

SEQ ID NO: 37 - DNA, 32742 bp, Homo sapiens
  source 1..32742: mol_type = other DNA
cggaatggggcgggacttccagtaggaggcggcaagtttgaaaagtgatgacggttgacgtttgctgatttttgactttgcttgtagctgctccccgaactcgccgtcttcctgtcggcggccggcactgtaggtgagcgcgagaggacggaggaaggaagcctgcagacagacgccttctccatcccaaggcgcgggcaggtgccgggacgctgggcctggcggtgttttcgtcgtgctcagcggtgggaggaggcggaagaaaccagagcctgggaggtgaggggcgggcccgtcgttactttttatttgatgttagtcccagaaacaaccagagctcagttcctactaaactaacgggtgttttctggtgcagcatagaccgaagaagacgagcttgagctgaaattgttcaagttaggcatacatttatgtgtgatttttggaaaggcggtggtaatgtggtttatttggctgcagatgcttgtcagctttttacacatctccgttgccaaacgtttcttaaccaaatccaaaaccatgaatgaaaaggtaaaaatatcacacctaatccaaaattcaaaggaaaagagcagcgcatatatagcactacgcatgcataacgccatcattgttccttttaaaagttcaaggaacgttttacttaattcattgaagttgggagccatttctgtttatttttgtttaatctctgcctcgtggaactgtgatgtccacaaatagtttattttaacaaaacgaagtgtgtaaaatttaacagagtacttttagtacctactcactctgctcagcatcgtggtgctgcaaataaatgagaaaccagatgagtaattataggttaatctttgctactcgttagacagagtattactgcatatatattaagtcatttatatactttatcccacctaggagctcaaactatgtagttggaaagtgtcttcatctctcgttaatgaataaattgtaactgaaattgtacttcgaaagaatgatagaatttggatattggaggaggttccaaaaggaaatactggaagtttgggaaagttaggagactaacttggagcagaaatttcattcaattattaaagggtttagaagcctagcagaaaaatttgaatttgatgtggtgggtaaggtgagtaattgaagtattttcatacaaatattatatgatgcgttaagtgtttttataaggattaatctgatagcagagtgccaaacattagagaagagaggaacaagtgataataattatgaagatactttacacctacgctttctattgcaatactctctaattcagatgcagcttttttggaaaagtgactttttctgaagtctttctttggtccagtccttttatgaacagtttttaaggctgtgacttagatgaaaatgtagaatgcatatttatgctgaagggaacatctaatatgtgatgcatcagaatctggattccaaaagatcccagctctgtggcctggcaaggtggcttatgcttgtatcccagcactttgggaggttgaggtgggaggatcacttgagcccagaagttcaagaccagactgggcaacatagtgagaccctatctccacacacacacaaattaacagggcgtggtagtgtgtgcctgctgtcgtcctggctacttgagaggctgaggcaggaggatagcttgagcctgggaggtcgaggctgcagtgagctgtgattgtgccacactgcactccagcctggatgacaaactgagaccctgcctcaaagaaaaaaaaatagacaaaacgtcctagctctaaaaggaaagcttgcaatcatgaaatttaatagtagaaagtacaaatccttgcttaagtttcaaataatcaatttatacaacaagaacacaagtgacacagcagatggtgaccaaaaaaaaagagagggaaagggggaaaaaaagaacagggagaagccgccttgatgcaagacggtcatgatgaagttcttggagtttcagttgatcagtaagtgctacagcagaggccattatactgtgccctagaccaaccatatctggagtgtcgtgttcagtttgggcactacattttaagaagacatttacaaaatagtgtgtgttagaggaagatgaataagatggtagtttctaaaacaatgtcatataaggagtattttgaagttacatatagccatacataaagaaattatacttactttaaagaagggagggcttagcagaggtgtaatagctttcttcatgtttttgaaaatggtgtcatgtaaacagagattaatatattctatttagttgcagtgactacataggaccaggaggtaaaattaccacaaaacatatttccacacactatgaggaagagttatttaatttggaaccataataaagtgggaaaaagttgcattgagagtgaattctgtgatgttgtcacatgttcaagttgaattgggaagttatttgttagtggttgtttagaattgcttccatttattagaggttaggcaagttgccaaagctcccctttttaaccctaaaattctaaaaaaattaggagcctaaagaaatagattgtcagaattgtggcccatttcaatttgtttgcaaaattgaatatattcacattgggtctccgagatcattttgcttcactggagagtaggggatctgaaggtaacacaacaggtatttaagggagtggctgagagcaataacagtggctgctattgctgctcatttctctcttgctgttactactgctatttttgtggttacagggagagatatgaagaaaatgaaaagatccttacttaccggaatctcacaatgtggtgtcagagttctttaaacataattccagtacattgtaacaagtattataacaggggtaaatgcaaggctctaggacaaggtttcttttcttttctttcttttttttttttttttttgacacagggtctctgtcacccaggctggagtgcagtggtgcgatctcagttcattgcaacttctgcttcccaggctcaagtgatcctcccacctcagcctcccaagtggctgggactacaggcataggccaccatgcctggctaatttttatgtgttttgtagagatagggtttcatcatgttgcccaggctggtcttaaactcctgggctcaagcgatccacatgctttggcctcccaaagtgctgagattacaggtacagggttttttaacatcagcatttattgaccttttgaactggataattctttgctgttgggggccaccctatacatcgtaagatgtttggcagcatccctggtctttatccactagattctagttgcacccacactcctgtgctgacaatcaaaaatgtcttcagccattgccagatgtgcccttggtgataaagttagagaactactacgctagggggacacaggtaggaataactcactacgtgaagacattaggagaaatggttttttgttttcttaaaattctcactctggtgataggatttcctatcaattatatcatctattcttactcagttttttttctctcttctatttgcatctacaaccttattagccatctcactatatatgtaatgaataggatgtcaaaactgaatacaattttttatgccctatattactgttgtttatatatagcttctgctgatgatgttgcctatatgccttgctttgagaattaattattaggattggtcttgttaagctccgtggccctcaaatgtaaaagagaagcacgtggtttctcatctatctattcaaccaaagtcctccttcccaaatgtgttgttctcttcctacaaaagagaacgacactagaaaattagcagaaaataactgtgtcaccttagaataaaagtaattttaggatacatatataaatacttgtatttatcttactaagatatttgatgatagttaacactactatgaatagttcaactttggctcattttgtcattatgtttattagtttccagataatgagaactactgatcatgtggtatttctcattgttttttcttccttcagattaacaggaaacttccaagatggaaactttgtctttccccagatataatgtagctgagattgtgattcatattcgcaataagatcttaacaggagctgatggtaaaaacctcaccaagaatgatctttatccaaatccaaaggtaaaaggtggttacgtttgcatgtggataatggtatttagggaaaaagtaagctactaggtctattgtgtggcaagaaagggatatggcctcctatttgatggagaccagtcattttcattgagagagaatctctcacctagcataatttaaaaataacactaagtttatatgtgtggtgacttctacattcccattaggattcaattctttaatatagtcgttttcttaaaaaaaaaaaagcttctaaaccatattaaagtatattaaattttttattattattattggaatggtggtctgagagtatcatttattgatagggcttcaaggaacttattccaagtggttttcaaccacaaaaaatgcttagaaataatcctctttggaagcctacagattaattttcatgcattatgccccagggggaattgacttgttttgacaggtattgttttttatatctttagttattaaatacaaaatgaactatttatgtgtcacagaaaatcccaaagtctccttccagtttcttgtgttggacttgaagtgataacgtagtaaaacctggtgtaatggtgtagaactcaaactttctgatgtcactaccctctttgattctcgaaaatggaagaaataccttagaataactgatgtcttcaaactgagtaaattcagctttcttaaaagattaccacgttttccctatatttcccgtcttaatgctcacccaataaacttgtattaatatatggatcagaacagattcacaggtcagcatttaggaactgctgttttagaagatccggtttttaaaattctatataaccctattacatttatacctcctgatcaagtgttcccttaaacttcaaatctaaggaaaccttaatatctatggcagcaaacaaggtttcctgtgttcacacacacacacacacacacacacacacacacacacacacacattttccatgtgccattatttctgccacatgcctgacagcctgttctgaaagattaactcttcttcttctatttcctaaggtggatgggttgcttggattggatttgggtatacttgctctcattcttaaacagctgatcccattgaccacttatatatgagcaaactaagcatcataaggtgttttaaaatttggaaaaattaaggaatatttcaagggaaatggaataattttgttgcctttttcttctttgctttcatcgattataatattgtatggtaatgatgatagtgacatagctttagagttatgcatcggagtattcaaagttgttttttgctgtagcctgaagtcttgcacatgatctacatgagagccttacaaatagtatatggaattcgactggaacatttttacatggtgagtttaagatgaggcaaaattatggggttttttttgtttgtttgtttgttttgttttgctgcagttctgcttacaatgcatactggcttttaggataggaagttcttgactttatttttaacaaattcaaagacatataaaattagtgtcacttacaatgggatcttatgcacaataatggtttatatccatagatttagtaagatgaaaaccatagtaaaagacttaaatgacacagatcattgatgcaatgcaattgttatagatttataggtttgttttcagagactacaataaacaatagctaagtcttcatattgttctcttttcaggaagaactcccaaattagagtagaagatatgcagtaagattgaaacaattgaaatgaggcaactgagcttttagcaaattatttgcataatacctgatatttagtaaatgctaaccttattccatttttaaaattcatttaaaaatctttattaagcacctactgtgaacctagcattaataatgatgaaaactctgcatttatactaggatatgtattaaggtttttaatttaatgatagtgagttaatatattttgatcttggttgaagatttttctcattttgtctaatcaatgtgtaatgtcgattttgtggtttattgcatttagatgccagtgaactctgaagtcatgtatccacatttaatggaaggcttcttaccattcagcaatttagttactcatctgtgagtaaagagtgattttattgtcttcgtctacattcgtatttatattacattaagttttcttaatgacatggttttctttggtaaggaatacctactatgttccttttcatttcatcccatatacattcattcaaactttcaaaattgtagactgtcatcaaacagaactgcctccaactgtgccactttctcagcatattttcaattgaacttctaagatactgtaagtcgaaaattgtttaccgtctttgtgaagaggtttgagttcttaaaagagtcttagtgtcaccaagtttatgtactatttattagaatctgtaactatactttagtattgcatgactacatgattaatatacagaaaaaatagatttcagtgctatagggttatacattatagtagaattctggcttcgtccactgaccttaagaaatatatccagaaatctctttctgaaaataagatgtttatatcctatagcttagcatttaatgtgcaaaatacttttcaatagtctttttgtacttcatcttcaagggactcatttttgcctatctgccgggtgaatgactttgagactgctgatattctatgtccaagtaagtgagaatttaaaacagttttaatgtctggcttcgatctaccatttcacctttccatcagtaaatgtaaaaaaaaaaaaaaaggaaaaaaacaacttcaaggaaattgcctttaaaaagtatatcccatttttaagtatgaatttttaatatcttgttgaatttctttttttccttttgagagccacagaaaagctgtttttctgatgtttttttaaaactccttccatttaaaaagtgttctataaatttgggaatatgactacaaataatatgtaagtatgattttgcatagtggattcatcataccaattttatcaaatgtaagaattactatttaccatatagaaattatcttttatcattaaaagaatagtcataatgttatattagaatgtaaaattctagctttaattgtccttaaattcgactttgatatttatccatcaagttactgtaagttaagagatttggtgtgtgtattaggctattcttgtattgctataaagaaatacctgagactgggtaatttataaagaaaagggatttaattggctcacagttgtgcaggttatacaggaagcatgatgctggcatttgcttgcttttggggaggcctctggaagcttagtcatgacagaaggcaaatggggagcagacatgtcacatagccagagggagcaaaagcacaatggggaaggtgccacacacttttaagtgaccagatcttgtgagaactcactcactgtagacaggacagcatcaaccatactcttaactttacaatccagcaatcatgctccttggtatttagccaaatgaatcgaaagcttatattcacacaaaaacttaaacacagatgtttagagcaactttattcataattaccagaatttgaaagtagccttggtgaatgaataaactgtagtacatctagagaatagaagttattcaacactacaaggaaattagctagcaagctatgagaagacatagaggaatattaaatgcatattattaagtgaaagaagccagtctgcaaagcctacacagctatatatcattctggaaagggcaatattgtggagacagtgaaaagatcagtggaaaccactggttaggggtgagggagggatgaataggatccctttagcactaaggatttttagggcagtaacaatactctgtatgctactctaatggtagatacttgtcattatgcatgtgttgaaactcagaatgtacagtaccaggagtgaactctaatgtaaactgaatttgggatgataatgatgtgtcagtgcaagttcatcagttgtaacaaatataccactcaggtgaaggaagttggtggagaggagtttgtacatgtgtggggacccaaggtatatgggaactatctacttcctgtttagatttactttgaacttaaaactcctttcaaaaaggaagtctattaaaaattaattgactgtatatttgtctatttttgagctcgctattctactccattgatctgtatgtctatctttatgtcaagcagtactttgattatttagctttacagtaaattttgaaatcagtgttactcctctttcttcatctttgtcaagattattttggctattctggtcctttgcatctctatatgtattttagtatttccagcttgtcactttctacccttcttcccctgaaaaagccattttgattgagattacttttaatgtattgttcatttgggggatatttgacaatttaataatattgggtcttctgatccatatgcatgctatatctctgcatttattaaggctgttaaatttctcataatgatgtactataaatttcagagtgcagaccttgtataataaattttgttaaatttatgcctaaatcaaatttttagtggttctgtaaatttaatttaaattttctgattagtcattgttagtgtagacaagtacaattgatttttatatattgactttgctaaaatcacttattatttgagtagatttttttttttgtagattccttaggattttccttattgacaattctcaatttttgtttgaggacaaaatttttttctaatagagatgccttttattcttttttttttttttttacgtttctgcactggctgggacttttagtataatgtcgaattgaaatgatgagagcagtcatcattaccttgtttctgatcttgggggaaaccatttagtctttcattattaagtattcgttgtaggatttttcttagatgttttttatcagaatgtacaacttttactttatttcactgagagtttttatcatgaagggtattaaatgccttttcggcctctagtgagataatcatgggttttctcttttttaatctaccaaattacattacttgatttttgaatatcaagccaaccttgcattcaggatgtgtcctgattggttatgatatatttttaatatattgctagatttgatttgctaatattttattaagtttttttgtctgtgttcatgatggatattgttctgtagtttttttgcaatgtcactgcagtgactgatctgaatatcaggatataccagtctcatacaatacatttggaaagattcccgcttccatttttgggaattgttttataaaatttgtattatttatttcttttttgaatatttggtagaatttaccagtggatctatcttggattgcagttttctctctgggataaattaagaattcaaagtctttaataggttaagggctattctggttgtttattgtcaaaactcctgagtgagctttggtgatttatttttttaaaggaatttttaggttggcaaatttgttaacataaaattgttcattatattcccatattattttaatgttattggggtaggtaataacatcttctctatcatttctgtcattaataatttgtttattctttttttttcctaaccagtctggttatcagcttatcacttttcaaagaactagcttttgacttaattgacttttctgtatttctggtttttgattattattgaattttgagcttattgttattctttcttcatggttattttgggtttcatttactctttttttctagttttgttttttttaaggcagtaagccaagtccattaattagatacctttcttctttcctaatataggtatttattgctgtaaatttccctctagcactgctttagctgcatcccccaaaccttgatatgttgtattttcatttttattgggttcaagatattttctaatttcccttttgatttcttttttcatgtatgggttatttataagtgtgttgtctgctttccaaatatttggggattttcccacaattttttctgttactgatttgtaagttatttcttttgtgatcagagaatatactttgtatcatttgaatccatttaaatgtattcacacttattttatggcccagaatatggtctatatttgttcactatggtggctgtaataaatcaccacaaacttggtgacttaagataacatacatttattctcctgtagttctagtggtcagaagttcaaaattggtttcactgagccaaaaccaaggtgttactaaggttgcactccttcagatggctctaggagagagtcagtttctttgccttttctagcttctagggttgcatttctcagctcatgacctttctgtctttgaagccagcagtgtagcatatttaaatctgtttctactttcatgatcacattgctttctattttctgtgtatagtccaatctctctctactttcctcttataaagacacttgtgattgcatttagggcccacctagatattctagaataattttctcatttcaagatcttcaattatacttataaagccactttgcaaataagataacatgcacaaattccaaggagtaggacctgaacatctttgggtgctattattcagcccaccacatggtctacccttgtaaaagttccatgagtgctgttgttgatgagtggagtgttttaaacatgttaattggatccagttggttaatagcgttgttcaagcctactgggtccttacagacttttttcctggttgttctttgaactgttgatagagagatgttaaaatcttcagctatgattgtgagtttgtctgttttgtctgttcttttaatttttgttttatgtaccttgaagctctagttttagaagtgtacacatttagaattgctatatcctcttgatgacatagtctttgttctgaaatatacttgattttatattaacatagctacttcaggtttcttttcattagtattaccatgccatatcatccttgtaacttgtgcctttggattcaaaacgggtttcttgtagacagcatatggttgggtcttgctttttaaattcaacatcactatctcggtcttttaatcggagtcttagaccatttacatttaatgttattattgatatgattgggcttaaatccacctttatactatttgttttctctttgtcctgttctttagtcctgttttctccatttcctgccttattttggtctattaaaataaattttattttatataatactatatatgaaaaagatattctaccttgtctgttattggcttatcagctatatgtctttttaaaatggtatttgctccaagtttcagtatacatgtatatatctttaacataccattgtctatcttcaaatatattataccttacaataatatacttttattttctccactactggtctttgtgctattgtgtcataaattttacttttacagatatcataaacaccttaatcgatattagatttgtgtgaaacagttatcttttaaaggattttctattttgacatttaaaaaatacatgtagtgggtacaagtccacatttcttacatacatatattgtgtagtggtgaaatctcggcttttagtgcacccatcactcaagtagtgaacattgtaccaaatcagtaattttccaacccttgtccctctcctaccctcccacattttgtagtctccagtgtctgttctactttgtatgtccatgtgtacccattatttatttcccacttataagtgacaatgtgcagtatttgactttctgtttctgagttatttcacttaggataatggcctcaagttccaaccatattgctgcagaagacattatttcttctttttagtggttgagtagtgttctctggtatatgcataccacatttttaaaatccaatcctccactgattgacgcaggttcattttatatgtttgctattgtgaatagtgctacaataaacatacaagtgcattaatctttttgatataatgatttctttcttaaagggattttttatatgaggaaaaatgtcttctatattaactcacattcttgtaagtacaccaaatttccatctggtatgatttttcttagacatgaaggattttatttaacacttattgtagtgctgttaaaaagcctttatttcactttaatttttgaaaggtatttttcttgaggccaggtgcagtgactctcacctgtaatcttatcactttgagaggccaaggtgagagaattgcttgagtccaggagtttgagaccagcctgggcaatatagcaagatcctttttctacaaaaaaaatgttaaaaatgagccagatgtggtgatgcatacctgtaatcctagctattccagcagcttagaggggagaatcactggagaacaggagttcaaggctgcagggagctatgatcgtgccactgcatcccagcctgagcaacagagtgagacctgcttctttttgagaaggaaagaaagaaaaatggataaataaaaggtgtttttcttgagccctcggtggatatgaaaagtcaacttttcaatccacagttggttaaatctgcagatgcagaatgcacagatatggagggctgactgtactatgccattttttgtgtgtttgtcttgttttgttttttttgtttttgtttttgagatggagtctcgctctgtcaccaggctggagtgcagtggcacagtctcggcttactgcaacctccgcctcccaggttcaagtgattctcctgcctcagcctcctgagtagctgggactacaggtgcatgtaaccacacccagctaatttttgtatttttagtagagaaggggtttcatcatgttggccaggatggtctcaatctcttgaccttgtgatccgcccacctcggcctcccaaagtgctaggattacaggtgtgagccaccacacccagccactatgccaggtgtaagggactggtgcatccacagacttgggttctctaggcatcttggaaccaatatctagcagatactgagggactacagtatagaattcttagttgacagttttttcagtgctttaaatatattgctccattgtcttctggcttacattgtttctgatgagaagtctattgcttttcttatctttgtttctctctatataatgtgttttgttttcctctggctgcttctaagatttttttgtcttctaagctagttgttagccgtttgaatataatgtgacttttaggtgtttgtttttggtttttttttgtttgtttttctgttctttcttccctccccctacacccctgcccgccatttacgtttgttcactttcttggatatggttattgtttttatacaatttggaaaatattcaactattctgtaaaagtctttttgtccctttttgtaggattccaattacacattagttatgctgtttgatattgtctctcagctcacagatattgtattcatttttttctctctggactttattttagataacttctattatgtcttcaacttcatgaatcctttttattttaggtctgaactactgttattcccatcagtgtaatttttatttcaggtatttttcaactctaaaagcttaattcagatcttttttaaaaaatctttgcttttatttcttcatattgctgattcttttctctatcccctttatttatttataaaggttgttttcacattcttatctactaaatctaccatgtatgttatttgtgttatgttttaatatgtttctgttgattgattgtattttcttattatggatcatgtcctttttcttggcatgtctggttatttttagcagatgccagacattgtgaattttaccttgttggttaactgagaacctgaggggattcctctacagatttccagaactctttctctttacagcttcctcatcttaatactcagttccataaatcctagttgctttggcttctgcaaactctaaactctgtcttcttgacccagcaagatgtacaagttttatttgtgttctctttctctggagtacagcctgtaaactcttcagtcatggactggtgcagtaatggaattcacctcatttgtttctcttggagattgctgtcctatattgccttttatccagcatctaaaatttgttgcttcatgtatttttgtttttctagttttttaatatgggagggtaattctggtttctgttatttcttcatgaccaaaagtggtttacctttttttttaaagttattaatacaaagataatttttacctttaagttagagcagattttctacactttgttatatcctatacagttttattttatatattatgagcagaatatatagtggaagaggatgaattttcattttcatattatgttagttcaaaggtttatttaaagagtcttgctttctattttagaagcaaaacggacaagtcggtttttaagtggcattatcaactttattcacttcagagaagcatgccgtgaaacgtatatggaatttctttggcaatatgtaagatttaaatatgttttggggttacatgccagatcagtaacattatttatgaacttataatctgttttgaaatgattgtcatagacagcaaattgctgtattgcctttagaattgaactcatttttatatttatattaacttgcagattttagttactggatagcatatctcagaatcagattttctttgaaatttggtaacactatggagaggctgagttctgtttgttttaaaatcttgtagctgaggcttgttttcctatattaggaaatgttagagaatattgatatgtttacatttttttctttgaagtttgcgtagatagtgtagcttttattaaataacggacatatttgaggtttatatttgccttttaaataatggcataattggactgtttgtggtggtgtttatcatgcttgcccagattcagtccaaggcaatctctttaacagacagaaactcattttcctttcatcaacaacttaaagaactgggggagattatgggtcatctgtgtgatttttcccatttgtcttcaataatggggtaccatactcttagaaaaacaccagagtaactccaaacacttagaccctaggcttcagctttactgagctatatagatccgtacttctttgcacaaatcatgctaaccttataactcctaaacatcatataatcttcaaagcttaccacattcatgtgccaacatacacacactctcataattttgcttggttaattactatctttaagacacacctcagacatctatcacctctatgatgtcctatcacccttcttcccagccattacccaagttgggttagatgtcactcttgttggttcccattatatgaaaaataacaagctattttgtgggtttttattcttgtatctggctcctcaaggaggcttagctacttaaggtcaagacctataagttagtcttcttgagaattctcagtaccgagctcagtgcctatgatgagaatccagcatttgtgttgagtaaagaaattcctaattcatttgtcatgaaggcctaactctatcttaaattttttatttctgatggttcaaactatagtatgagtaaacattttggacacactgattgtgttgaaatgcactaatatgagatgattaaaattgctttaatagaaatcctctgcggacaaaatgcaacagttaaacgccgcacaccaggaggcattaatgaaactggagagacttgagtaagtgggagatttacaagtaaaataaatgcaatttcaaaatgcaaaatgaattgtaagtagtattttacaaccctatattccaccttaagtctcttttatctcccttaataaatagcagagtatttgagtttgccttttcttaaaaaaaaaaaaaagaaaaaactagtttttcttctaactcttaattatataatacatcctttggcttttgttgttgttgttgttagtgtgttagcctgatttgtttaaagccattagcttactgtcctgatttatgtctggaatattgtcttatgtaggtgagcagtaactgcctggactatcttccttcagatcagttgattccatcaaatgtttactcctacaacaaagttttcatttatttgttttgtttttgacttataggttatgtagggaaaagaatcactcaacagttgtgatttcttggccttccttatatatatatattgattttgagcaggatttttaaaatctcttctaatttatagatgtctttgaggttatctgttttagatgagagattttctaacctgcccctggttaaaattgcctttacaggcagacattagaatataacagggtaaaagatgccaccaactaaatcaaaacaagaatgacaaagtggagagaatatttgcagcacatgccacaaagccttaccaactctaataacaaaacccatgtaatattcctaatatacaaatataatatgcagaactacaaagcagtcctgtaaactgacaggaaaaatgataactttaaaaaaatagacaaaggctttaaacagggagtttatataaaaatagctaatatatcagataggcaaaaactaaatttgaaaacgttcttatagaagagacttgaacacgtgtaagtgttgtaaggaaggactagtagcggaagaatggatggtatgggagtaagagttgtgaggcaatgatagccagtgcagaggtagagaaatcagcattaccagaaggcatacaatattcatgttattaggagtgaagttagaaaggataggtatgtgtgtggatggatccatagatttgatagtagaaaactgaaggagctcatgtgatttttattttctgcctgtagtagaggccagatcattcattttaaatgattgccacatgaaagggtgtaattcagaaacataaaagtagacaatttcttcatctcagttatttgaggacaggtatttcattttagcctttcaaaagtgaagagcagtattttaatctattttgctgtgttaagttctgttccagttgaagagcaagaagagttcaagcagctttcagatggaattcaggagctacaacaatcactaaatcaggattttcatcaaaaaacggtatctgttgtgaggcaccttaaactttaaaaaacaaaatttgtttgtagatgtggtgggacatatagtggaggtaacagcacattgctttctctattaccaaagaaacagaatatatttctgtgcccatttgtgccccttataatggatacatacttctctcaaccatctagaaccgtgatggtttttgttggcaaagttttttgttgtcttattgaatagaattttttagggttttcctaggtttaatttcactgcttccaaaccatgcactgtggcaccctggatactgcagtaaaccctcaagaatgcctcaaaatatcttaaattttcaagggaaccactgtagtactcagcatctgtcatatcctttttgaattcaaggtagttcacagtttcagtttttggtcacattcctttcatatccttgtgcagctgggattttggtatttgctgtgataaaagcaagtacaatgtaaaaatcactgtgacacaggaaatgagaatgtctatatccaatctgaaatatacgctccaacgtacgtgaatttatgcagtgcccaataggtacatacatctaattaggaagtactcgaggttatttaagaacaaaataaaaattttttctttcaacttatatgtattatttttcaaagggctacaatgttaggacataaatactaggccattatttggagttaactacttagtaaaggaactcttagatatttcttttggcttaggagcatcatgaacagagaaagtttgaagaatatctgatctaacacatttaactcctttcttaccttaattttatgagacagcagtgagtggctaaatctaaatgttttgaatcattataaaacgtgtttgctttttcccttagatagtgctgcaagagggaaattcccaaaagaagtcaaatatttcagagaaaaccaagcgtttggtaaacatcttttcttttcactagcatttaaagtttgaatatattgtgtggaggagtattttagctgtgtgtgttattatgggcaaatgtttctccctttttcccttcaaaatgaaacaatctttttcaacttaaatataatagatgactattgttttaaaaaatatcgaaacacagaaatgtatgaagaaagtaaacatcacctgaaagctcactatacaatctgatttatatcaaagattgtatttgctatgcaaatgtaaatatgcatgtgtaattttacataaatgatattaggctcaatacatcttacctgcttttttctccacttagcgatataatacagttatgaattttaaatagatcctcattatattaatgcttgcatctagttgagcattatatgtatgtgctgtcttgtagatccttttaatccccttctgatagacttttacatagattctaattttttgctattaaacagaaatatatgtatgtgtgtatcatatgcatacatatgtacatacatacatttctgcaacaggctgcttttatttaaaataaatttttttgtttaggatttctgggtcataggaaatacacatgtaaaattgaccaatgcagccaagctgatttctagaaagataccaatttatattcctaccagtagaacaagagactgtccctttccctatacccttgccaaaactggatgttttcaggcttttaaaatctttgttactgttacattgaaaaaaaaatctcattttatttgtacttattttattttttagtttttttgagacagagtctcactctgtcacccaggctggagtgcagtggcgcgatcttggctcactgcaacctccacctcctgggttcgagcgattcttctgcctcagcctcctgaccagctgggactacaggcttgtgccgccacacccagctaatttttgtgtttttagtagaggcggggttttaccatattatgcaagctggtctcaaactcttcacctcgtgatccacccgccttggcctctcaaagtgctgggattacaggcatgagcgaccacaccaggccaaaaaaatctcattttagtttaattgctttaattctagtgattttgtccatcttgcttagtgatttcttgttatttcttattttgtatattgtttgtgtaccttgtttatttattttatttatttatttattttttgagatggagtctcactcttttgcccaggttggagtgcagtgtggcatgatgtcagctcactgcaacctctgcctcccgggttcaagggattctcttgcctcagcctcccaagtagctgggattacaggcatccaccaccactcccggctaatttttttgtatttttagtagagatggggttttaccatgttggccaggctggttttgaactcctgacctcaggggacctgcccacctcggcctctgaaagtgccaggattacaggtgtgagccaccgcacccggccacttatttatttttcaagaaactccatgaattagggattttagctctccatttatttgtctgtcaaatttatatattttttgcccattaaaaggtttatgtttttatgtagtaaaatttatagatacggcctttatggtttttggctttaattgtgtacatagaaaggacggtcctattcgtcagattattttttaatactatattttctcattgtacttttatagtttccttattgttttaaaatgtatactttagatccttgagaaacttactctggtgttatatttcccttatttttctatctttttttttgctgggaaatgctttcatctgagtagtacttactatggctcaattttattgtttatttatttctgtctcatttaaatccaagttaaaacaagcactttgtacttattaagtttagaccttttataaagaggagaaaagtgatgaaagttaacactattgtaaggaaaataacctctaatcttgtagagcattaaaagagtagataatgtggtggtttgcagaactctaagaatgaaataacaaaatatacagaaattacaggaatgcattatatctaacattcagttttggcgtctgagttagctgatcaaaaagtaagaatcttttcttttaagttaaaaatatttagacaaattacacaacacagtaatacattcctgttatgaaatattctctctttacatacacacacccacacatacatatatatatatgtatgtatatagagagaggggagtatacacacatatagagagagacagagaagggtacgaaatgtgaaaggccttctctcagcccattttaccttgaggtaatactattcccttcctttttccaacatcatatgcatacacatatagaggcacataatcatgtgtcactgttttgttgttctgtttttatagaaatgtatttatgtgttatatgttgatctgtgaattggttctttcacttaatatatctggaaaatctttcctgtcaatacatagagtcatagagggtccccaaacaatgtaaatacaacttatcaacaaatatctgagaagaaaattcataggaattttttttgacataatttcagacttacaacaaactttcaagagaatttccagctacccttcactttgattcttcaaatagttacattcatttttgaaattcaggagaagggaatttgttttcattcagcaagcatgtagtgagcaccttctcagtgctatagctttgtttgggtactgggaaaaccaggatacattttcacaactccaatttgctcagtcttatgaaacacatattaagtacataattatagtgttgcatgtacaaaaattgtactatttaaagaagaaatgtagagaaaatgggagcaggattttcagggatcagtacaaatttagcaggcagaccggagtgggataatgatattctaggaggaccctactggtcaaagaaagatcacttatacttgtctaaacataagatcagaattaccagattgtagggtgcagtagggaactggtgggagatgagactagacaggaagagagttaagagccatgtaatgaaaggctttgaatgtcctgctaaggagcttgatctttggcctatagacaaatgtgagcaattaagtaggtaagtgatgtgttcagaatttaattttaccctcattacagagaacatggacctaatttctttgttctttcccattactagaatggtaaatcaccaagtttattatatctaatatataaaaatgttttctcaacagaatgaactaaaattgtcggtggtttctttgaaagaaatacaagagagtttgaaaacaaaaattgtggattctccagagaagttaaagaattataaagaaaaaatgaaagatacggtccagaagcttaaaaatgccagagtgagttttctttttattttaatgcttttgtatctaaaaaaaaaaattagcaaattcttgtttaattatgtgttaatttttggatttctgaattatctatacttctcttcctcttaaacttttttgaccttatttctaatctgtagcttttctctagagtgaatatggggaaaataaatataatttcaagacatttgttcaattatgcaacaatttttcgaggcttttctctgggagatcaaaacagaaatgctgggtggtgagatttaattactttattacaagggaggaaagtattaagtaattttacaaacaattgtaattataaattacaatatatactataacaaagtataaggtatgcatgtgtgtaggtaggggtatacgagaaatctctgtaccttctgattaattttgctgtgaatgtctaactgcttgaaaaattaaaatctattaatggtatcagaaagaggaaagaaagtatagagtgctttgaaataatgtaataaggggagcccagtttagtattgggctggaagtacaggtggaagagggaaggaagaatgctaccattcttcagatcgtagcataaaaaaaaagacgcttttcattttaaacatagcagtaccaaggcccaattcattgtgtatggaagaatattaaaggcagagggaacagcgtatgtgaattctgtggggtagtggggagtaaggtgtgttcaagattatgggttactgtgggagatggattgacgtggtgcaatacaaacttagaagtgggtagacaatttaccatcttttgtgaagcaatgtttttaaactattaatttaaaaaacatatgtggtttgtgtttgaatttgttattcagttcattcttgacaattaagattaccacactagactagacaaagatcaccagaacagaaatgagaacccagaaatagatttgagtattaatgagaaaaggatgatttatttaagaaacagttctggctcaattagctattcatctggaagaaaagggtgttgggtctacactttgctcttttacaaaaataaattttgtatgtattgaaaatttaccttaaaaaatttaagttttacagattttaggagaacacttatataatcttggactgagatagatttttgaaattaagattggaaacagaaaatctatagagaaaagtagacacattagaacataattacggtgcatatgacaggtagagggattatatccatgatttgcaaagagtattttacaaattagtaagaaaaagaaaaaaataaggtagaacaaggggtaggctagtgaggacaagggaaggaatctttgtattgttaccatggttgtagtaaatatatgttcattttgtaattttagaagatgagttaatgtttttaaaagaattagctatagtagtcgttattatacaaatgaatgggaagattataaatgagtaatacgattgattgcccaggagtaatcagaaatagtttgagtattagcaaaataaactattttaatatcatcattattaacttttggaaggtatttcattgagtagtaaaattatggcacttttcctttgtttgaagatacttggcaattaaaaaacaattatttgtgcttaaacacatgtcagtaatagtgctgtattactgacctagaaatttaattgttccgtgctcttaaggtttcagtattaaatgtggaaattatttaagagcaaacaaattgatattactgcagcttcataaagaagaatatcaaactgtggtctctgttttttgtctttcaaagcaagaagtggtggagaaatatgaaatctatggagactcagttgactgcctgccttcatgtcagttggaagtgcagttatatcaaaagaaaatacaggacctttcagataatagggaaaaattagccagtatcttaaaggaggtttgtattgtatggaattttgatgtctttattatataacagcttactatagttccttgtattttgctttcactttttgttatgttttcctaaagaaaaacagggtcattctacagtataatagatgtggcaatgtatgctatgaaaaagacacttttctttttaaacatagcagtagcaagacccaatttttaaccttctgatgaaattaataataactaacccatcacattgctgtgtatattttggaaaatagtacagtagctcccccttatccttaggagattcatttcaggacctccaggggatgcctgaaactgtggatagtaacaaaccttatatatatatatatgttttttcctttatgtacatacctatgataaagtttaatttaaaacttaggcacagtaagagattaacaataattactaataaaagaacatttatagcaatatactgtaataaaagttatgtgaatgtggtctctctctcaaaatatcttattgtactaaaatcaataagtttagtacaatgatgtgagatgataaaatgcctacataaaaaattgaagtgagatattgctaggctactgttaatcttctgaccatacatcagagtaaggatcatctgcttcaggtgatcctagatcctcaaggcactatgatgtcgacagttggatgttgatgactaaagagcaagtggtgtatacagcatgaatctgctgggcaaagggatgattcacttccagggtcagggctgggcatggtggctcaagcctgtaataccagcacttcggaaggctgaggcgggaggaccattgagaccaagagttggagaccagcttgaacaacatagcaagatgctatctctacagaaaattttaaaaattagccagctataatggtgtatgtctgtagtcccagccacttgggagtctgaggtgggaggatcacttgagtcaagactgcagtgagctatgatcatgccgccacacttccagtctgagtgacagagtgaagccccatctgaaaagcacacacacacacacaaacatccagggtggaatggagtaggatggcgcaagatttaatcacactacttagaacagcacacaatttaaaactgatgaattttttatttctgatactttccatttaatatttttagaccacagttgaccaggggtaactgtaaccatggaaagtgaagccatggataaggggaactactgtcatgggattttaaatttgttctaccagttggaaatgatcttagcatcagaaagttccaacttagtgcccaacactgtatctaggacctatagagagatttaaagtttattacatagtctgccctgaagaaatgagagctaagggcggtttctcaggctacaagcttgaaaatccttttttgcttcttaacttgatcatcttcatccaggctgcgcctccaggataactaacattacatttgataaacaatttcttttttgagataagtagggattagaaggtgagattgccccaggtattctttcccaactacatagtcccctcatctgccattgtgttacccaaaaaagatgtgtatctactgctttgaattgtttctagcacctacccttttccctttatttgtactactttagttcagatcctaacccctcaactctagtctcttagctaatcttaacatgtctccctttcagtctgtactgatagaaaacacctctctagttgtcatgtcctttctcagtatctctgatgcctccttgttgtctcttctggttcatctgcatttttctgccggactttcaggttttaaagagttttgtctctttttaaatttgtgtttaattatagttcatcctagaaaatattctttcattttatttctaaatcctaattggttatgttgactttaaatacttcttataaaatacagagcctgaacttggaggaccaaattgagagtgatgagtcagaactgaagaaattgaagactgaagaaaattcgttcaaaagactgatgattgtgaagaaggaaaaacttgccacagcacaattcaaaataaataagaagcatgaagatgttaagcaatacaaacgcacagtaattgagtatggagttgttttcaattttagtgtattagaaagcaattatgaaaaacaaatacatttttcccccaggatttcaaaacctcggtattttccaaaagagtttaaacagctttatctttatttcacctttagttgactaaaacagatgagttaattataaaacttatactgctagttctagatttagagatgtcttagctactcttttcctgggtatacagttccaattcctttgcatcattcttcagaagggttctgatgctactgattatttcattgcactttagagatagtggtctagcttgcatcagaattaactaaatggcctatcttatagtccagcttgtctgtagagttacagcatttgtgttttgagaaaaagtcatatattcaggtaagaagtaatactttcctaagtatgtaagtatgtttttagctggtacgttagggtactttattggtaaaatacccatcagttctaagaatgtgtttttaaaatacctgccccagatatgtctataatctcattccttcagttactaaaaggtgcgtcagagatcatctgagtatttccttcatacttcctcttgcagatgaaaaagggcagaacttaaggattttatgtttgttgccaaactgccttgtagaaaagttaaactgattcacattcccaccaacagtacctaagtgtgtacaactggggaaatgtaacttaaaaaatcttcattttaaatattgattgattgattgatttactcattcactaacccaccaatgagggaaaaaaaatctcattaatatattgagagaaagagttcacactatgttgtgatgtgattatagtaccacactttggggttttcattcctttgcttttatatcttgagaagagttttaggtttgtcaaatactgacacatggtcactttggaatcaaaactagaattgtgtttgcctttttagttgctgaagaggattaaatattagctgtctcgattttctttcagggattgcaataaagttcaagaaaaaagaggtgctgtctatgaacgagtaaccacaattaatcaagaaatccaaaaaattaaacttggaattcaacaactaaaagatgctgctgaaagggagaaactgaagtcccaggtgaatatgtgttcataagaagttaatttcaaataatctctcatgtatttgagttgttaactgaaacaaaacagcttacttggtctctgtgtaatgagacttttaatgatacctaaaattatttactctttattcttgttttgaatatatttactgtaaagcttcataaatagtcctaagtttaatgagaacaggcatcttgtctcctacatttttatctttaaaaatgctagtacagtgctaaacataaaatgtttacctgtttctattcttttaactgccaatgtctctaacaagtagtatattcctaatatatttattaaatatttattgtctccttatcttttgaagtttgatttatgtcttcaagagtgttctaccagaacaatagttcaaactgctctgccagaaatcacaaaaaattgctatttattatgcaaaatcccttagcctctttttttttcattcttcaccttgtttacattgacaacttagattgaggtttctaaaaccgctgatacctgataaatagttaaacatttgctgccattactttccgtcatccacacccaatttgtaaaaattcttaatactaacagagccacagtagacaattcccttatctgttctcagtaccttatcccccagaaagattatgttgttagcacttgcacatgtgagcattatcttaaggctactttaaaaggaaggaaaggaaaggtagtggagtgaggaaaggaagagggaaactggaaggaaaagaaataaaatggttgggatttcacgtccatggtcttcccaatacctggcctgctcttttctgttttttgtttttttttttctatacctcaactacttttatttttcctgcctcttaacttgatattcaccaagagtcagtctctctagtatggcaattagaaagacttagcagatattggctgggcgcggtggctcatgcctgtaatcccagcactttgggaggccgaggcgggcggatcacgaggtcaggagatcgagaccatcctggctaacaccgtgaaaccccgtctctactaaaaatacagaaaaattagccaggcgtggtggtgggtgcctgtagtcccagctactcgggaggctgaggcaggagaatggcgtgaacccgggaggcagagcttgcagtgagctgagatcgcaccactgcactccagcctgggcgacagagcaagactccgtctcaaaaaaaaaaaaagaaagacttagcagatatttaatcctgcttcttaaccgaatcaaatcaataaatatttatgtgttactacatggtctaggaacagttagtgaaccagttactaacaatttagtaactagttactaactcaaattcgaggcacctttgtctatcagtcataagagatacccatgcctaccttatattactttgagttttatgcatatatgtcttgccagttacattttccatttcttaacagtagcaattgtctattgttaaccttagcatatcatgtcaaaccatgcctagaatggtgccttatgtgtagtatgttttccataaatatttataaaattgaaaggtcatctagcatggtgcttcttaaaactagctgtgtattcgaattcagtgaggaattttaagatgaacaaatcctcacccaaacacattgattagcatctccagcaatggggcccatgaaatgtgttttttaatgtggcatttgagacccactaataggcttggcttaattgtgttcaatggtatagagttttcaataggtatggccacccaagctgttctactagggcagctttaattgttaaaattctgtctcttattttgagtttaaaatatttatttctgtactctatagtcagcccagatcttctctgtggagcaaatgtgtacccttttctgcttaataacccttcagacatttgaggataatgatcacggtttctttcagccttctcatattcaggataattagtcctagttttccaccattctttatatagcttcattttcagatttattactatcctatttactgtcatctctgtttcctatttgtcattattctgcttaagatttacaacccagtgctaaacacagtcttccaaaataatgatgtgaccagccagacccaaaacacatttttagtgaagcataatattggggtagatttttagcagcagcatcttgcccttgacttatattgaccttgtgatcagttaaaggactcctgtcttttccacataaagttctgccttgttaagagtttttcaccatactttagcacaactgttacttttaattcagaattttacttttttaggttttatttatttcaacctagatttcaaaatgtcaaggttagtttaaatctatcattctgtcttccaccttaactatttctcattgcttagtgtcacctgcagatttgatcagcatgcctttttcttcaaaataaaaatgtttactagaacaaggtcctttgctgcattataattttttcatcctagaggcgtagaactattgatcaaaactttgggtacaattcttcaacttgctaagttgttcttacctaccttgattcaggctacgttgtgatatctatttgttacacaaatgggaaggtctctaaatactttggtaaaatcaaatactttttgtcaaagaactcttcttagcttactttataatcatccttcatgaaaagaaaaaaggatatgattgccaaattgttctttgtgcagttctgttgcattttgtgatcatcatagtcttttttcattaaatgttctttcccatagataatttatctcttctagtttcaattattatcttcatttggatagctttcaaaaatctatgtttcttgttctgtccactcacaacaaaaataatattttaaaattacattcaacattttcccacatctgaccttttcttcactttctttcccttttctttttctctcttttgctcaacttcttcataaatttctttgtatttctcaattgcatcatcattttctatcacaaagcattgaaattttggacttgctttagataattctgacatccagataatctccaagttaatttcatgattgcttttacatggtggtactcttcatacatgtacatagcccttcatacatacagcgctcttattattatacgtctgtcacataattttgtagtagtcatggattgcagcaacatttgctaagtttctttgattttagattcttctgcatcaaatatgccttgaatactaagtactaccacatttatcctgctaaaatattattctcaatactacactttcttgtttaaaacaagggccattttccttcagttcattcattcacccagtcagtatttcaacaaatggccaatgtatctgctaggtgtcaggcttcacacttgattcagagagtaagttgtgaacaaggcaggaatgatttccacctctaggactttcaaaattttctgtctggctgggtgtggtggctcacgcctgtaatcccagcactttgggaggccgaggcaggcggatcacgaggtcaggagatcgagaccgtcctggctaacacagtgaaaccccgtctctactaaaaatacaaaaaattagccgggcgtggtggcgggcgcctgtagtcccagctactcaggaagctgaggctggagaatgtcgtgaacccgggaggcggagcttgcagcgagctgagattgcaccactgcactccagcctgggcgacagagcgagactccgtctcaaaaaaaaaaaaaatattctatctaagctaatcatttccattatttaaggtccagtagaaactatgtcttccacataactttcttttacttctttgaagtatctttctgttctctctcaaatactatagcactctcagtctattccaaataatctggatgtgtgctgtccagtggggagctattagtaatatgtggctatttacatttaaattaattacagtgaaataaaataaaaaattttgttctttatttgcactagctatatttcaggtgctcgatatccaaactggtctggttatatgttcatttaggaaagaaaccataattggtgtctttcattgtactattgtactatttacagtgctacttatacaaagtacccaataatatattggttgactaatttatacgtatgtgataaatggctacactggctgtaagactccatggatagtgtatagtcttaaatatttctgatttgaaaagtgagatagttatctagactgacactgtccaacagaactttctgctgtaatgagaatgttcttctgtattgctgaatactgtagccagtaggcacatgtggctattgagtccttgatgtgtggctggtgcaactgagggactgaatttttaatttcatttgattaaattaaattttattaaatttaaatagtagccacatgtgtctagtggttgctgtattcgacagtacagaactagcctttgactttaaaaatatttaacttcaacgaggccatcacagtaaaacttattatatgtgaattagggtggattaatatagtaaaattccacttggatgtagaatttaatcgaaaatgctaaaatacatagtatttgtcagggatacgatctgtcaccattaaacatcttgtgagggttggcttagaacttcaaatgtttttgtctctgtgcctgtgccactggaattgggccttaatgtttcattcacttgtggctctactagcaggattttgctcctccttgagagtgttacttgttctcggaaggaaagtattcctttgggtattttgaaatggttggttcagatacatacagattgtatatcttaatttagtcacacttagttctgatagtttctcataaggaatatcttcctaccaaatttattcagctttcttttttggaatgaataaacatatacccctatagagctagaaagttaaattgatttatagctgctgaatgtgctgtttttttataatggcgttcacacaagctagcaactaattcaccttatttttcctacaagatttaagaaataaagccttcaaaaattttgatttattttcctattggttcatattctatcatagttgtagtaatttgatacctgcttagatctcagaaatctaaacacactcttctatttttgtgttaggatttaataactatgtttggatttttggagaatgtttagtcttaagcatatatttacattcacttaatctgtagtaatagttctcaaacttgcataggtggcagagttgctggaaatagggttctttttcggaatactgtgaatttatactatatcaaattataatctatgtaatttattcaaaatcagatcgtatctctgctagaatttaaactaaggtaagtagtagccaaaattttaggcttaagaaaaatttagtgggagagacacttaaaattgagaacattgtattcatttactgcttttcttcccccactggaaaaagatgactgttttatttcagtggcaaaacacatcctgtaaccttgtaaaataccagtttcttg

SEQ ID NO: 38 - DNA, 25089 bp, Homo sapiens
  source 1..25089: mol_type = other DNA
aggaattcaacgaatcagtggtgaggtgccgccgccatgcctactacgggcggaaatttgagagaaagcttcgcaccggtaggaaaactgaggagcaaccgagcacgattggaaaggttgacgatagtggttaagtggctcggccttgccctcagttaaaatggcaattttagttgcttcactgatacggaatcggcgaggcgccaaggaggcttcctgcgtggggccgcagagcgagtcgggaaacgattttaaactgaagaggcggcggagggccgaattcccttttctcaacggcttgatttcagagctgggctggtctctgacaggctcagctggagagggacgggttgggacgcactgtccttttgcccttccccctccgcgagcagaagctgactccgcaggagcgagggtcgcagagctgggtgagcggaaatgtccctcccagagtgaagtcgcagggcccgccccgcgtctgagggagcggaggtcttcctgggtgcgtttgtgtctcttgtgaacccacttgtggagcgagagggaatttgggagggccaggggttagtctggcctctgtcttagctgtcattttggcggttttttttttttttcttcaggggatttcagtctccacatagttttggagccggacttttgaagaatgattcgtgaatccggaatgggtgacagcgtcatcacggcattttattggtaaagatgctttgtattggtcccggacctgctttaactttgtatttgccctgttgtgtggtcattatcttacaatacttgcgtgttgaggtgtgtttaaacactacgtgcttaacactggctaagtattggcattggggcggttggatttaggtattggtggcaatgtagaaaagtgatcaagtcagagccccttcacggactaatcacaagagaaacaacaaagctttacttgtgtgctgtgaaccacaactgcaagtggaattgtcaagagaactagccctgccaagctcaggaaaacttctgaggagatggcacatggaaaatggataagatttactgagacaaacgggagtagagaagtgtttttaattggcgataaggtgaataaaaaggcagggagaacagtagagtgatcatctgtctagagtagggggtgcatgtttgggtatagggctgtcatttaacctcttaaagaattgtctactggaactttcttcactcccatccccccaccccccaatgttgtatacaaaaccttagaggaagtgtatgcagaatgttggattttggaaaggctaatgtcgatggatcttggggaagaactgaagtagtagaaaatgaacctggataggatcagataataagatcaaatacagtagtgccttgaaagccagacaggaattctgatttgacttcatatagatgtgtgggaactgttatgggatctcaagcaaggtaatgataaaagtggtgacaatgaaagactgatgatggattagggaaaggggctaagattgggaacaagataagtagctataattgagaatgaaagtgaagcccacatctaagaggacaagtgtatatctttttaagaaatatgtcagaggccaggtgtggtggcttatgcctgtaatccagcactttgggaggccaaggcaggcggatcacctgaggtcaggagttcaagaccagcctggccaacatggagaaaccccatctctaccaaaaaatacaaaaattagccaggcgtgttggtgcatacctgtagtcccagctactggggaggctgaggcaggagaatcacttgaacctgggaggtggaggttgcagtgagccaagattgcaccactgcactccagcctgggagacagagtgagactctgtcttcaaaaaagaaatatgtgagaatttgatgataaagttaacaaagttaactttttagatgtaaaggtgatgttgaaggaagagtaaaagatgatgaaagtttttttagtggggaaagaaaatgaaaaggaagaatggaattattactgagcaaaacagagtacagtagttggcaaagaaagattgaataagatgtgaagcgatgattagttttgaacttaatgagtttgacggaggttggaaatgcaggactgggttgcagctgtaatggtctgaagacagagatttaggagtcatatagaatgattattttcctatgtagaatgaatgattttcagaatctggggccacctactattggaacatgaggaaaaaaaaagaatcagtaaataaattggaactataaaaagtaaggaggagaaaagcccctaaaaaatggaatgtcagaggaaacaaggtcccagaaagtttagaggagtaaggatgaacaaacttgatgaacaaagtatttggccatggttttggcaaaaacaatgatcttcgaaagtacagtttctttgtagtgatagatggaagaaagagattgctgaagatttctagtaaaatatttattagtaactggaggcaataggtgtagacgacgtttccaggagattggtctcagaaggaatgagacgaattggatttaaacacaaatttttaatgttagaaatactagaatatgcttggcagtgaaagaaaaggatcctgtataggagtgattaaagatgatagagatgtgaagtacagcctggttgtggtggtgcacgcttgtagtcctagctactcgagaggctgaggtgggaggatcgcctgagcccagcaggtggaggctgcagtgatatcaggccactgcactccagcctggacaacagagtgagaccctgtctcaaaaaaaaaaaaaaaaaaaaaaaaggctgaagtacacaaaggagatggtgtccaggggagatacaagtaagaggacctctttgcttccgattggaaggaagagtattgggacagtaatatattgagccaaggtatattaataacctctggattattgtgctgggcaaaaattacacattcttgagtgtgagatgagaaggtaaaataagtataaatcatttgctaatctttaattcgtggattgggctattttacgttaacattaaatacacaattgacatgttttttcaaaaccatccctcttagtgctgatagtctttttctcacctacatttattgctagactttttaaagtcacctagactttaaaatctttttgggattcatagcatttctcttttaaggagtcaaattcagcagggcttatgttgcctcataattgatccctgtttaaaaggcaacgtgaaagaagtagctaagtgcactcattgcagagttagactgtctggattcaaatcctgactcttccactctaacttgttgactttggcaagttacttaacttgtctgatttcctatttgttagctgggagcatgatctacttcatggggttgtttgaagattaaatgagaaaatatttataaagggcttagaagagtacctgaaacatgatgaatgctcaataagtgttagcaattattgtaccaagtaacaaatttgaaggaaacattctgtctaagtaggattgattaaaattccctttgaaataggtaattcaatatgcatttaaagctaggatgctttagaatagctgctatttaaattgtgtggtgtctggtgtagagtcatgtattcactacagtcaagatacagttccatcaccacaaggaattcttgtgttgcctttttatagtcacatttatgtccctcccaccctcttccctttccctgatctctgtcagccactcatctgttttcattcctttaactttgtcattttaaaaatgttaaatgtatgaaattttatatgtgacctttttggattggctttaacatccaagttgttgcatgtatcaataatttgtttcttttcattgctgagtactattacatggtgtggatgtaccacagtttatttatcattcacccactgagttgttttcaatttttggctattatgaataaagctactatgaacatttctaaaaataaataaataaattgtgtggtatatgaacttgctctggacattatttgagctttaaggacaaataatgctacatgtttagtttatgtatttatttatttattaattagagagggtctcactcttgctcagactaaagtgcagtggtgtgatcatagctcactgcagcctcaaactcctgggctcaagcactcctcctgcctcagcctctggagtggctacgactaccatcatgccaggctaattccttttttttttttgaaagatggggtcttgctgtgttgtccatgctaggactacatgtttaatttgtggagttttgtgcaagatataaatggtgtcctagtctaacatattgaaatagaagttacaggttaaatctgaagtctgaaatgccccataacgtgaatctttttgagcactgacatgatgctggaaggaaatgttcactggagcattttggatttcagatttttggattaaggatgcttgaccagtgtgatacaaatattcccaaatttgagaaaatctgaaattcaaaaacacttttgatcccaagcattttgggtaagggatgctcaacctgtgctattttaaatataatactatttaaatatgggccgagtgcggtggctcacacctgtaatcccaacactttgggaggctggtggatcacctgaggtcaggagttcaagaccagcctggccaacatggtgaaacactgtctctactaaaaatacaaaaaaaaaaacaaacaaaaaattagccaggcatggtagcgggcagctgtaatctcagctactcaggagactgagtcaagagaattgctggagcccaggaggcagaggttgcagtgagccgagatcgcgccattgcactccagcccaggccaacaacagtgagactccatctcaaaaaataaaataaaataaaataagtaaatatagtaatataactttttattcgtaaaaaacttttcaaaagggtaattgtgtagtagttgagactaataacttttgttgttgttgttgagatggagtcttgctctgtctcacccaggctggagtgcagtggtgtgctcttggctcactgaagcctccacctcccgggttcaagcgattctcctctcagcctcctgagtagctgggactacaggtgtgtgccaccatacccagctaatttttgtttttctagtagagacggagtttcaccatgttggtcaggctggtctcaaacttctgactgcaggtgatccacttttcctcggcctcccaaagtgctgggattacaggcgtgagccactacgcccagctgagactaatcataactttgaaatgataattccttttaatgaaaattgtattttaattttgtgtttctttttttcttgagagggtcttgctgtgtcacccaggctggaattcggtggcatgatcacatctcactgcagccttgacctcctgggctcatgcagtcctacttcagcctcctgagtagctgggaccacaggtgtgcactaccacacctggctagttattttttattttttgtagagatggagtctcacagcgttgcccaggctggtctcagacatctgagctcaagtgatccacctgcttcagcctcccaaagtgttgggattacagtcatgagctaccatgcccggccctaatttggaagttctatgaaatacttccgtttaattgaaccaatacttgtttaacaattaaaggacactcagccttgtatttgggtaattatacaagagaaatataaagcatggtttcagtgacagtagcttagttttactgagggtacaagaaatacacactgaaaaatggtacaaggaagtatatgaacaggggctaaaatgagtggtacagactgggtgattgaggaaagctatgtgtgctggtatatctccaaggattttgtagaacattcttgagggattttttcagacttatttagagatgagagctcattcagcacacacacacacatgcatactctgcttccaggaatgagccactgataacagataacagataaaaatgtatgccataggtatttcaggaccaaaaggttaaaaacaccctagtttgaaaggagatcaaatttctagcatggtcttaaaggaggtgagatgggaaaaggacgcttaagataggaaatgcagttgagaagcaaacacatgaagataagaatatgtttatgtcccaggttggagaggagaattaggaaaataaagagaagctgaattagaaagaccttaaacccagcagaagagtttaggatttgtcttgttactgtaaaggtttttgcatagataaaataaagtgctatttttggaagaatggattactctggatacggagaactcttagttgtggctaaggaattagctttgtgaagggatgacagattttttttttaacatttttaaaaaatttattttattttttaaattatactttaagttctagggtacatgtgcaaaatgtgcaggtttgttacataggtatacatgtgccatgttggtttgctgcagccatcaactcatcatttacattaggtatttctcctaatgctatccctcccccagccactgacccctcgacaggccccggtatgtgatattccccgccctgtgtccaattgttctcattgatcaattcccacctatgagtgagaacatgcggcgtttggtgttctgtccttgtgatagtttgctgagaatgatggtttccagcttcatccatgtccctgcaaaggatatgaacttattcttttttatggctgcatggcattccatggtatatatgtgccacattttcttaatccagtctatcattgtggacatttgggttggttccaagtctttgctattgtgaatagtgccgcaataaacatatgtgtgcatgtgtctttataatagcatgatttataatcctttgggtatatacccagtaacgggatcgctgggtcaaatggtatttctagttctagatccttgaggaattgccacactgtcttccacaatggttgaactagtttacactcccaccaacagtgtaaaagcattcctatttctccacatcctctccagcatctgttgtttcctgactttttaatgatcgccattctaactggtgtgagatggtatctcattgtggttttgatttgcatttctctgatgaccagtgatgaagagcattttttcatgtgtttgttggcttcataaatgtcttcttttgaaaagtgtctgttcatatcctttgcccactttttgatggggttgtttgtttttttcttgtaaatttgtttaagtcctttttagattctggatattatccctttgtctgatgggtagattgcaaaaattttctcccattctgtagattgcctgttcactctgatggtagtttcttttgctgtgcagacagtatttatttatttatttttttgctttcttttttttctgagacggagtctcgctctgtcacccaggctagagtgcaggggcacgattttggctcactgcaacctctgcctccttgggttcagcgattctcctgcctcagcctcccaagtggctgagagtataggcgcacatcaccatgcctggctaatttttgtatttttagtagaaatggtgtttcaccatattggccaggctgggctcgaactcctgaccttgtgatccacccgcctcagcatcccaaagtgctgagattacaggcgtgagccactgcgcccggcctggtcttcagtttaattagatcccatttgtctattttggcttttgttgccattgcttttggtgttttagtcatgaagtccttgcccatgcctgtgtcctgattgatagtgcctcggttttcttctagggtttttatggttttaggtctaacatttacatctttaatccatcttgaattaatttttgtataaggtgtaaggaagggatccagtttcagctttctacataaggctagccagttttcccagcaccatttattaaatagggaatctttgtcccgtttcttgtttttgtcaggtttgtcaaagatcagatggttgtagatgtgtggtgttatttctgaggcctctgttctgttccattggtctatatctctgttttggtaccagtaccatgctgttttggttactgtggccttgtagtatagtttaaagcgaggtggcatgatgcctccagctttgttctttttgcttaggattgtcttggcaatgtgggctcttttttgtttccgtatgaactttaaagtagttttttccaattctgtgaagaaagtcattggtagcttgatggggatggcactgaatctataaattaccttgggcagtatggccattttcacgatattgattcttcctatccatgagcatggaatgttcttccatttgtttgtgtcctcttttattttgttgagcagtggtttgtagttctccttgaagagatccttcacatcccttgtaagttggattgctaggtattttattctctttgtagcaattgtgagtgggagttcactcatgattttgctctctgtctgttattggtgtataggaatgcttgtgatttttgcacattgattttgtatcctgagactttgctgaagttgcttaacagcttaaggagattttgggctgagacaatggggttttctaaatatacagtcatgtcatctgcaaacagggacaatttgacttcctcttttcctaattgaataccctttatttctttctcttgcctgattgccctggccagaacttccaacagtatattgaataggagtggtgagagagggcatccctgtcttgtgccagttttcaaagggaatgcttccagtttttgcccattcagtatgatattggcggtgggtttgtcataaatagcttttattattttgagatatgttccatcaatatctagtttatggagagtttttagcatgaaggcctattgaattttgttgaaggccttttctgcatctattgagataatcatgtggtttttgttgttgtttctgtttatgtgatgaattacatttattgatttgcgtatgttgaaccagcctcgcatcctaggaacgaagctgacttggtcatggtggataagctttttgatgtgctgctggattcagtttgccagtattttattgaggatttttgcatccatgttcatcagggatattggtccaaaattctctttttttgttgtgtctctgccaggctttggcatcaggatgatgctggcctcataaaatgagttagggaggattctctctttttctgttgattggaatagtttcagaaggaatggtaccagctcctctttgtacatctggtagaatttggctgtgaatccatctggtcgtagcctttttttggttggtaggctattaattattgcctcagtttcagagcctgttattgttctattcagtgattcgacttcttcctggtttagtcttgggagggtgtatgtgtccaggaatttatccatttcttctagattttctagtttatttgcatagaggtgtttatagtattctctgatggtagtttgtatttctgtgggatcactggtgatattccctttagcattttttattgcatctatgtgcttcttctctcttttcttctttattagtcttgctaacggtctatcaactttattgatcttttcaaaaaaccagctcctggattcattgatttttttgaagagtttttttgtgtttctatctccttcagttttgctctgatctttgttatttcttgccttctgctagcttttgaatttgtttgctcttgcttctctagttcttttaattgtgatgttagggtgtcagttgtatatctttcctgctttctcttgtgggcatttagtgctataaattttcctctacacactgctttaaatgtgtcccagagattctggtacattgtgtctttgttctcattggtttcaaagaacgtctttatttctgccttcattttattatttaaccagtagtcattcaggagcaggttgttcagtttccatgtagttgggcggttttgaatgagtttcttaatcctgagttctaatttgattgtactgtggtctgagagacagtttgttgtgatatctgttcttttacatttgctgaagagtgctttgcttccaattatgtggtcaattttagaataagtgggatgtggtggtgagaagaatgtatattctgttgatttggggtggagagttatgtagatgtctattaggtccacttggtgcagagctgagtttaagtcctggatatccttgttaaccttctgtctcgttgatctgtctaatattgacagtggggtgtgaaagtctcccattattattgtgtgggagtctaagtctctttctaggtctctaaggacctgctttatgaatctgggtgctcctgtattgggtgcatatatatacatatatatggtagttagctcttcttgttgaattgatctctttaccgttatgtagtggccttccttatctcttttgatctttgttggtttaaagtctgttttatcagagattaggattgcaacccctgcttttttttgctttccatttgcttggtagatcttcctctatctcccttattttgagcgtatgtgtgtctctgcatgtgagatgggtctcctgaatacagcacactgatgggtcttgactgtttatccaatttgccggtctgtgtcttttaatgggggtatttagtccatttacatttaaggttaatattgttaggtgtgactctgatcctgacattatgatgttagctggttattttgcccgttagttgatgcagtttcttcctagcattgatgatctttacaatttcgcgtgtttttgcagtggctggtactgattgttcctttccatgtttagtgcttccttcaggagctcttgtaaggcaggcctcgtggtgacaaaatctcttagcatttgcttgtctgtaaaggattttatttctccttcacttatgaagcttagtttggctggatatgaaattctgggttgaaaattcttttctttaagaatgttgaatattggcccccactgtcttctggcttgtagagtttctgccgagagatccgctgttagcctgatgggcttccctttgtgggtaacccgacctttctctctggctgcccttaacattttttccttcatttcaaccttggtgaatctgacaattacgtgtcttggggttgctcttcttgaggagtatctttgtggtgttctgtgtatttcctgaatttgaatgttggcctgccttgctaggttggggaagttctcctggataatatcctgcagagtgttttccaacttggttccattctccccgtcactttcaggtacaccaatcaaacgtacatttggtattttcacatagtcccatatttcttggagcctttgttcgtttctttttactcttttttctctaactttgtcttctcgctttatttcgttaatttgatcttcagtcactgatatcctttcttccacttgattgaattggctattgaagcttgtgcatgcatcatgaagttcttgtgccatggttttcagctccatcaggtcatttaagttcttctctacactgtttattctagttagccattcatctaaccttttttcaagatttttagcttccttgcgatgggttacaacatgctcctttagctctgagaagtttgttattaccgaccttctgaagcctacttctgtcaactcatcaaagccattctccatccagctttgttccgttgctggcgaggggctgtgatcctttggagaagaggccctctggtttttagaattatcagcttttctgctctggtttctccccatttttgtggttttatctacctttggtgtttgatgttggtgacctacagatggggttttggtgtggatgtcctttttgttgatgttgatgctattcctttctgtttgttagttttccttctgtcagtcaggtccctagactacaggtctgttggagtttgctggaggtccactccagactctgtttgcctgggtatcaccagcagaggctgcagaacagcaaacattgctgcctgatccttcctctggaagcttcgtcccatagtggcacctgcctgtgtgaggtgtcagtcggcccctactgggaggtgtctcccaattaggctacacgggggtcagggacccacttgaggaggcagtctgtctgttcttagtgctcaaatgccatgctgggagaaccactgctctcttcagagctgtcagacagggatgtttaagtctgcagacgtttctgctgccttttgttcagctatgccctgcccacagaggtggagtctatagaggcagtaggccttgctgagctgtggtgggcttcgcccagtttgagcttcatggccactttgtttacctactcaagcctcagcaatggcggacgcccctccccaccacgaggctgctgtctcgcaggtcaatctcaggctgctgggctagcagtgagcaaggctctatgggtgtgggacccaccaagccaggcacgggagagaatctcctagtctgccggttgccagggccatatggaaaagtgcaatatttgggtgggagtgtcccattttcccaggtacagtctgtcatggcttcccttggctaggaaagggaaatccctggaccccttgcgcttcccaggtggggcaatgccccaccctgttttggctcaccctccatgggctgcacccactgtccagccagtcccagtgagatgaaccagttacctcagttggaaatgcagaaatcacctgtcttctgcatcgatcatgctgggagctgcagaccggagctgttcctattcagccatcttggaactggattagacagattcttgacagaaaaattcagtagaatgtgcttaatgactatgtgttaaagaatgaaggtgggggactacatgaatttaagttaacttagcaaattgacaggaatttgaaaatggatcagttagctttttgaaggaggaaaagaagttgaatttagttttgaacatatactgtttttgaggtatctgtaagatatacataaaagtgggctatagccaatgaggaatataggacttggtttaaaagtcaaaactggggatagggaggggaaaagacagaaagagaaaggattcctttagagtgaggaatcagtgaaactgtaagcatgaattaactttttagtgcttagaattctggttttgtttcttcttatgcagacagaccatggattcttacagtgcaccagagtcaactcctagtgcatcctcaagacctgaagattactttataggtgccactcctctgcagaaacgattagaatcggtcaggaagcagagttcatttatcctgactccacctcgaaggaaaattccccagtgttcgcagttgcaggtatgctttttgtgtccctttgtgttagtcaataattgagaatatctgtgaacaaaacatttcaatttttgtaactatagtattcttagtatcttcttaacccctcagctaataaaataaatgagaaagaaacaatttcataacgatcagtgctacctctttatgtcttttatttgttttttatatttgtatttatgtatttatttatttattttgagacagagtcttgctctgtcacctaggctggagtgcagtggcgcgatcttggctcactgcaagctctgcctcctggcggccattctcctgcctcagcctccccagtagctgggactacaggcgcccgctaccatgcccagctaatcttttgtattttttagtagagacggggtttcaccatgttagccaggatggtctcgatctcctgaccttgtgatctgcccgcctcagcctccccaagtgttgggattacaggcatgagtcaccgcgcccggcctgtttatttatttttaaagtaattttcaaacatgcaacccatatatacgaggagtttttatgtattttaacctcctttaatctgaatcatgtccacggtattttttttttaacttttattttaagttaaggggtatatgtgcaggatgtgcaggtttgttttctaggtaaacgtgcgtcatgggggttggttgtacagattatttcatcacccagatgttaagcctaatatccattagttatttttcctgcttctctccttcctcccaccctccacccccgacaggcctaagcgtgtgttgttcccctctatgtttccatgtgttctcatcatttagctcccacttataagtgagaacatgtggtatttggttttctgttcctttgcttgttggctaaggataatggcctccagctccatccatgtccctgcaaaggatatgatctcattcatttttatggctgcataatattccatggtgtatatgtaccacattttctttatccagtctgtcattgatgggcatttaggttgattccatgtctttgctattgtgaatagtgctgcagtgagtgtatgcatgcatgtgtctttatggtagactgatttatattcctttgggtatatacccagtaaggagattggtgtgtcaaataatatttctgtctctaggtctttgaggaattgccacacagtcttccacaatggttgaactaattcacactcctaccaacaatgtataagcattcctttttctccacaacctcaccagcatctgtttttttttgactttttatttttctccacaacctcaccagcatctgttgtttttttactttgtaataatagccattctgactgatgtgagatagcatctcattgtggttttgatttgcatttctctaatgatcagtgatgttgaacttttcttcatatgattgttggcctcatgtatgtcttcttttgagaagtgtctgcttatgtcctttgctgactttttaatggggttgttttttttttgttgttgttttgttttttttttttagagagtgtctcactctgtcacccagccaggctggagtgcagtggcatgatcttggctaactgcaacttctgccttccagattcaagcgattcttctgcctcagcctcctgagtagctgggattacaggcatccaccaccatgcctggctaattttttttgtatttttagtagagacagtggttcaccctgttgtccaggctggtctggaactcttgacctcaggtgatcaaccctccccaccctctcaaagtgctgggagtcttgctctatcacccaggctggagtgcaatggtacgatcttggctcactgcaacctccgcctcctgggttcaagcgattctcctgcctcagcctccggagtagctggcactacaggtgcccgccaccacgcccagctaatttttttgtattgttagtagagaccgggtttcaccatgttggccaggctggtctcgaactcctgacctcaggtgatccacccgcctcggcctcccaaagtgttgggattacaggtgtgagccaccacgcctgacctggcccattttttttcttgtaaatttgtttaagttccttattggtgctggatagtagacctttgtcagatgcatggtttgcaaaaattttctcccattctgtaggttttctgtttactctgttgatagtttcttttgctgtgcagaagccctttagtttaattagatcccatttgttaatttttgctttcattgcaattgcttttggcgtctttgtcatgaaatctttgcctgtacctatgtcctgaatggtattgcctaggttgtcgtccagggtttttatagttttgtgttttacatttaagtctttaatccaccttgagttaatttttatatatagtatatggtataaatgaagtgtttttgtttttaatcgtacctgtggttctaatagagcatggcaaaaaatattcccaaatatctttttttttttttttttaagactagtctagcacagtagtgacaaagggggaagggggaaagagtagaacagggagttggaaacaaggagtttgatctataactgattgtgaacaatcaactgagataactcactacctttggaccagcccccaagtatctttttatttaatctattgaattgggcatggtttcataaagtagatttgctgccaattttttttttttttaaggcagagtctcgctctgccacccaggctggagtgcagtggcgtgatctcggctcactgcaacctctgccttccagattcaagcaattttcctgcctcagcctcctgagtagctgggattacaggtgcacaccaccatgcctggcttatttatttttgtatttttagtagagatggggttttaccatgttggctaggctggtctcaaactcctgaccttgtgatccgcctgcctcagcctcccaaagtgctgggattacagtcgtcagccactgtgcctggcccaaacaattttttaaattaagactaatcaaattagatactttaggaatggttactacttttgaaatctatagtttgaggtttctaaaagtgaaacataaattttatgttaaatatttattgaacacttattctagatagcattgttctagagagaactaaatagacaaaatcactgctgtcatccagcttatacaccagtagggaagacagataataaaaatacaaaaaaattgcagacaagaatataatgttgggtagtaataagtgctgtgaagaaaagtaaagccagatgaggtgatacaaagttggagtgggtgcaggtgctactttagatcgagtggcctcttggattacatttgggtagagaactgatgaagtgaaggaacttgccatgtgaacacttgggagaagagcattctaaagagaaggtacagcaaaggtaaaggtctgttcaaggatctgcaaaaagtcctgcaaactcatttggttggagtgcaaaaatcaggtactcaataatatatttgtattagatgttttaaatgctatgattaaattcttattgtttcctaattcttaaacttcttttgtcttgatttttttttataggaagatgttgaccctcaaaaggttgcattccttctgcataaacagtggactttatatagtttaactcccttatataaattctcctatagtaatctcaaagagtattctagacttctcaatgcttttattgttgctgaaaagcaaaaaggacttgctgtggaagtgggagaagacttcaacatcaaagtgattttttctactctcctaggaatgaaaggaacacaaagggacccggaagcatttcttgtccaggtataatacataaacagttcttgcttcctaggggaaaagtattatgtcttgtttgactaaactataataattagatataatcaacttaaaaaattttttcctatatatataggtagtttgtgtacaaaatcatgtttatttttaaaaactgaggaaatacataaaaataccaaaaaagttaaaaattatagtttaacattttggtatatatgtttggttatctgtatctatatagtcttgaaattgggatcatattgcccatacttttacattatgatatttttactaatattgtagacaattacttatatcattaggaattctgtatttttgtggtttttactgggattaaatttctataagtagaattttagtataaaaatatatatcattaaattttgtgatacttcatgccaggttactctcagaaatgtaacattttaaggctgggtgcagtggctcatgcctgtaatcccagcactttgggaggctacggcgggcagatcacctgagcctaggagtttgagaccatcctgggcaacatgacaagatgccatttctacaaaaaatacaataaataaataaataaatctggtttcttaagatagttctgttgctcttatatactacttacaggaaggaatataaaatgttgcgtttattttattttattttatttttttgagacagggtctcattttgtcacccaggctggagtacagtggcacgatcttggttgactgcaacctctgtctcctgggctcaagtgatccttccaccttagccttccaagtagctgggactgcaggtgcatgccaccacactcgggtaaattttgtattttttgtagacagggtctcgccatgttgcccaggttggtcttgaactcctgggctcaagtgatccacccaccttggcctcccaaagtgctgggattacaggcatgaaccaccacactcagcctcagatttattttgtttattattcatgcctgctgcttctgtttcttttgagctaactaatcttaataatggataaggaaattaagttctcaagcagttgaaaaggactgactttttgtttgtatagattagagtcagtaaaccatggcccataggccaaatctgatctgctgcttgtttttgtaaataaggttttattggaacatagccccttttatttgcttatatattgtctgtggctgcttttgtgctgcaacagcagagttgagaagttgcaacagagcccatattgccagcaaagtctgaaatgcttactaactggccctttacagaaaaaatttgctgacccctgatataggtcatggtattggcaaagatctcaagatgttctgggattagggttagcctaaataacagtgaattaaacaagatagtggtatactgtctttttttaaaaaaaaagtgcatggatgtaagctgtccgaggctggtatgatgcttgatgaaatcattaataatctaggctctttcttctccttagtgcatggttttcatcttagaagttaccttattgtctaacataagatgtctccagcagctctaaacattatattcaagttccaggcaggaagtaggaagaagatgggaaggacaaacagaacctgatgcagagtaaatcttgctgagacccagtaacttctctttacatcttagttggaagggaggctagaaaagacttttttttcagtgagtactctgccaacttaactaaagagactttttttttttttttttgagacagcttctctgtcaccaggttggagtgcagtggtactgtcttggctcactgcaacctctacctcctgggttcaagtagtcctccctcctcagccccccaagtagctaggactataggcatgtgccaccgtgccaggctagttttatatttttatagagacagggtttcaccgtgttgcccaggctggtctcaaactcctgagctcgtgatccacccgcattggcctcccaaagtcctgagattgcaggcatgagccatctcgcccagccataaagggactgttttattgtgggaggaaaaatggatactcaagagacaattagcagtttttgtcaagtgaagcacttgatgcacagagaagttttgtgacttgcatattatcagtcaagcatctacccttgtgaggattagaaatgacctcttgaattcctggtatagtgttctaatagttttcaaattaaatttcgtttcttgatagggttacaagactcttaggtcatgaaagtgtgataaagttaatatatctaagcttccagctatttgagagtctttcataatttcttgaacaaggagaaatatgttaaaagaactgtgtaaatgatcatttctgaaggggtatgatacaaagctatgatattaaccttggtctgcttaatgctttaacagagttctttgagtatccggaaggcatgtttgtcatgtaacttaaaatttagtttgaggggttaggcaatcagctaaaaatataataaaatatcctaaatgttctgaatggattgtccaatgagccaaatcaaaagagattaaaatgttagtaggaataaatttacagcctcagtataagttgggagagatttacctataaagcaaacatgaatatacagggctagtttatataaagctgtcaactaaaaaccagaaaactgcaatctgagattacattaataggagtataatctagttaaaggtggtggttagtcttgcaatgagacctttttcccccttccttccccgaatcagagctttttaaagtaattatattcacttatgaatgattcctatgcagaataatttcagggaagagtgactagaatagtgagagaatgtgaatgtatgtcataggtgaatggttgaagaaactggaaatattgaacttagtactatgtatgatggggaccatcaaatatttgaaggacttttcctgtagaagagagatcagatgtgattatattctgcatgcccaaaaggaagaaagcaggaccagtgggtagaaactgtagggtctaacatataaaagaacattttaagttgatagtgctgccttaggaaatattgaagccttcctcaatgaaagaattcaaacatgttagattttgtgacctttcacagttctttctaaagttgaggggttttttttgtttgtttgtttcagggtactacacctggttatgccatattggtagctcttattttgcagtttggttacaccaagattttgccatatatcatgtttccactgtataagaatattgggggccgggcctggtagctcacgcctataatcctagtactttgggtggccgaggtgggcagatcacctgaggtcagaggttggagaccagcctgaccaatacagtgaaaccccatccctactaaaaatacaaaaattagctgggcatggtggtgcatgcctgtaatcccagctacttgggaggctgaggccggagaatcacttgaacccaggaggtggaggttgcagtgagctgagatcacgccaccgcactccagcctgggcgacagagtgagactccatctcaaaaaaaaaaaaggccaattattttgataagccctgttaatcattagggagactattccctctatgtttttttttgcaagtattacattggctcgtcttatttttaatgaactaattttgagaagatggaatttagaagtaaatgtacttttgaatttaaggagcctgtttactttctttgtagattgtgtcaaaatctcaattgccatctgagaatagagaaggtaaagtgctgtggactggctggttctgctgtgtatttggagacagtcttctggagactgtttcagaagatttcacctgtctgcccttattccttgcaaatggagcagagtctaacacagcaataattggaacttggtttcagaaaacctttgactgttatttcagtcctttagcaatcaatgcatttaatctttcctggatggctgccatgtggactgcatgcaaaatggaccattatgtggctactactgaatttctttggtctgtaccctgtagccctcaaagtctggacatttctttcgcaatacatccagaggatgcaaaagctctatgggacagtgtccacaaaacacctggggaggttacccaggaagaagttgacctattcatggattgcctttattcacatttccatagacatttcaaaattcatttatcagccacaagattagttcgtgtttcaacatctgtagcttcagcacatactgatggaaaaataaaggttagtttgaacaatctagttaagtaatttttccttgttttatggttttaaaaatgtatgatgattgtattgtccactcaattgaagaaacacacttgaatgtattcaagacaatagagagcttttattttatggtttatggtttattgcagtctttagccttctagatatagccttataatggaaggacactatatgctgtgtgcttcagcttttggtaataatgtgaattattattttgtagtaactttgaaactttcagaattgttccttgtgaaattttgaaataattatcagagtaatagagaattttgtgttagacaaaattatagccagaaacacagaactaagatgtcatctttatgttccaggcttttctgtcctcattgggaaagaaataatagagacattgttttattctctacagagtgatttctgataagaagtatcagaaataggccaggcatggtggctcacgcctgtaatcccagcactttgggaggccgaggcgggcggatcatgaggtcaggagattgagaccatgctggctaacacggtgaaaccccgtctccactaaaaatacaaaaaattagccaggcgtggtggtgggcatctgtagtcccagctactgggggaggctgaggcaggagaatggtgtgaacccgagaggcggagcttgtagtgagccgagatcgcgccactgcactccagcctgggtgacagagcgagactccgtctcaaaagaaaaaaaaaaagtatcagaaataaactgagaattggctcctaaaatatattaaaatacacagccacaatgtacattcagtaaatgtttcctgtgatcttgttactgtgctaagagtttaacagacttaaattctaatctttagagcaaccctgtagttaggtgttttttctgtgtgtgctttttgtttttttttttgagacagaatctcaccccatcacccaggctggagtgcagtggtgctatctcagctaactacaacctctgcctcctaggctcaagcgattctcgtgcctcagcctcctgagtagctgggactacaagcatgagccactacacctggctaatttttgtaattttactttttttactatttttatctttatttatttatttattttgagacggagtcttactctgtcacccaggctggggtgcagtggtgcaatctcaactcactgcaacttccgcctcctgggtttaagtgattctcctgcctcagtctcccgagtagctgggactacaggtgcctgccaccatgcccagctatttttgtatttttagtagagatgaggtttcaccatgttggccaggctggtcttgaactcctgacctcaaatgatccacttgccttggcctcctaaagtgttgggattacaggcatgagccaccatgcctggctagttagatttttttttttttccttcgagatggagtcttgttttgttgcctagactggtgtgcagtggtgtgatcttggcttactgcagcctccgcctcctgggttcaagcaattctcctgcctcagcctcccgagtagctgggattacaggctccaccaccatacttggctaatttttgtatttttagtagagatggggtttcaccatgttggccaggctggtctcaaactcctgacctagtgatccacccacctcggcctcccaaagtgctgggattataggcatgagccaccgtgcctggacagttaggtgtttttatccacattttattttaaaacaaggaaactgaggccaagataggtttaaatgacaagcaagatagattatcaagaggaagaatcaagatttgaactcttacctcgtagatccaataagtcaatactctataagcactatattcatgtttttcaaactggaggtcacagtgcaacagtaggttgggaaataattttgatgagaccagcattaaaaaacaaaaagggaaagaaatagaaaatgtaaaaatgaggggttttttgttttagagagagtctcattctttcacccaggctggaatgcagtagtgtgattatagctcactataacctttaactcttgggctcaagtgatcctcctgcctcagccttgtgagtagctgggactataggtgtataccattacacctggctgttttttacattttaaaatttttttgtagagatgaggtctccctttgttgcccaggctggtcttgaactgctgggctcaagtgatcctcctgcctcggcctctcaaagtgctgggattatagggataaatcactgtgcctggccaaaaatgagtgtattgcatgtggtaagcttcatgaattaaatctagaagttaaaccaatataacattgattattcaaatatcaatctgctttgttataattaatactattctaattttaaatgtctccttctttttctttttgcagattctgtgtcataaataccttattggagtgttagcatatttgacagaactggcaatttttcaaattgagtgaagccttatgtggactataagttatagattatatactcttattgataacttgcctaattgctatgctgaaagagactgcaggagaaataggcatctatctctgcatctgttttccccaccatgcctttggagttgccaagatggaagccaagaaggatctagaagaacaaagaatatggtagtagatgagccacagccaggtgcccatgtactaatcatgataacctgacatgccattctcaaaatgctgagttgttaatttcttgtcatctttaaatatatatatataggctgggcttggtggctcacacctgtaattccagcactttgggaggctgaggtgggtggatcatttgaggccaggaattcaagaccagcctggccaacatggtgaaaccccttctctactgaaaatacaataattagctgggcgtggtggcacatgcctatgatcccagctactggggaggctgaggcaggagaatcgttttaacccagaagacaggctgcagtgagccaagactgcaccactgcactccagcctgggcaacaaagtgagactctgcctcaaaaaataaaaaagaaataaaataaataaatacagcgtttattatgtttaaactcttaggattcaaatgagatgtatctaatggatatttctgatttgggtctttaaaacctttaatctcttttaagcattttagacttgcattcagaaagaattctgtcttctaaagacattttcctagcatttcactgcggagaactggcaatcaaaatcccctcaaaagggaactaaagattaatatacacatttttttagtcattaatatgcttctgttttaaatacagttcaactcctgttgcaatgttgaattaaatgtttattttaaaatga

SEQ ID NO: 39 - DNA, 32742 bp, Homo sapiens
  source 1..32742: mol_type = other DNA
agcgggcggagttgaagggcgcttggaccccagcggcgatctgtgtttgggttcgcgctctgggagaattttggctttgctcgccttcctctttcagaagactcgaaatcggccagcaggtctgcgagatttgaaacgcgactgttactccttgttttccggttctggccgcgggagcctctcgagaagcgtggaaagaggagaagggcgtataccttgtgaccgcctctggttgtcttgggctcgcgcctggcgccgctacgtggagtcgctctctcgtcgtcacttttggctgccgacttgttgagtagaagtgcagactgatgctttaagactcagggagaggtctttcccttatctccaccccagcaagcaccccagagaccttggagatttgtcttgtttctagacacgtgtactccaatgttgtgcggaggaggccttaaatattcgagaagagagtgggaactcctggaattttaagggatttctgtgtatttccaaaactgacttttaactaccggcagcgtgggatttcgtgattgtttttcgccatcgtgtggctccaacatgtacttcccttcttggttaagtcagctgtacaggggtttatccagacccatcagaaggaccacccaaccgatctggggttctctctacagaagtctgttgcagagttcacagaggagaattccaggtgaaaatagcgaagagatctatcctatgaacagtacttcagcctgttatctacggccggagagcttttattccatttttcattttttcccccattattattattattattattattattattattatttgagacggagtctcgctctgctgcccaggctagagtgaagtggcgcgatctccgctcactgcaagctccgcctcccgggttcacgccattctcctgcctcagcctcccgagtagctgggactacaggcgcccgcgaccacgcccggctaatttttctgtatttttggtagagccggggtttcactgtgttagccaggatggtctcgatctcctgacctcgtgatccacccgcctccgcctcccatagtgctgggattacaggcgtgagccaccgcgcccggcttttcccctgttcttaactggatagccttatgtgtagaagcgaaattcactctcattatattcattatacggcagttttttttccctgagtttttagaaagaccacaaaaaggtaaccacgtaatatatagaatactctgcttttggttgatgccttaaaaaaatccttcttcggccgggcgcggtggctcacgtcgttaatcccagcactttgggaggtcgaggagggcggatcacgaggtcaggagatcgagaccatcctggctaacacggtgaaaccccgtctctactaaaaataaaaaaaaaattagccgggcgtggtggcgggcgcctgtagtccccgctgctggggaggccgaggcaggagaatggcgtgaacctcggaggcggagcttgcagtgagccgagatcgcgccactgcactccagcctgggcgacagagcgagactccatctcaaaaaaaaaaaaaaatcatttttcacagaattataatagtgttttctagtgtacaagtggctgttaaacactagattcatactaaagctaaatagttcctacaccgtccatttctgcagtttctaaaatcctatttcatttgaggaagaaatgtgcaatattaagaattgggtaattaggattttaggtcaatgcaaatgctagaagatcaaaaaaattttgatttcctaacacaagacagaaatttacattcagttattcacttggcttttgacacatttgcaggtaaatttaatagtgaatgaattaaattacatactctgacttattttattttataaatttcccctgtagccctgacatacctaagatatattttgagaattttcatttttaagcaacctgcaagtgatgtatttttaatcttgccttttaaagtttctttttttttttttttttaaagaattcagtagctttgttgtccggaccaacacatgtggagagttgcgttcgtctcacttaggccaagaagtcaccttgtgtggatggattcagtaccgaaggtaaattgagaaagacagtctaagaatgcatggtggtggttttcccagggcaattccaaacctttactaatttacaaccagtccgaagaataaaacgttttgcaactcctgcaggattaagaacttactgaattttcaactttgttttagttttgaaagacccaagtgtcattctcagtagacattttgaaagacccaaatgtcattctcagtaggtacatctcagtaacatctgttgaagggtataacaacgaagcttgatccaccagtggactgaaatgatactgggcttactaagactgaagagttcctataaccagtaattaaaaatgggccagcctcctataaaccagctgttaaactccaatagcatgggggaaaagctcatcttattccatgtaggtagagaagaagcctagaaacataaacagtgattccttaagatcagagcccattttttgttgttgttcatctctctattccagaacatgcctgaatagaacattaattcacatggaagagattcaaaatacataggttatatgaccttcttaaagaatatgtcccagcctggcgtgtaagcctgtaatcccagcactttgggaggccgaggcgggcggatcacgaggttaggagttcgagaccagcccagccaatatgatgaaaccccgtctctactaaaaatacaaaaaaagttcgccaggcggggtgatgctcgtctgtaattctagctactcaggaggctgaggaaggagaattgcttgaacccagaaggcagaggttgcagtgagctgagattgcgccactgcactccactctgggcaacagaacgagactccgtctcaggaaaaaaaaaaaagtttgtcccaagtaggtggatatttttcccataagtttagtgactgtttcctgaacccaaatctgaagagggtttctgtacctgttcctgatgctgaggatagtatgagaaatagaggttggatgttaaaatgttggcatttctgggaccttttgatgattcatagaggtattaaattagtagttggaactcttccagaaaatgttagattgtatctttttttagaaaaagactatattgctatatttcaaaaatgatccatcagatgtttctattatgctaaaatactatctttggattttactatatgcaaagtttccaaatttaataaaattttcttaaaaggacttaagccaatgaaatttcttttaattgttcatctataataatttttcattaataagccatctgtataagattaatataccaggtaagtagacaataaaaattgaaactgaaataaaaaacaatcttttttttggcaatgagctacatagataacaattgcatgaatgtaactaatgaaggtacataattatcataaaaaacatgaaaaattataattatcataaaaaagaaacatgaaaaattgcatggatttttgtttgctttttattttgtatgcttcaactttggacttagagattttatcttaaaatgtttcttttccccccccccattaatcaggcaaaacacattcttggtcctaagagatttcgatgggcttgttcaagttatcattccccaggatgaggtaatagaaaatttcctgttattatctaaaagcttctttgatgctattgctggggtaagctaagtagttagatgaatatgttagaggttttaaattcagaagtttattgttaatgaaaactgaaaaatataagcaatgttaagacatagcaaaaagaccagtgacccagtagaattaggaacccaggatacgaacaaaaaatttagaggaaaaaaatatataaatggcttgtagacataatgaaagtatgcccagcctcactcataggtagagaaatgtgaattgaaactgcatgtaattgtcatttttaacacattagattgacaacacactgtgtttgggaaagcaggtgctcaatacctggagggagtacaaattggcactagctgaagggagagcaatttggcaatatcaaaactataaatgcatatatcctttgagccattaatttcacttctggtaaattatcttatatctagacttatacagatataaaatgacatatgtacaaggatattcatttcaggattctttttaacggaaaaaaattgggaaccacccagatgtcctccaataagagactggcttaaaaaataatgtatattcttacaatacaatactctactcagccgtacaaaaaagaatgaagaagttctattctaatagggaaaaaaaaatccaaggaatactgttaagtgaagaaccctgtattcttgagtatacaaaagagcagctgttaaactccagcactctaagtgctgtcatctgtataaaaactgggggaaggatgcagaatatacattcagtgtgtgtgtgtgtgtgtgtgtgtgtatttgcttgtatatatgttaggaaatgtctctggaaggatacctaagtatctggtaacattaggtgctgctgggggaaggaactgagggcgttgaaaacaaggataggagggaagctttttactatatctttttgtaccccttgaatttgaagccatgtgacggtattactgctcaaaaaagtatttaatttaattaccattgaaattagataaaatatgacagagtgatattctgaaaaaaaaatttttttaattaaaaaattcaaggccaggcatggtggctcacacctgtaatcccagcactctgggaggccgaggccagcagattgagtacaggagtttgagaccagcctgggcaacagtgaaacctcgtctctactaaaatacaaaaaattggccaggtgcggtggctcactcctgtaatcccagcacttttgggaggctgaggcaggtggatctcgaggtcaggagtttaagaccagcctgaccaacatggtgaaaccccgtctctactaaaaatacaaaaatttagccgggtgtggtggcgggctcctgtaaccccaactactcaggaggctgaggcaaaagaatcacttgaacccagaggcagaggttgcagtgggccgagatcacgccactgtactccagcctaggcaacagagcaagactctatctcaaaaaaataataataatacaaaaaattagctgggtgtggtggcatgtgcctgtagtcccagctacttgggaggctgagttgggagaatcacctgagcccaggaggttcaggctgaagtgagccaaaattgcaccactgcactccagagtgcacaccagagtgataccctgtgtcaaaaaaaaaaattaaaattaaagaattagataaaataaagaacttccatcatacttactgggcaaagttggtttctattgcaatttttactaacgcttgtatgcctaagaaaaatattatttattcagctcttaagttttgaaataaataaagagcaatgaattatcttttagggatcaacatccagagatgagtatagctaaccctggagaactcctttgactctgacccattattgctatgggatttaactgcccctaagactaaccctggagacaattgcttttcaagtatgtgggacttgtttgcactaataatagtcattcttacccttattttcctttaaggaaagtttttttaaagctcttaactaatagttttacttgctgtattatatagagtcaaaatggggatgcagtttttactaaatttggtaataaagtcattaaggagcagccccagcctttatggtaattaagctgtgactattaacgttttttaaaccatctacttataattactgaagattcctgtaagttcatttgtttctcagaactcttttcccccttgttctgtagtcggcagcctctgtgaagaagattttatgtgaagcccctgtggaatctgtggtgcaagtgtctggtacagtcatttcccgtcctgcaggacaagagaatccagtaggtagtttcgaagatatctgtgtaatttttgcttgtatgcatttgcaccatctgtgtacacattctggcaacacatgactggacattaggcactaaagttgaataaattctacaaatgaactgacagatttcaaaatcttgactataaacaaacacatctatgtaaatatgcatgctaagtctcactctgtcaccaggctggagtacggtggcgtgatcttggctcactgcaacctctgcctcctgggttcaagtgattctcctgcctcagcctcccgagtagctgggactacaggtgcatgccaccacgcccagctaatttttatatttttagcagagagagggtttcaccatgttggccaggatggtcaccatctcttgacctcatgatctgcccatctcagcctcccaaagtgccaggattacaggcgtgagccaccgtgcctggccctttttttttttttttcaggacgggtcttgcagtattacccaggctggtcttgaactcctgggcttaagtgatcctcctgtctcagcctcccaagtatcagactgcaaggatatgccatgacatttgttgatatctgaacacatcagccacatatgcataagaatgtcaaaatcatgcacagacatgtatgttttatactatacactataaggactttgcacattttacatatgtaaataaatgcatagattctacaaatgtgtattttgtgtatatcctgatgagtaatttttaaaacccttccttctcactctccaagaaaatgccaacaggtgagattgaaatcaaagttaaaacagctgagcttctgaatgcctgcaagaagctgccctttgaaattaagaacttcgtgaaggtaccaacctctgttattaataaaatagagtatctagaaaatgttgatgactagtcaagtattttcagagttttttaaagaaaagtttaacttctacaaaattaagcattttattgtagacacatcatgaagtgttctcttagttctacaacttcttggcacactgtcctgaaataatgacagttcagtaaactgttgcagtccctaaatacctagactgttttttcagacagattaaaatgtgattctctctttaaaacttgaggtgttatattattcaagtttttcgttgctattgtttaacatttgaaaggaaatttatgtctagcttagaaatggccagatgggacaggggatcctgtatctattaagtgataaaatgtgtgcttagagcaacgcttgacctcccaagcatataaatataaataggattaccataatttagaatgttctttgccaaagtttaagggcttgatggagctgtacactcatatgattttcagctttgtcacagtttatagacttatatattcctaatttttaaactgatctattaacagatttttaattagtcttaattaattagtcttacatttaagttcatggccaattagtcttacatttaagttctcaatacttacgtttaagttcatggccaattggtcttacatttaagttctcaatacttaattatctaattagaaagagcaatgtaattatagagttgaccttattttgaaaaagaaaatatatagttttccccagatgagcattcaaaaagagaagttatagacatttcctaagttttcagcacaaagagggatgcagagatttgtagccttgaaaataagcaaactaggctgggcatggtggctcacacctgtaatcccagcactttgggaggccaaggcagacagatcacaaggtcaggagttcgagaccagcctggccaatgtggtgaaaccccgtctctactaaaaatacaaaaattagccaggcgtggtggcaggcacttgtagtcccagccgctcgggaggctgaggcaggagaatcgcttgaacccgggaggcagaggttgcagtgagccgagatcatgccactgcactccagcctgggtgacacagcaagactccatctcaaaaaaaaaaaaaaaaaagagagagaaaataagcaaactatttctactagtacagccatggagattccatccactgtccctttgcattctttacacttgtagtcagcgtcccattcaggtgaatcttctactctgatgtatctttttttaggagatggggtcttgctatattgcccaggctggcctcaaactcctgtgctcaagtgatcctcccacctcagcatcccaagtagctgggattataggcacatgccaccatgcccagatacagcataatggtgctgtgtatttttctaagagacctttgaaatctttaaatttttttcaagattcaactatgggcttaaattaatggataaatgtttagtaaagtaggcaaatttcagtcagtgaagagtgatattattaataatgaatagtaaaaaaatgtaaaatctgcactgatgacaaacttagaagttgtaggaattaacagcatacagtgggctacttaatgatagaaactaaagacagagctaaaatttttgaaaattcaaactctttctaaagataatacctttctaatattgaaaaatatttaaatataaaaatctttcaatttctttagaaaacagaggctcttcggttgcagtatcgctacttagacttgcgtagtttccaaatgcagtataacctgcgactgaggtcccagatggtcatgaaaatgcgggaatatctctgtaatctgcatggtaagagaaatgcctggatgctctttggagctttgtagcatctcttctattttattcagcagttttattgtatcctttccttagcatgaggtcaagatgttgccagaagtctggaattcactcaatgtgtaatgtagtttttgaagaaaagttaacattattttaaagatgataaagatgatagtcgctattacattgattaatgtattatagtatttcccatcatcatcaaaggcaggacagccctttggctttttctataagatttcttttcttttttttttttgagacggagttttgctctggctagaatgcagtggcattaccacaactcactgcagcctcaaccttttaggcttaaccgatcctcccaccacaccttcccaagtagctaggaccacagacatgcaccaccacacccagccaatttttaaaaattttttgtagagacagggtctcattatgttgcccaggctggtctcaaacttctgggtttaagcaatcctcccacctaaccatcccaaagtgctgggattacaggcatgaaccacgatacccagccagttttcttaattctttatcatgtgcatacatcacttattgggagctcaaaaatgtcatgtgaattaaactagacatctcattcagtcctggactttttctgctatatttgtgttatttctacactaacagaacatttaaaaaatcagaatagttcagtagacaagaatccattaaatatttagaattattttatgtgaacagtatgctttatgaacagaatagtatttatgaaaatcttcagcttccttcttagatttgtagaaaccagcaccagtaggcttggtagcttatttcagctaaaattcttaattaaagggaagcctcagatttgttgtactatattgtggacatcatatatgacaaatttcacattcctatctactaagtgataatgtttctctctttttagggtttgtggatatagaaacccccacattgtttaagaggaccccaggggtatgtatattccttcaatcagtctattaataatgtcctattagttataaagctagactactttgcttttatattcacttggtccacttttatttactgcctcaggatggtcatattaactaggtttttctgaagaattgagaaaattatttgggtattttgagtcagaatcattttattccacataaattttctttcctttgagtttttttgtttttttttttttttttttttttttggtttgttttgggtttttttttttgttttttttttttttttgagacagtctcactccatcacccaggctggagtgcagtggcatgatctcagctaattgcaacctctgcctactggatccaagcgattctcatggctcagcctcctgagtagctgggattacaggcatgcaccaccatgcccggctaacttttgtatttactttagtagagacggagtttcaccgttttggccaggctggtctcgaacacctgacctgaaatgatccgcacaccttggcctcccaaagtgctgggattacaggtgtgagccaccttactcagtctcatttgagttttatagatgtaatcattaataaattggtattttttgtttttgtttttgtttttttagacagtctcgttctgtcacctgaatccgcctactggattcaagtgattcttctgcctcagcctcccaagtagctgggactacaggtgcgcaccaccacacctggctaatttttgtatttttttagtagagacggggtttcgcatgttggcccagctggtctcgaaatcctgacctcaggtgatccacccgcctcagcctcccaaagtgctgggattacaggcgtgagccaccgcgcccagccaatgaattggttctttaagaacaaatctattggccgggcgcggtggctcacacatgtagtcttagtactttgggaggctgaagcaaggaggatgacttgatcccaggagttcaagaccagcttgggcaacaagaccgtatctcttgtcttaaagaccctaaagaaaaaaaaatggaaaagaaaaaaaattattttaaagaacaaatctcttatatattaaaaattgacatttttcggccaggcacagtggctcacacctgtaatctcagcactctgggaggccaaggtgggcagatcacctgaggtcaggagttagagaccagcctgaccaaccatggccaacatggtgaaaccttgtctctactaaaagtacaaaaattaggccaggcacggtggttcacgcctgtaatcccagtactttgggaggccgaagcagatggatcacctgaggtcaggagtttaagacccgcctgaccaatatggtgaaaccccgtctctactaaaaatacaaaaaaaattagctgggcatggtggcaggcacctgtagtcccagctactcaggaggctgagacaggagaattgcttgaacccaggaggcagaggttgtaatgagccaagatcacgccattgcactccagcctgggcaacagagcaagactccgtctcaaaaaaaaaaaatattagccaggtgcagtggcgggaacccataatcccagctacttgagaggctgaggcaggagaaccgcttgaatccagaaggcagagtttgcagtgagtccagattgtaccattgcactccaacctgggtgacagaccaagactctgtctcaaaaagaaattttttttaataaataaaaatggacatttctggccgggcgcagtggctcacacctgtaatcccagcactttgggaggccaaggcgggcagatcacgaggtcaggagttcaagaccagcctggccaacatggcgaaaccccgtctctactaaaaatacaaaaattagcggggcatggtggtggcaggcacctgtaatcccagctactcgggaggctgaggcaggagaatcacttcaacctgggaggaggaggttgcagtgagccgagattgtgccatcgcactccagcctgggtgacaagagcaagattctgtctcaaaaaaaaaaaaaagacatttctaaacattaatagttactcgatttatacagtctatgaaattataaaactacagtttaatttggaaatgcaattaagaattacttggataggaaatgatacacaaaattcattcatctagtaacaaaattggaaattcaattccgcaagcataaacttaacacctaccgtatacaatggtgtttaaagtctactatgtccaagtctttttagggactcaaagataagcaggaaattgtctctgtcattgtaggaactttgttctttagtcattcattgataaactgaagtaacaacttctactagttagttatactttgggtttgtttttgttttttaataatctgtcttctctctctttctctctctttgaaagggtgccaaagagtttttagtaccatccagggaacctggaaagttttattctctccctcagagtcctcaacagtttaagcaacttctgatggttggcggtttagacaggtgagctttttttatgctagcagttgtcagaaaaggaaaagagaaaaacaaagggaaaaaaggaaacacaaaatcctctctgttctcaagagaaggatagaaaatttatgagagtttggagaatacttataaaatgccctcataatttatagtcatcctttattaaaggtttattgggtggccactatgtacaaagctctatggtagtagatgtgagaggggatttaaaaaaaaaaaaaaaagaataggttctactctcaaggtgttaaggctagtaagccagaataggataatgaataaaaccaactgtgatataaaccaaatgtaaatgtattgagatttgcaagttaggtgttaagagctttaaaattatactttttgaggaaatatagaaaactttgtgagctagatcgttgaggacagagctacatttcagcaggtgaagatgagagttggaatggcatagcacagaaagtctcaagtgtatccatggcacagtaaagatttcactttggccaaagcaaaagagtatatatgaagaagcatgggctaaaaaaaatgttttaataaaaagagctggcatggactgatttgcatgctagtctaaatacatgaatatccagaggtgccagtgtttattttgaaaacaatatatagaatagttaacttctcataggtcagctgtatgtctaattcgattaaagcatcataaaaaataaaagtatttcttacttttttttttttgagacagagtctttgctctgtcacccaagctggagtgcaatggcgcaatctcggctcactgcaacctccgcctccctggttgaagtgattctcctgcccttgcctcccgagtagctgggattacaggcgcacgccacccacgcccagctaattttcgtatttttagtagagacagggtttcaccatgttggccaggctggtcttgaacgcctgacctcatgatctgcccgccttggcctcccaaagtgctgggattataggtatgagccgccatgcccggcccttcttacgttttttaagtatcattgttttatagcttgcattgctttaaacttttggggaaaagtgtgtatgtcttcctagaatcataactcaattaatgctatttctcaattgtagatattttcaggttgcccgatgttatcgagatgaaggttcaagaccagacagacagcctgagtttactcaggtacaaagttatattcacttgtttcttaaaattcaggcttactattttgaaatagtattttcaagaccagtgcagtattaatactttacttctcattacattttatccatcagatatttaattaaactcacctgcagttgagaaactaattattcttttttttttattcatttcatgtgtccttttttaaatttttttctttccttggatagcacaggggccacactgtcattcaaattttagtatgtgtgctgccaaaacgagcatgtgtccttttcataaagaatgtggtcagcaactaaggaatgccagaagttcctaaagtgttctaatgttcatgataaagtccttaaaacaaatctcttatatattatgaataattttatatattgatattttaatctaatatgtggacttaccaaagctgttacgatttgctttctgtatgatagcattttattttactttatattattttatttattttattttttgagacagagtctcgctctgtctcccaggctggagtgcagtggcgcggtctcagctcattgctgcctctgcctctcaggttcaagcaattcagctgcctcagcctccgaagtagttgggactacagatgcgtgccaccatgcccagctgattttttgtgtttttattagagatggggtttgaccatgttggccaggatggtctggatctcctgacctcgtgatccacccgcctcggcctcccaaagtgctaggtttacaggcgtgagccaccacgcctggccaatagcattttaatcatgtgttgaagtgaaaaaattatgagctttggagttggacagacctgggatcagatgtagcttcgctgcttactaattgcacatacgcaaataagtaacttagttctctgagccttcatgaaatggttgtgggaactaagcaagttaatgtatgtaaggccattagcacagtgtctgacataaaagagatgtacaataatatttataccctctgcatgtattatgtgcaaaattctatagtaacttgaaagcagaaaaatatataaatgtgtatatattgtggctaaattagtttccatatggtactttggtttcagattgacatagagatgtcatttgtagaccagactgggatccagagtttaattgagggtttgctccagtattcctggcccaatgacaaagatcctgtggttgttccttttcctactatgacttttgctgaggtgctggccacctatggaactgataaacctgacactcgctttggaatgaaggtacttatcttcacttttctaggactctgtccccaaataatcctgcagtctttttaaaccactttgaaattgacaagtgttacacactgttagatgatatttttgttgttaccttgttaccttcgttgttacagagctagagcaagagagaataatagcatgttagcaatacagtgctttctatctttcatgttccaagatccatttccaagagcgagattcttgctataaagtttttattacttgcaagttattgattatatggatatgaatggtaacttgaaagaaaaaataactattctttccttttcagttttttttttaatccaaggagttactaagtttccttggtccataaaaagctcaaacatatgacaatgtttattcaaattattactatctgtaagtatttaaagcaggggtagaatttatatagaacagtttcattaccaggcctctacttgtttgctcttaaagagcaatatcccttgatccctgtaatgctagtgacatttctatatctcagttctcagtgcacattctttagaaattggtcctgcctggtctgtgaatagtcagtggtcaattcttagaatgaaaaaaatacaatacacaaaaagtcataactaccaacttacagctgccaactcaactacttcttgtttcttcgtttgtaatatggaatagtggttctttttttgtatttttttgagacgtagtctcgccctgttgcccaggctggagtgcagtggtaagatcttggctcactgcaacttcggcctcctgggttcaagcgattctcctgcctcagcctcccgagtagctgggattacaggcgcataccaccacaccggctaatttttgtatttttagtagagatggaattttgccatgttggccaggctgacctcctgacctcaggtgatctgcccacctcagcctcccaaagttctgagataataggcatgagcctctgcgccgagcctggaatcttaatctggttcttaagtcagactgcttgtgttaaattctggctctgccacttactagctatgccatcttgggcaagttccttatttctgtgtcttggtttcatctatgaaatagggataataaagagtgctaacctcatatgaaatgaatgagtatatgtaaaacactggtcatattgcttaacccatggtaaacactctttgaatgtattctataaatgttaaattatcaagatctattctcttctttaaaatcttgtttgtaaaatgttttcagataaaaattacttcatatttagttatctctttttgttacccattttccagattatagatatcagtgatgtgtttagaaacacagagattggatttcttcaagatgcacttagtaagccccatggaactgtgaaagccatatgtatccctgaaggagcagtaagtgaagtacagttctatgtttctctagaatgtatgctttggaagtaactttgtccaatactgtcatatttaaacttcagaaagaacaattctttttaaataaaaatagggatttttgctgggcatggtggctcacacctgtaatcctagcactttgggaggccgaggcgtgtggatcacttgaggtcaggagttcaagaccagcctggctaacatggtgaaaccccatctctactaaaaaatacaaaaaattagtcaggcgtggtggcatgtgcctgtaatcccaactacttgggaggctggggcaggagaatcgcttgaacctgggaggcagaggttgcagtgagctgagatcataccattgcactccagcctgggcaataagagcaaaactgtgtttgaaaaaaaaaaaagtaggtatttttatacagaatctaaagtatttctaaaaccataagtagagaacaataaaattttatgaatgtgagtttacattccagatccggggtgtttttcttttttcttttttttccccccttttaaacaatgctatcagccaggcatagtagctcatacctataatgccaacactgtgggaggtcaaggcaggagaattgcttaagctcaggagttcgagaccagcctggggaacatagacctcatctctacaaaaattacctggcgtggtggctcacacctgtagtcccagctattctggaggttgaggtccaaggatcacttgaggcaaagtgttcaaggctgcagtaagccatgattgtgccacggcattctaacctggataacatagcaagaccgtgtctcaaaaataaatacataaataaatgatgctatgaagtactcctgtacttcattgtggataatatgtgagcataaaataatacgtagtattctgtctgcagcctcagttgtctgtctatctcttagccctgtatcagcaccagcatggccattgcatgttgattctttatcttctgagagttctcatctcagttgcactaataacagggaaataaaaggagatggagctaaaaaagcaaaaaggaaggggaagaagtgggagtagaagagagagagagaatggttgggctgagcaagtgctgactctaaagcaacggtacacgtctcttttctgtaggtagtacatctgctttaaaaaataatttcataagaagtattccagttatattttaaataagattatgattttgaaagtctatactcatttggatacataagcattatattcagaatggagtaagaactcaggaactcagtctcattactttctttttttttttttttttttttttttttttttttagagtgagtcttgctctgtcgcccaggctggagtgcagtggcgcgatcttggcttactgcaacctccgcctcccaggttcgagcgattttcctgccttagcctcctgagtagctgggactacaggcgtatgccaccatgcccagctaagttttttttgtatttttagtagagatggagtttcaccatgttagccaggatggtctcaaactcctgacctcaggtgatccacccgcctcggcctcccaaagtgctgggattacaggcgtaagccaccatgcctggcccctcattactttttatttacttcatatattcagtaaaaagtaatttattgtcatgcggggcacggtagcccacgcctgtaatcccagcactttgggaggccaaggcgggtggattacttgcggtcaggagtttgagaccagcctggccaacatggcgaaaccctgtctctactaaaaatttaaaaattagctgggcattgtggtgggtgcctgtaatctcagctacctgggagactgaggcaggagaatcacttgagcccagtaggcagaggttgcagtgagcatgagatcataccactgcactccagcctgagcaacagagcaacactccatcttaaaaaaaaaaaaaaaaaaagtaatttattgtccatactctagtccagacataagaaatatgttcaggtaagctcagtatgatattttgcctatcattatttacaccatttcaagtttgttctttctcaagtagatataagaactgcaggagtgtggatcatgttttcatctttttataccttccgtacctagttaaatgccacattaatatagttaatgatatgtggcatatgggagaaataagatggttaaagtatgatttcacaaatcacatggtttattgccatacaaagaaaattttttcttaggttcacaatgcttaaaagagagagagaataagggccaagcgtggtggctcatgcctgtaatcctagcactttgggaggctgaggcgggcggatcacgaggtcaggagttcaagaccagcctggccaatatggtgaaaccacgtctgtactaaaaatgtaaaaaattagccaggtgtggttgtgcgcacctgtagtcccagctactcgggaggctgaggcagaagaatcgcttgaaccccggaggcggaggttgccgtgatctgagattgcctcactgcactccagcctgggcaacagagtgagactccctctcaaaaaaaaagaaagaataacatgaacaatcctcacagggaaaacactcagtagctgaggtgcattaatcacatagcgagtgagttccaaaattattaaagtccacttgctctattaggatggaagtagtcctctggggaaggtaaagtctaattaaagtttgaggtgtactcttatatgagctgttcttgggagaagctggtttgaccaccacagtacacactgtatctaaggtccctcgatgctagagggcagtgccagtgtgggtgggtgaggcttcagagattagctccaagactaacagggtatcacccatctcttggctgtaggagaagcagttgacagagtatagccagtcacagcatgtgctatcaaagtgtctgtcgaactcttaagtttatatgtatttttgaagtccagtagttgaggtcagtaattcacacatgggagttatgataaggtttgaggtaacattcctggggggaagagggagttcactcgaagttctcacataggggatctgataaaacatcatgctctcgaaaggagggggaatacaccccaaaacatcaaaccatgttaagtgtttggatcatttcaaagttatgtaacatgataaccataatgtctcacttgaaagacactgagataatttcaaaagaaagattttaagaaacctcaaataatcaaattctgaatccttttattgatctgaaagttttctttcacaattcagttgtagacattcatgttgaacatttatcctgcatattagatatagagggtctcctgtggaatacattcacagctatttccaataagagctgcatgcccagcgtggtggctcacacctgtaatcccagcactttgggaggccgaggctggccaatcacatgaggtcaggagttcaagaccagcctggccaatatggtgaaaccccatccctactaaaaatacaaaaattagccaggtgtggtggtgggcacctgtaatcccagctacttgggaggctgaagcaggagaatcacttgaacctgggaggtggaggttttagtgagctgagatcacgccactgtactccagcctgggtgacagagctagactccatcgcaaaaaaaaaaaaaaaaaaaaaaaaaaaaaaaaaaaaaaatctgcataactggaaaaaataagcactgtaacaagctttaaaaatgtgtcatttggtagcagaaattggatttttttttttttttttttttttttttttttttgagacagaatctcactttgttacccaggctggagtacagtggcacaatctcggctcactgtagcctctgcctcctggtttcatgtgattctcctgcctcaacctcccgagtagctgggatttcaggcacctgccaccataccagactaatttttgtatttttagtagagacggggtttcaccatgttggtcgggctggttttgaactcccaactttcaagcagtccacccgcctcagcctcccaaagtgctgggattacaggcatgagccaccgcgcccagcccagacattgaatttttattaaatcttactattgtaatagaaagacacaaaatatatttgtcatttgatcgcataaccatgtttatgaagctaagtgtcatactgacaagtttactttgatttttctttcatcagaaatacttaaaaaggaaagacattgaatccattagaaactttgcagctgaccattttaatcaggtaaggagttaattagagcagtttttttccttatacagattcaatatttttaactattattaactaaactatcattatcattagttttgagcatcttgttatttcagatcattcttctgcttttatttactttttattttatttatatatttattttgaagatgtagtcttattctgtcgcccaggctagagtgcagtgttgccataacagctcactgctgccttgatttcttaggctcaagcaatgctcctgcctctttctctcaagtagctaggactacaggctcaggccaccatgctgcccagttgcacccctagtcccagctacttaggaggctgaggtgggagaatcacctgagcctgggggtcgaggctacagtgagctgagatcgcaccaccgcactccagcctaggcatcagagcaagattccatctcgaaaaaaaattgggctgggcacggtggctcacacctgtaatcccagcactttaggaggccaaggcaggcggatcacttgaggtcaggagtttgagaccaatctggccaatatggcgaaaccccatctctactaaaaataaaaaaaattggccgggcgcgttggctcacgcctgtaatcccagcactttgggagggcaagacaggcggatcacgaagtcaggagattgagaccatcctggctaacatggtgaaaccccgtctctactaaaaatacaaaaaaattagctgggcgtggtggcgcgggcctgtagtcccagctactctggaggctgaggcaggagaatggcgtgaacgcaggaggcggagcttgcagtgagccgagattgtgccactgcactccagcctggacgacagagcaagactctgtctcaaaaaaaaaaaaaaatgcaaaaatgtgccgggtgtgttggtgctcacttgtaatcccagctactttgagaggctgatgcaggagaatcgcttgaacacaggaggtggaggttgcagtgagctgagatcacgccactgcactactgcctgggccacagagcaagactcagtctctaaataaataaatattagctgggcatagtggcacatgtctgtagtcccagctgcttgggagactgaggcaggagaatcacaagcccaggagttcaaggctgcagtgagctatgattatgccactgcattcttgcctgggtgacagagtgagaccctgtctctaaaaaaaataaaggatccagccaggcacggaagcgcatacctgtaatcccagcactttgggagcccaaggtgggagtatcactggagcccagaagtttgagaccagcctgggcaacatagtgagacctcgtctctacaaaaaacagaaaaaaaattagctgggcatggtggcacacacctgtcatcccaactacttgagaggctgaggtgggaggatcacttgagcccaggagatcgaggctgcagtgagctgtgttcaccccaccgcactccagcctgggtgacacagtgagaccctgtctcaaaaaaaaaggaaagaatcttaggtatgataacaggaataaaatgaaaccatataggagtaattaaattatgctataatcaaaggaattaatattaaagttcctatttaaaatcttgttttctaagacttaatagaggaaaaatgctcttataatgatatgtaagaaaaggaggctataggactatatttatactgattataaccatgtaaaaacactatatttgtatattgaaaatggactacctacctctactaccactatttcccaagcctcatacctcaagcacaacgaacaataagtagatttttatataagaaaaaaagatcaggttagtggttcccaaaatgggttgagacaaaatcagaaaagtcagggcaatataacaagcttttcataaagttaaacaaatttaaagaactatcctttttttctctgtcggcggtggggatggcggggggatgaaatatgtcttttctttataaaattaaaaattggcaaccctttatcttccaattttgtttatttttattttattagtatataaaatctgcatctaagaaccataggaccaggaaataagcctgaaggttaactttggcagctttcagttgatgggactattattacattttcttctttcattcttctctctcttctcctgttttctttttctttcctaatttcctgaacttttatataagaaatgggtattactactactattttttatgagtgttttaacttgatttggcttctaattgctttcagaagatcttatgtgtttttagcaacatatggcatacacatggttcaaaaaataaagaaccattaatgatgaaatgcaataatcatttgctctagcctgccccatccatcctagtattctgccagagtatctctgtttttggaaatatctctacatactttttttttctttttacttaattcatttaaaccttgttaacttcctgtcatgagagatgaggctcacatatacagacctcacctagttactctgtaccttctgcacagctgtctttctgaacctttttttttttttttttttttttttgagacgggagtctcactctgtcgcccaggctggagtgcagtggtgccatctcggctcactgcaagctccgcctcccaggttcacgccgttcttctgcctcagcctcctgactagctgggactacaggcgcccgcgaccacgcccggctaatttttttgtatttttactagagatggggtttcgctgtgttagccaggatggtctccatctcctgacctcgtgatccgcccacctcggcctcccaaagtggtgggattacaggcgtgagccaccgtgcccggcccttttcttcattcttttctgagttgaagccacccatcctggatcccaggttttcctctttcttttttgtgttggagtatgtaatcaagtaacttcctaagaaagcatgtgagagatcaacttactgagttcttacaaaatgtctttatgtttaaaacctcacacttgatcaataataatttggcttagtacaaaattttgaattgacagccatatcatcttagaagagtgctgtccaataaaactttctgtaatgatggaaacgttttatgtctgcattgttcggtgtagttgttgctagccaatgtcgctagtgaacacttgaaataggatagtacaactaaagggctgaactttttactttatttcattttaattaatttaaatgtaaatagcaacagtgcattgctagacagcacagctttagaacatttaaggcattgctttactttcttctcccatctgttgttactgatgagaagtctgatgctttgatgcttgtgtgaatttattccattatagcagagctggttttttctcattggaagctttttgccttctgattctttatgttctgaaatttcagagtttgtttgccttttgatcatttttcatttaatgtgttacacacttgaagagccctttcaatacgaaggtttatgtctttttatgtgtagaaaattattttattatctaatgattttgacctcatcattttttctagtctctctttggaatttctactagttgtatgtcaaaccaatttaacctcttttcttttgcatgtcatttttcaccattttctttgtcttgttctattttcctggggatttcttcaactcttctgttgaatttttttttatttcccagtagcttttttcactgcatcttattctggttttattcataaaatatatttttgagtacctttgaggattcaagttctcttttggtccataacttatgttttctctggggctaattttttgggtttatcttggtcttttttttttttttaatgctgcagagtttcttcaatgtacagtgattgttggttatctgtacatattcaagaaaggggcattttaaaagctggttggggccgggtgcagtgactcacgcctgtaatcccagcactttgggaggccaaggcgggcagatcgcttgaagtcaggagtttgagaccagcctggccaacatagtgaaaccccgtctctactaaaaatacaaaaattagccaggcatgttgacacacatctgtaatcccagcgactagggaggctgaggcaggagaattgcttgaacccgagaggcagactgcagtgagccaagatcaggccactgcactccagcatgggtgacagagcgagactccatctcaaaaaaaaaaaaaaaaagctggttggaagctcaagagagaggctttgtaaatggttaggtttagtttagcatgagcagcaaggctgctctaggcactcaaggcttaagagtcctgagcctctccagaattctgcagggtaaaatcagttccttcttgtgctgaggctgcctccattgttctttatgccagaccttcctgcaccttgcttctttaatcattcctactcagttcacttgcagtctgccaaaaattcgcagaaatctctcatctgctgatattattctccattcttcatcccctccccctttttttcattatgttgaaatgacttttttttttttttttttttgagtctcactctgtcacccaggctggagtgcaatggcccagtctcagctcactgcatcctctaccttccaggctcaaatgattctcatgcctcagcctcctgagtagctaggattacaggtgcacagaactggcacagctactttttgtatttttagtagagatggggtttcaccatgttggccaagctggtgttgaactcctgaggtgatccacccacctcagcctcccaaagtgctgggattacaggtataagccaccgtgccaagcctactttataaaattcccttagtatcattttgaatgggttcatggagataatagagacaatctcttttaaattctcttctattgggaaccggaaatctttgtattataagaagataaattaatcccactgttcaaaaaaaaaaaaaaacgtgaataagtctttttcttttacacaggaaatcttacctgtattccttaacgccaatagaaactggaattctccagttgctaatttcataatggagtcacaaagactggaattaatcagactaatggagacccaagaggaagatgtggtcctactaactgctggagagcacaataaagcagtaagaaaaattacttccaagcatcagtgctgttgatgctgaacaatgccttactctcctatgtatatagtatacgtttgaactgtagactgttaattcataaaatggagctgctctgcataaatcttttttttttttttttaagagacggagttttgctctgttgcccaggttggagtgcagtggtgcaatcttggctcactgcaacctccgcctcccgggttctagagattctcctgcctcagcctcctgagtagctgggattacaggcgcacgctgccatacccgactaatttttgtattttagtagagacagggtttcaccatgttgcccagactggtctcaaactcctcagcttaggcagtccacccgccgcagcctcctgaagtgctaggattacaggcgtgagccaccgtgcccagcctgcataaatcttatagtgctttataatgcactgtataaaaacttaagggttggccgggcatggtggctaacgcctgtaatcccagcactttgggaggccgaggtgggtggatcgcctgaggtcaggagtttgagaccagcctgttcaacgtggtgaaacatcatctctactaaaaatacaaaaattagctgggtgtggtggcgggctaatttttgtattttgtagtcccagttcctcgggaggctgaggcaggagaatcacttcaacctgggagggggaggttgcagtgagccgagattgtgccactgcactccagcctggctgacagagccagactccgtctcaaaaaaaaaaaaaaaagggttttttttcatagctaccagcctccattggcattacttaaatagattagacctgaccctaattagaaaagccacttagattaaggggtagtgaaattagtcatataaccatgaaaaaatattttcagtgtcaagatttcacaaatgaagaaaattaggagtctcaaatttttatacatcatgcattcgtaaattgtggagggacggatcagaccactggcgagctggagggctggcagacacccctggaccaacttggtcaaagtgggaccctttttcctcaagaacagcagctgtaggtgatgagtgccatcatgcactggctgagtcatgattcttcaggggatatggaagactgaattagctttagggatctttgtaaaatatagaaaagtatagtacaaagtcaaatatgaatattaaaaatgtactgtaaagatcaagcatgatataaatttattttttcactttagtatatagttttttcaaaatgatagtgtgtctaactagtacttcatcaagttctttcttctaatctatattttcatttgtcattgtttcttccacagaaaaagtttcagagttcagcttcaaagctaaatgtaatcccccgtctccccttcccctacaatagtaaaatgaagaaagctatttatttccaaattttattatgaatgcatttcttaaaaaagaacatgggattttgttcctaactaatttggctattaaaccttctcttggtatgaactaaacatgctggtgtttcattctcaggaagttataggtctgattcctacaaggccttccttgaaagagagctagaaaccagactttcgaggaataacattaacattctgaaaatgtcacaatgaaggtccgttatgtagacgtaaatgtaagatagaatgggctgcaaaataataccctatcatgtctctaggcatatgtcactgttctaaccagctgtcctttctcagggaagtcctgcataccataggtagcacttattaagcacttagtatttgccaagcccgttctaagcactttgtatacattaactcatttaatcctcatgccaaccctatgaaagaagttctgatactgttgctattttaaaaataagaaaagtgagtcacagagcttaaaattttgctcacagtcacacagctaggaagtggaggagccggatttctaacccatgaagttgggttccaaaattcacactcttatttttttttattttttatttttttttgagatggtctcactctgttgcccaggctggagtacagtggtgtgatctcagctcactgcaacctctgcctcctcccgggttcaagcgattttcctgcctcagcctcccgagtagctaggattacaagtgcatgccaccacgcccggctaatttttgtatttttagtagtgacggggtttcaccatgttggtcaggctgatctagaacccctgaccttgtgatccgcccgcctcggcctcccaaagtgctgggattacaggtgtgagccactgcacccctccgcactcttaaatggacctctaatctgcattacctatagtgatagccagccttcactgaacattaacagtgtgccaggcacttaccaaatcctcaccacaacccttcaagagaagtgaggaaataatcagaacgactaccactcacatactttgtcaggtcctgcaccttatgtatattatcttaagcttcacagcagtcttttggagttgatatttttatcccaattttacaatgaaaaagggtacagagaagttcgtaattagccacactgagattcagacccaggtctatgaagtgctgatccctgtgttcttaatcaccgagttatcagtactcacccagttggttgagtgtgatgattgttctcaaccttgttgcaattagacttatcctcagatctttgtgtcctgagaagcaaagggcatcctatctgttaattggctaatcctttcctagagaatggcctggcttcggaatccaggctgtgtcatttcctgcctgctctgtcaagaagttaactcaatgtttacgtcttctgtttgcagtgctctttgttaggaaaattacgactggaatgtgctgaccttctagaaacaagaggagtggtgctccgtgaccccactctgttctctttcctttgggtggtagatttcccactcttcctgcccaaggaggaaaatcccagagagctggaatcggcccaccacccatttactgctccccaccccagtgacatacatctcctgtacactgagcccaaaaaggtaccgtatctatacttccaaatcaaaaggaaatgtgtatataaaggcaaagaacttcagacttcaaggtctgatgaaagataggacccagttctggaagccccagaagaaattgtggagtttgagttagtagtaatacattgtctttaaaaatctacagggtcttcaacccgtagaacagaaaaccagacattttctctaacataaagtatctgtgaatcttctaggcccgtagccaacactatgacttggttttaaatggcaatgaaataggaggtggttcaattcgaattcacaatgcagagctgcagcgttatatcctggcaaccttactaaaggtaacaaacatcatctgctatcctgggcttatttttttaccagaatatttttcagttttgtgttgttgttgttgtttgcttgtttgttttgtttttgagacattctgtcacccaggcaggtgtctactggtgcattcatagctcactgcaatctcagtctcctgtgcttaagccatcctcccacctcagcctcccaagtagctgtgactacaggcacatgccaccatgcccggcaaatttttttatttttttgaagagataagatttccctatgttgctcacactgctctcaaactcctgccctcaagcactcctcctgcctcggcctcccaaagtgctgggattataggcatgaaccactgcatctgacttaaatcagcctattttattaaacatttgttatgattggaggattcacaagatacaaaatagcatcagctatctctctacctttaatgtaggacttggaaaagtaaataataatattaaaagtaaataataatattaaatgcttaaatagtatctggcacatagcactattaaacagtactatttaaatactaattaatagtgcatattaaatacccttattataatagtgcagataaatatccttattctgcccactctaaagatgagatttactgaggcaacttacttaacttgccaaagtgacagtacaaaagtaagcagagtcaggatttgaatccaggtgaggtggctcttaagcccatgctcctaaccactaccctgcttaaaaaaaccatgcagcttgaaaaaataaaaatcaaatcaaatgaaaaccatgcagtctgaagtgactaaaaatgttgataatgttagagaaagagagagaagtttgaaaagattttatatcacttattagatactactttagctatatttaaggcagggatatattttagtgatagtggagtaatcaggattttttaaaagtaaaagaagagtctgtacaggtgcagacctaagaatttgaagtttgttggtgatgctgtagaaggcttgggtaggtttcagaaaggaaaaggtctgagagagtctggtcctaaaagatcgttttgtgggattaactgacaagtgtgaggtaggatggaaggagaactcagaccatgagatgactcctttagctttaagccttcagagtccttaaagtttaagggcattgtgaaatctgttaacttttttttttttttttgagacagagtcttgctctgtcgcccaggctggagtgcagtggctcaatcttggctcactgcaacctccgccgcctgggttcaagcaattcttctgcctcagcctcctgagtagctgggattacacgtgcgcactaacacacccggctattttgtatttttagtagagacagagtttcaccatgttggccgggctggtctcgaactcctgacctcaagagatccacccgccttggcctcccaaagtcctgggattacaggcgtgagccaccgcacccagccgaaatctgttaacttttctcctgccaattcaaagcctccaatcacccattgggttttgtgtgtttgtttgtttgtttgattttaaaaagatggagtctcactctgtcacccaggctagagtgcaatggcatgatcataacttagggcagcctcaaactcctgggatcaagcgatcctcctgcccagcccagcttccagtcagcagttttcagcctttttcattcctctcattgtcaaacttttcaagagtcactaagaatacattacttttttctttttctcgctttgtcacccagactggagtgcagtggcgtgatcttggttcactgcaacctccgcctcccaggttgaagtgattctcctgccttagcctcccgagtggctgggaccacaggcacacaccatcacgcccagcatttttttttttttttgtatttttagtagatacagcattttgccatgttggccaggctagtcttgaacccccaatctcaggtgatctgcctgcatcggcctcccaaagtgctgggattacaggtgtgagccaccacacctggcctagaatacattacttctgttgcttccctaaatagtggttctcagccctgctgcaccttacaatcaaatcacctggaaagcattaaaaaaaacactggtgccttggctacacatcagaccaactgaataaaagagttctaagcataaggctttggcctctgtttgtttgaagcttcccacttgatcctgatttgtagcctggttggagaaccatttccaaacacactttcaacatttctacatgtactgccccacaaaagttactcacaagatcactaaatccagtggcctgttcttggcccttaagttctccttcctcccggcagcatttgacaatgttgcccacttagtaatgctctcttcccttggtctctgtgacaggagagtttcctgctttttatccccacctcctcatttggtctcactctgtttgcattgtgaatacagtaaaagctgcatttactgaacaccaggcatttttgtacatgttataatcatctatgacttgtctttttcccttactaacctgcaaatcacttaaggtaattttttctttacacttttccaataaacttttattattggttaagtcagttttagctgttttaaaactcaactttgtttcccctttatcatctaagcctagatggtggcacttagtggaccttcaaaatatatttaaactgaattatcttttgaatttcaggaggatgtgaaaatgctctcccatctgctccaggctttagattatggggcaccccctcatggaggaattgccttaggtaaacaacttttccttttataagataaactgaattccattgcactgtctcaaattcaggttctcagtttgtgttggtagaggtggaaggatgagtccaagagttccatgagaatgtaagtttctgttgaaatttcagtaatatattttttaaatatatcttaacagttataaagatataacttaactgataatttgcatttgaaagatcattaatagcttaaaactgcagatcttaagtcaatattgttcaaatccccatggcctcacatacgcactcattggagtctggaaagcactgctccataatgttcagcttgtatgaaaacaggaagatgccagtgtccttctgattgccatggttactcactttgcttgttttgtcaaagcaaggaagagtaagaaattctaggaagctcacctagattgtaggccccaacaacagggacttccttctgtgtttatggagttccctgccaagcaccaaatacactgttgaatctgttttagggcctttagtaagcctttactaggaacactaatcgctgtgacaatccaagtagcatgtgaacattagtcctgaatacttttccagaatgagatagaaaagaacctctcaaacaaacaaaagttctctaaaaaggtagggaacgatggttgg

SEQ ID NO: 40 - DNA, 32742 bp, Homo sapiens
  source 1..32742: mol_type = other DNA
attggtggaggcggcaagtttaaacagagtcaaaacgccatacttgtttggctcctctttttaatttgcgagtttattgggcttgttttctgttttctagggagtaggttagtggaaaagaaaaagggccgaattcactcccacgacctctacagccgcccctgaggggaagcggtcagcgtaagtcccggatccccgctccggagccgcctcgtgggagcggggcaaggagatccaggaggggtctcgaatctgccatggcgaaccggcgagtggggcgaggctgctgggaagtgagcccgaccgagcggaggccgcccgcggggctgcggggccccgcggccgaggaggaggcgtcttccccgccggtcctgtctctcagccacttctgcaggtctcctttcctttgcttcggggacgttctcctgggagcctcacggacgctgtctctggccctagacaaccctaacgaggaggtggcagaagtgaagatctcccacttcccggccgcggacctgggcttcagtgtgtcgcagcgctgtttcgtgttgcaggtaggtctcaggaggagcgtgctccaggccggtgttctgcttctccgctatctttcctgccaccctcctcaggaaggttgacgattggagaagaaatcagaaaagacccttagagaataaagtcagttccctttcactcaataactgtgggtggctcttggaaaagaaatcagaaaagacccttagagagtgaagtcagttccttttcaataactgtgggtgggcccttgacgcatacacatgtgtgtgagtatatatatatgtgtcaatattatatatatatatatatatatattctctaattgaaggctaggatagacgctaacttgggcggggacaacacataaacgcgcgcgcacttagcatctttaggagcaagttatatagacttctctgttaaattgacaagcacttttactagacttaaggcgttgtgaaatagccttgccgttctaaattaatagacaatgcacttttttaacacttttttaagattgacaggagtaccttggttggttaaagcagctttttttaaaatttctatcagccatcttaatatgcattttagtttccatatgtacccttagagtcgaggtaactggtttttttttccggtgaaatagtgagctttgttctggctaaatgcctacaataaaaaccaaaaaaacctattcagagttgttttcaatatatacgtgtagtatgtatgcacactttagtattttagtcctttttttctttgctgttaagtgtaattttaatgctgcatcaaatttaattttataaatgttgtttcaagaactcctgtagctttcttttactgcattgcatttgcaagagtaatgctccaatccccttcaccaaagactggagaatttatgtttttattttgactgctgtgacctttccattgagtagaatcaccaaaagtatgaaaaccgttagccgaggaggtctgaactagtaggctaataaccacttcattaggcagaaaaaagagattctaatctgaggtcccttaacttgtgtgtcaccaatggttcatctatctacacttcagaacctacccaccccgcccctctgtttcatgaatcactgcctgctttcctttctttggaaagacagatttcttttctatccacataatacttcaacttactcttttttgttataatgtggaactaaattttgtggtatttttagaataaactattttatagagtaaaaatgcaccattcttattttttaaaattagttgtttatgatgttatattatttctcctttaaaacagaaacttgtctgtttctcctgaaaaacaaaatttgttttgtcatgtcagcgtttaaatttggcagattctgtctacctgccagggtgtggggtgtagatgttaaagtccaaactctggcattagactgcctgggttctaataggtacctgcgtgactttggcagacttttctggatgttagttacttcatctgtaaaatgtgcataatcataatacctgcttcctagggatgttagcattaaatgagttttacaggatacctgcacttatgcctggaacaataatacctgtttaagaaatctcagtatgatgatgtggaccttagaggaatttgtaaggaagaaggaatttagctgatcatctttacatttctttttaaataaagtcttcataatgcagggtccttgtgtttgaagtagaagtactctacacatctaaaaattagaaatgtacaattaaatcttttgaaaccactcaaacaaaatgatttagagactatctgttctattgctttaatacagttaagattttattatttattttgttgtgaaccctgttatttttagtgactttttttcttataattaagcagatagggtaggagaaatatatttgatttattaaatgtttagtatatagagtgttggttaacaattattaagccctactatattgtaagttgtatataaggtgttttggttattatgtaattactattgtaattatataatgtattgttttgattatagcctaaagagaaaattgttatttctgttaactggacaccactcaaagaaggccgagtaagagagattatgacatttcttgtaaatgatgttctgaaacaccaagctatattactaggaaatgcagaagagcagaaaaagaaaaaggtaatgttttaaccattctgtgatttactctaagaaattgtttaataataaataaaacttattttgataacaggcttgaagtaatattgcttatttaatattcaatagctacaaacttaattggtatattttccttatttttgcagaggagtctttgggataccattaaaaagaagaaaatttcagcctctacaagtcacaacagaagggtttcaaatattcagaatgttaataaaacatttagtgtttcccaaaaagttgacagagttaggagcccactacaagcttgtgaaaacttggctatgaatgaaggcggtcccccaacagaaaacaattctttaatacttgaagaaaataaaatacccatatcacctattagccctgctttcaatgaatgccatggtgcaacttgcttgccactctctgtacgtcgatctactacctactcatctcttcatgcatcagaaaatagggaactattaaatgtacacagtgccaacgtttcaaaagtttcttttaatgagaaagctgtaactgaaacttcctttaattccgtaaatgttaatggccaaagaggagagaatagtaaacttagtcttacccccaactgttcttcaactttgaacattacacaaagccaaatacattttctaagtccagattcttttgtaaataatagtcatggagctaataatgaactagaattagtaacatgtctttcatcagatatgtttatgaaagataattcacagcctgtgcatttggaatcaacaattgcacatgaaatttatcagaaaattttaagtccagattctttcataaaagataattatggactaaatcaggatctagaatcagagtcagttaatcctattttatcccctaatcaatttttaaaagataacatggcatatatgtgtacatctcagcaaacatgtaaagtaccattatcaaatgaaaattctcaagtcccacagtctcctgaagattggagaaaaagtgaagtttcgccacgtattcctgaatgtcagggttcaaaatctcccaaagctatttttgaagaactagtagaaatgaagtcaaattactacagttttataaaacaaaataatcctaaattttctgcagttcaggatatttctagtcatagccacaataaacaacctaagagacgtccaatactttctgccactgttactaaaaggaaggccacctgtaccagagaaaaccaaactgagattaataaaccaaaagcaaaaagatgtctcaacagtgcagtgggtgaacatgaaaaagtaataaataatcaaaaggaaaaagaagattttcattcttatcttccaattatagatccaatattaagtaaatctaagagttataaaaacgaggtaacaccctcttcgacaacagcttcagttgctcggaaaagaaagagcgatggaagcatggaagatgcaaatgtgagagttgcaattacagaacatacagaagtgcgagaaatcaaaagaatccatttttctccctcagagcctaaaacatcagctgttaagaaaacaaaaaatgtgacaacacccatctcaaaacgtattagcaacagagagaaattaaacctgaagaagaaaactggtgagtcttgtttataaaatctactgaagtatacctgtaaaggggatacttccttttggtttagtaaatctgctattgataagcttgtattatagtttttacttatttgctgggtacatttccttagcaaatgtgaatacagcttatgtgacatcttgtatctgtctgatttttctttgcttttgctgtttcttgtagatatgttctgatcagataacaaattctttgatagtaaggaacatacctattttaatctcctacaagatgtacaataaaagatgaattgaatgaatggataagtgaataaatgaacaaataaaccactgaaaggtcgacactcacacctactgtttgtttgaggcagccagctggttgagcctctagtctagaatcagaattgtacatattgggtatctgatttatgagcctatgtgagaggcaagtaagtcaccaagagtggctctttctacctcttgacaaatctaagggaacagagaaggcaatttttctagatatatttatttgactgataaggtacctactatgtgatgtgcatttttctaggcactgtgtacacagggaggaaagggataattcctgtcctcaagttgcgttcagtcctgtgattatgctatgcttaggaaattaaggaagcacagaagcagagggtttgtgtgtaaattgcaaggaagtatgagatggttccaagaaagacttcctaaagaagaaaatggttgcagggagagggactaatttctgtaaggtttaagaatgaggaatttctccttagaaatttactttttaaatgttcaattcatagaaccttacaatctaataagtattatgttgcaatttagtcatgttccttattttcacaattgatataggtttgagattactttaaaacaagggtaagcaaactgttcctctactggtccagatagtaaacattttaggctttgcaggccatatagatttgcactgcaattactcaactctgctgcacttgtgggaaaacagccatagacaatgtgcaaatcaaggagtatggctgtgtttcagtaaaattttattcataaacaccgaaatttgaattttatgtaagttttgtgttttatgaaatattattattttcattttttttttaactctttacaaatgtaaaagctatatttagctcttggaacatacaaaaacagtagggagggttttgcatggggaatggatgtagtttgctgacccctgctcttattgtctctttgcttatatttagtagcagtatattttgttgtgaaacctgtttttgaaagagtgaactgctattccaataggttatttgctactgcaatttgtattgcattttctttgatagccacctggcattatatcaaccatcttggttacatatttgggaatcagcctgttattctctatcacttttctaataagttggtattaagggttgtttcttccactattaaaataactctcctctgatttgtctccattgactctgttttaatttgtctcaccatatccaccttgggtcattgtaataactgctttgtaattttctgtttctaatcttgaccctgttcattccattgtccatactgttttcttaaatataaatgagggtttttacttccttgattaaaattcttcactagcatagaaggtgcttcaaagtgattaatagtggaggttctgtaactatactgcctttgttcaaatctttgctacttactagcttatgtgaccttagaccatgtggcttaattgctcaaagcctcagtatcctaattatatacattgtggtaataatagtacacttctcataaatttgttctcataactgtgtgagaaaaagattatgatagtgcctggcacaaagtatttaagtattagctgccactattattttgaatattattgaactcctccctacctcttctagcctcttgtatgtcatttcctacgtgtattctttgcttcatccttattgcagttctggcaacaggccacattcctcatgcctaattttaatttcataagttaactcaagtagattcccatctgggaaggctcttctaccatttttaaacttctttttttaccagactgagaactacttcagggctgagaccatatttttcaattctgcatattctcagcacctcgtagagagtctggaatatacagacacaataagttttggttgaatctagactttagcctctgtaaacacaaaataaattgtggtttatggtctgtgacttctggatgttggtttgataaaccactgaattcatagcattagtgcgtggagtacagtggttattaagtgtttgctaaatgaatatgattgtgaagaacccaaactttaactttcaaatcactgacctatttagggaatttgtattttaatgctcttagttttgttttctaatttattttagatttatcaatattcagaactccaatttctaaaacaaacaaaaggacaaaacccattatcgctgtggcacagtccagtttgaccttcataaaaccattaaaaacaggcaagtatttattatacttaaactctctgaaaacatgacatcgaatgaagcattaattgcatttcacatggaaatgaattgatttttgttgttgaataacagcctggaagaattgttaaagtgtgtattaaaatgacaggatattgtgtcaactttctgtttgataaaagaaataaagaccaaatgttcaatagatcagtagggtcactatagtaattattgtatatttcaaaatagctagaagagaataactgatgtttctagcataaagaaaagacagatatttggactgcgggcacccacgaccatgcccggctaatttttttgtatttttagtggagacggggtttcaccgtgttggccggggtggtcgggcaatctcctgacctcgtgatccctcccctcgcctcccagggtgctgggatttcaggcgtgagccaccgcgcccggccaaaaacatgggctgttatcctttgctgtggtagggagtatggatgaagtgaaagttggtaaaaggatggtcagaggccgtcactagccttggggagttttccaagtggaaaatgaaaatcactgtgacttcgttaagctccaagatatgcttctttgtaccaatgtggaaaatctaaaagaaaaacctacactcagcactatgaatgctgtaggtaccaaaaactgcagaaaatgggctttacagatctgggcccagacaaccagccagttagttttcaagaaatctttgaagccaaaagacaagagtgctatgatcaatgtcagagagaagaagagttgaaacagatttatgcagcgagtcaaggagaaagaagctgaaaaagagctgcaggacaagttcaagcatcttaaaatgattcaacaggaggagataaggaagctcgaagaagagaaaaaacaactggaaggagaaataatagattttttataaaatgaaggctgcttctgaggcactgcagactcagctgagcaccaatacaaagaaagacaaacatcgtaagaaataatcgtttctcttaattttctgtttgagagccctatcattcacatcccagcttcctgtgattgtatttgtagcatttaaatctgattgaagttcttattttaaaaattggcttgcttattgtatattttccctaactaaagtgtgaactcctagtggggcgtggtggctcatgcctgtgatcccagcactttgggaggctgaggcaggtggaccatctgaggtcaggagttcaagaccagcctgaccaggatgatgaggccctgtctctgctgggaatacaagagttggctgggcttggtggccggtacctgtggtcccagctgcttgggaggctgggagagtcacttgggccccagaggtggaggttgcagcgagccaggttcttgccattgcactccagcctgggcgacaagggcgggactccatctcaagaaataaaaaggtgtgaactccctgaagacaggtcctgtgtccatcttttcagattctgtatcctggcacttaggatgtagactaacacgaagatgacattcaatcaatatttgccaaaatgaaaaaataaacatgtaacatcatgttaaaggagcagtttaggtggagaaatttctttaccatagtcctgcttgtggatccagtagtgacttttacattttatatctaaatagaagcttgaggctttgttggggactcataggcataaaatattatgttatacaaatctaattaataggcctattttcctttttaaattctaataatttcttgatagtttttattatgataaaagattggattttgattagaactctcatgcttttatgtcagacttaaaactgatattagaataaagaattcaaaagctagagaaaatcagagtacaatgagaagccatgagttgcatttgaatgataatattatgtcttacagatttggggtatacgctaaagttatcaaagttgtaaaaataaggctgggtgcagtggcttacacctgtggtcccagcactttgggaggccaaagtgggcggatcacttgaggtcaggagtttgtgacctgcccggctggcatggtgaaaccccatccctactgataatgcagaagttggctgggcatgatggtgtgcacctgtagtccctgctactcgaaaggctgaggcgggagagtcgcttatacccaggaggcagaggtgcagtgaacagagattgtgccactgcactccagcatgagtgacagagcgctatgagtcactacacctggtatgagccaccatgcccggcctacgatgacttttatacatgttgttaaatcatcttacagattttataatttgggggaagaaaaattttactaaatggtcttttaatggaaactacaagaaccagaatctttgctttgttcacttaagtgtccattcctaggcctagaacaatgtctgacacatagcggcaattattccttgaataaatggacccagcaatagtacattagctatgctatatgcataaattaaaaatgtagattattgactttcaaaaaataattaatgtgacttcttactgcttctgaacatgtttgtgagttatattgctgagggacctttatcttctcattctttcatcttaatccaatgttattaaaattgaaatcaccaatattattccatatctaaaaataatatctaccttataaaaattatcactctgctgcatttgagaatagactttttaggtaataatagtatgatccatagggtttttttagggcacagaaggattcatgctaacagaacattttattttctattttcccagagctataaaacatgatattatatgataactataaggcatatttttactctgttcatattttttctaaaaaaaattagtgtttgtttcccatataacttttaattttataagtaaatatttgtctctttcagctccagttttatgtgaaatagagtttccagatttatgtagcatggagagttttaataagtcagagttactgatttttgccagtcattttctcagttgttaacttcttttatctttagttgattttttttgtagtgacaagttttgtttctattctcatttccttttgtgtatattctatgtatattttgtttttgtttactatgaaaattacatataacatcctagagttataacattctaatttgaatttatttcaacttaacttcaatcacataccaaaattctactgctatatagctctactctttttaggttattgatgtcacagattatatctttattcattgtacaccacctaacatatttataattacattttatgcatttgccttttaaatcatgtagaaaataaaaagcggagttacaaaccaaaattacaataatactgtttttatgcttgtttatatatttacctttaccagagagctttatatattcatatagcttggttatttacttatatagttactgcctagagttcatttatttcaacctgaaggactttaatgcttcttgtatggcaaatttagagataaatggattttttcagctttaaaaaaaatctagaaatgtcttaatttctcccttatttttgaaggacaggttttccagctatcagtttctcaattgacaggtttcttcattattttaaatacataatccactgcctactggccttcaagttttctgctgagaaatcagctgctaatgttatccagatcccttgtctgtgagagttgctcttctctctgagctttcaagattctcacattgtctttttgttttgttttttgggacagagtcctgttctgttgcccaggctggagtgcagtggtgtgatctcagctcactgagacctccatctcttgggtttgggtgattctcccgtctcggcctcccaggtagctggggctacaggcatgtgccaccatgcccagctagtttatttgtgtttttggtagagacggggttttgccatgttgcccaggctggttacaaacccctggcctcaagcaatctgcccaggactaccatttacccagcaatctcattacttggtaaagacccaaaagaaaataaatcattctaccaaaaaggcaaaaaaaaaaaaaaaaaaaaaaagacagatatttaaggtgatggatatcccaagtaccctgacctgatttgtataaattctatgaatatattatcacatgtaccacaaaattgtgtacatctattatgcatcaattataaaaaagatattctatcagactttaatgtagttgattcatggtggtttagtgttaaataaccaggaaatatcgctttacttttccccattttgctctgattacatttcttacccaaaatgctttcagctctttcctgcaagtagtagaaaagcaaatattgttcagtgttttaaagatggtattgctagtaaaaatgacttttgctgtatattgtacaataagttaaaggaaattttgttatgcagtaacctaattgtattcttagatattcccagacacccgatgccatttgctgcaaaaaacatgttttatgatgaacgctggaaggaaaagcaggaacagggcttcacttggtggttaaattttatattaacccctgatgacttcactgtaaaaacaaatatttctgaaggtaaacgttaaattaatgtttaaatttaataatacttttaacagataaagatttttaacatcgtttgtcattctttaattatacatagttattataattaatggcataattccctgttcattagcctaaatgcttgtataggtaagaatttttatttacataaatttatatatgtacattttctttaccgaaagtactgaaatatactttttgttctctattctctctcatcagtcaatgcaatcagtcccgtgtggcctgcccactttgggcatattgtccccactgttcaataccttagtttaagaagtatgttggaaagctataggattatgaggaaactaaacaccaattcatatgaggaatttttaaacatttcagtgtttgttctggaaaagagaaaacttgggaaagggaccaggtagagatgtgcctttcaaacatttgaagtgttttcttgtgaaagagaaggaaacttaacttttgtgcagctcttgcttagaaattatagggatcaatttcagctgaagataaggaaaaattcttatgaatgtttaaattgtcaaatcatcatataggctaacttttaaagtgatgattttcctattctggtgttcagacagacactgatttatttttgtcagagaagcgcgtgtataggattttttttcttttttgctgttggagacaaggtctcactccctcacccagtctggagtgcattggtgtgatcacaggtcactgcagcctccacttcccaggctcaagcaatcttgctccctcaaactcctgagtagttgtgactaccagtgcacgccaccatgcctggctagttttttttttttattattttttatttttgaatagaagagttcttgctatgttgccagagttggtcttgaactcctaggctcgaggaattcacttgccttggcctcccaaaaggctgggattacaggtgtgagcaattgtacctggctggatttttgtattaaaagggtctttgaattagatgctctctaagcagtgatcttagagatcacttaaaaaaaaagaaaaaagttgtttcttttccaaaagggagcaaagccccatttttcgttcttttcttaaaagaaaatgtgttttataaaagattaaattacatttcaaaattcaattggtttttaaaaattatattccttagaaacttgacttttattaatttataaaaaggatgggaacagataaaccagtgaggaagttaattcattagtccggattagagataatcatgtttgaatttgtgatagtagaggcggtgaaaagtggctagacttggaatacattttgcaggtagagctaacaggttgcgatgatagattggcctaaggagtaagcttggagtgggtgaggaatagattatgtttttaccgtctgaaattgcattttattgctggatttaagaatatgtagagatattgtttaaccagaaacattctttcttttgtttttacccagtaaatgctgctactcttcttttgggaatagagaatcaacataaaataagtgttcctagagcacctacaaaagaggaaatgtctctcagagcttatactgctcggtgtaggttaaacagactacgtcgtgcagcatgccgtttgtttacttctgaaaaaatggttaaagctattaaaaagcttgaaattgaaattgaagctaggcggttaattgttcgaaaagatagacacctatggaaagatgtgggtaagaagactgcagaaatcttgacattaattctttaaaaacattcaagagattttgtgtttttttcccccggctttattgacatataattgacaggtaaaactggcatatatttaaggtatacaacatgatgttgatatatgtatatattattaaatgattataacaatcaagctaattaatgtatctactcacatagttaccttcttgtgtgtatgtgtggtgaaaacatttaagaagtactctcagcaaatttcaagtatacaagtcactgttattaactatagtcgtcatggtgtacattcgatctccagaatttattcatcctgcgtaactgagactttatactcctttgacaacatcgccccagtccctctaccccattctctggcaaccaccattctctgtgcttctataaattcaacttgtttagatttcacatataaatgagatcatacagtatttgtttttctatgcttaggctatttcagtttgcataatatcctccagattgatccatgttatcacaagtgacaggattttcatttttaagactgaatagtacttcattatatataaatatatatatatttatcatatatatttatttgtatatatacgtacacacacatacacataccccacattttctttatccacttattcactaatggacacttagattgattccatatcttggatattgtggataatgctgcaatgaacataagaatgcaggtatctcttccagatactgatgtccccaagagattttgtatttcaaaactaggtatacatgctttagctttgctgccaaaaatcccacatacttgaatatgatcatgtatatttaagactataagtgtattttatttaaattaacttatttcatataagcaagtatttttttcccactgatatactctccttgaagttttatttcttgtctctatttgattatcaatttgaacttatttgcctttgacatgcatttcaggagaacgtcagaaagtcctgaattggctgttgtcctacaatcctttgtggcttcgaattggtctagaggtaagcatatatttcaggtttctaaaataatatttttttattatatactttttgtagaatagactcattttattacaatgtagttttacttataaaagttgaaagtcattaggttagcttgattcatcttttagtataaaatgtaatacccgttaataaatgcttattaggtaaatagactatgccattatatattattacaccatattgtaatacaacattttactgtacagtctctttaaacataatttggtgttgcacgtaatgacaactatagtaaactcatttttgcaaatttacaaatgccaaaacgaggctgctgtgaatacattttctaatttaaatttcttaaaacccagtgaagtatgtattattatttccacttcactaacgaaacagaagcttagatgttaaagtgacttgccctggccaggtgtggtggctcatgctgtaatccgagcactttgggagactgaggtgagctgatcgtgaggtcaggagatggagaccatcctggctaacatggtgaaaccctatctctactaaaaatacaaaaaaatcagccaggcgtgatggtgggcgcgtgtagtcccagctacttgggaggctgaggcaggagaatgaggggaacccgggaggtggagcttgcagttagccgagatcgcacgactgcactccagcctgggcctgggtgacagagcgagactccttctcaaaaaaaaaaaaagtgacttgccctatgccaattatttggtcaggagttgaacctataccaatctgattaaatagtactcataaaaatgtcatcaggatttgcattctttacatagttcttggctctgtaatacctagaatgttgaaactgactgaattagaaagatactattagtaattggctgtttaaagacatttttattaaaagtatcttttgtgcgtctgtattctttagttttttgctagtatgctttcacattttttctaggtttcttaccttcttaatgtagggtctcccattactatttcagtttattccaggttttggaatagaagagtctttgggaccgaacaggatctttgtaataatctggcttttatataccaataaattgaggcccagagagaataaataataagcttactgtggttacacagcattgtggtgtcattgctgggatttcttatttcaattccagtgtcctttccctttaaatagttggcaagttacagatcaactagctctgcttcacatatgaaagaattctggaacctcaattgaaatagagccccccatatttgggacatagcttttttgtggcaaaaataaaatcaagaactttgtgtggaaccttgcaatgctttttaaaacctcttggatgtaatttgtatcatctccacccacattccattggccaaagcacattatgtagctaagcacaaactagttaggaatgtattaacctcccacaagtcacagcaaatttatggcaggtggtggggatgtataatctttttacaggtaccttattactacaccctaggattctttaaataaatgtacgtgaggattttaagaaaatttcaaaggccaaaaaaagtaaataaagttaaattcctctattttggtaggtaataattaatacttttccatgctttaatctttatattttgtcaatgtagggttgcagaatttgatattttttaagtttttcctaattgctttaaaaattattaataagcatgctaatgttaaactaattttatatttaaatcattgattataaacagacctgtgctttccaaattatcttggatgatttgcagatgttttctacattgataactatcataaaaatttgaatatttaggtttctgttataacttcacgatgtacttaatgggacagttataaataaatttgaacaacatgcctatatttgatagttctttaacttaaatgaaaaaattaaaatgggaatgttgctcgtcagatgattaagacttatcttagtcctgagctttgtctttttgcattgcaacgtatactatatacaataagatatacataaatcatatatgcatagtttaaagaagttatttagcaaataaccatgtcatttagaaagtagaacattgccagttccttaggttatggtctgccattcctcagtcacttccctttgtttcttagagatagcataattctgactttggctttaatttattttcagacaacttatggagaactcatatctttggaagataacagtgatgtcacagggttggctatgtttattctgaatcgcctactttggaatcctgatatagcagctgagtatagacaccccactgttcctcacctgtatagagatggtaagtatctctgcctctcctacattctctccacattatacatgaatggcttattgtcattcttcctgtttctgtttacattttcctttctcaaagaaaccaatctaaataagtctctgcttctagtactctcccttcctccaccctcattccccgttaattcctccatcactatttataattctatctgttgtctctacccatcctctccccccagtaggttgtaagtcctatgggggtcatgtttgttgtaatttggtactgtatatctaacacctacgatggtgcctgcatgtagtaggtgttcattaaatatttgttgagtaagaccaactaaatctcttgatgcctctgtgcctgtttcctcatctatgaattgaaaatattaagtggtgcatacttgtcccatagagatattgggaggattaaatggatttatacacataaagcactaaaaaaggcacatagtgttttatttgtgcttgctaccctacactttttgttttactaacaccttattattattattatcatattttaagatgaaacctacctttcatagattaacttgctgtgcttttttgtactttatttaaggtcatgaagaagctttgtccaagtttacattgaaaaagttattgttgttggtctgttttcttgattatgctaaaatttccagactcattgatcatgatccttgtctcttctgtaaagatgccgaattcaaggtatgcttttcattgtatgctttatattttatatttcccatttacgacttttgcttgctttcatggtatgttttctctttagaaaaaaaattagttttccaaagaataatactcagaggagtaaaataggaatgcctgtctggtgagtcccatcagtaattctaaccatccctcgtttttattggtttacctttcatcagcacattatcattactcttaattttgacttgaaaatggattaaactatgcttctgaagatttaatttttgagaaaatttcttccctaattttgatgtagtatataatcaagttaatgctagtttttatagtgtattattatgagcaacttttagaaagatcttaagttggaaatatgtatgaagtttgcattattaatgtataatatgaaactttttatattattttatttttatatgtacagaatgatttggaggatttgtttttattataagcaaaattataatattggaatataatatctggaacttatttctttataggctagtaaagaaatccttttggctttttcacgagatttcctaagtggtgaaggtgacctttcccgtcaccttggcttattgggattacctgttaaccatgttcagacaccatttgatgaatttgattttgccgttacaaatcttgccgtagacttgcaatgtggagtgcgccttgtgtacgtataagaaatagaattattttgcttaatggaatagactaacattttctggaaaacactttttttgtaattattcaatcttgctctttcaagtagtacaataaatttagtactgaaaaaaattgaggtttttttttttttttcagggaagtggtacatcaatgttatgtccagaaaccttgtctcctatccacaccttttttcctgatggcatgtgactgggactcatggataataattactgatgtctcagaataggagttgggaagaccattaaactaattaaaatatcaaacattgaaataacacttttttttttttttgagacggagtcttgctctgttgcccagtctggagggcactggcaaggtctcggctcactgcaagcctacctcctgggttcacgccattctcctgcctcagcctccggagtagctgggactgcaggtgcccaccaccacgcccagctaattttttgtatttttagtagagacggggtttcaccgtgttagccaggatggtctcgatcttctgacctcgtgatccgcctgcctcggcctcccaaagttctgggattacaggcatgagccaccgtgcctggccaaaatgacactttttattgacagtggtttcatgaattttatatcatttgagaccatttttagtagtattaaccttgttttacatatgaggaaaataagatgaagtggtagaatagattgcccaagttttccacagtggaattgagacataaactcatgaaatctgacttcaaattacacaatatttcctcaataacaaactggaatgctcaaaattggctttggtatgtatgatggatagccagttttgcttagaaggaatggcctttagcattttgccatgattggcctcttcagggtatctgggttggagatactcattttatttctagggaactctccaaaatatatattatatccttatcaaggaagcacttttggggtcaaggcaagagatttctttaaagcaatgaaagtttttttctctgtgtatttaggaagttgctatgcctcaaaacagctagttaaatgttgacgtatggggagcacagatttaatggtctttataaaatatctctgctacagtaaaacttaacaaactctttagctgaccctggtacatttttgtcagattttaaattgcttgtattgtagctaaaattaattgcaggcagtcttcatgttaaaattcatgttgtctaaaactcaactgaataggaaagaagctatttggatatactttttaatttctttgtttcgactagagataactttagagtataaactagaaaaccttatatccatgtttcatggagaccaattgaaagaactgtgaatatttagagaaatagaacagaagagaaaactctggggcataaatgttttaagatatttgaagaactgtcttataataaaaggtgattaaattgtttattgccaagcaaaataagtatgcatgaacaatgaaaatttcaggaagatgaatgtgggtttggtttaaaaacttgccaatattcagacgtgtctttatcaaacaaccagttcacagtgttggaaggttcaagcagaggtcagaggaccgcttggccagaatggaggaattctttgacatttatgaggacaagatcctagatttttatgaatctccggtttttgaaaaacagtttacatgtcccttgccttcttttaggctaaatttccatgaacattcttttctttctgatcagtattctcacaagttaatagtctttttactgcagctttgtctcactttagcagttccatatgagctaagatcattttgcttaaaatatttcacatttttttagttggttaatttgtttatttaataaattcaagctaccacatcaatattctggccaataggaattgtttttatactttttccactttctaggaggaacaaggattggtttaatgttcagtgctatttttccacaaagaaagtccccctcccttttttttttttttttttttttttttttgagacagagtctcactctgtcacccaggctggcgtgcagtggcacgatctcggctcactgcagcctctgcctctgtgttctagcgattctcctgcctcagctccatgagtagctgggactataggtgtgcaccaccatgcctatttaatttttgtattttcagtggagacggggtttcaccatgttggtcaggctggtcttgaactcctgacctcaggtgatccacccacctcagcctcccaaaatgttgggattacaggcgtgagccaccgcggctggccagaaagcccatttttatgcttttacaggagttactgaggatttagcactgttggatgttgatgttatttagtcggttaggaattctaagtagttaagagatcaatcttgtataaccaaatttctgttttgataagtgtcagcaaaatgactgttttataaatctttgaagtcacttgagaatgctttgggatggttactctattaatgccatgggtgatgggttggtctacaattgactggatggttggcctagaattatcttaagtctctttctagcctttagagactatggttgtataagtaattctaccagctttttgttgaagacagaaatcagttggggtttgctttttctgtctttgttaggtagatactcaaatattcgtgcgtgtatatatacatatatttttatatatatataggaattactgtggaaacaagtaaaactggattttagttctcatcttagttttgccattaccagctctatgaccataggcaattcatttaagctctatgggccttagtttctttatctaacaataattaattgtgcgctttaccatgataactaaaataagaaaataaagcacttgcttgatgtgtacaatatagtacatcccaataaatgtgcttcctctctgctctacatccctctcctctcttttctgtcctttcctttctttctcttttctgtagagccctattattttgttgatgtgtgcatttatatatgtatatcttattttcttatcatctgttcacacacttcaatcccaaacttaaaataagaactctacttgccgactatggagcaacagagttttgagatagttttttgaagtctttctgatcataaagccctgtaactgttgggatttatgtgggaaataactatatttcagtgaagggttttttcatatacgtttttatgataatttcatctgaacattttattactgccaggcgaaccatggaacttctcacacagaactgggacctctcaaagaaactcaggattccggcaataagtcgtcttcaaaagatgcacaatgttgacattgttcttcaagttcttaaatcacgaggaattgaattaagtgatgagcatggtaaaaactgagtagaggtaaaacttattctcctcactgaatattgatatgtgcgtacattatgctaatggacaaccttttcttttataggaaatacaattctatctaaggatattgtggataggcacagagaaaaaactctcaggttgctttggaaaatagcgtttgcttttcaggtattatacatttggtacatcttgtattttttatcaattttgattactgatttataaaaacaatttgaatctaataaagaataacaacaacaaccatcatttaataaggtttattttgccccagtaactgtgataaatgctatatatatatatgtatatatatgtgtatatatatatatatttcaatctaatcttcaccacacctgcaaagtaggtgttatgtctacctctcagatgaggaaactgaaactacagtttacatcattgataaatcccatgggccccaaatcccatgttcttaaccactaaacattttatcacttcagtgtagatggtgtttgcctttggggaaaaaaaaagcgactgttttgtactaaaatatccatttcaggcactttattttctttgatttttttaacttcctggtttaaaacatctacagtttctctaaatagaagacagttactttgatttctgtgggttaaaaataatctatggaaaatatgaaggtatttatctttttttgtgtttgttttaggtggatatttcccttaacttagatcaattaaaggaagaaattgcctttctaaaacacacaaagagtataaagaaaacaatatctctactatcatgccattctgatgatcttattaataagaaaaaaggcaaaagggatagtggttcctttgaacaatatagtgaaaacataaagttattgatggattgggtaaatgctgtttgtgccttctataataaaaaggtaagtttctttgttttttgttttaacccaatatattttaataaattttgatgaaagtcacttaaacttaatgcctgaagtcttttcttgaatttcttagttcatctgtgtaagcaaactttccctcaaatgagtgaatgttttatcatacactgtatttcatctaatctatcaccaattgtgtgatacatgataattttatcaagaaaagaaaaatatgccctagatggaagtcttagtagaagatgcttgcatagaactgggacataaaagaatcatatcattattataaagttcaattcaaataagcccacattcagaaagggacaactaagaacttaccactagttagaggaagaagaacaaaatttgagtctctctataatcatttgttaggttaacactgtatttctgtatgaagtatacttcttagtgtaaatatatgaaaaaaatttcccctaaacacgtggataaactatctggtaataaatataagacagaaacagtgatacacagtatgtatagctaaatatggtaagccttgcaatatgattataccaagaagttattagtacaaaaattgttaaacatatggataatcttctatgttttaactaaatactagagagccaaagttgatcatcggtattaattaattccatatttggaatttgcatactagctaaaatttctttttaatgccaaaattagtagttgcagtattttgtggtcatttattgacgtgtgtgaatgcctgggccctcatagccagctgatgtcaaacaaggtggtgctctttttgtttcagctcttatactgtaaacaagcgtccttttcaggacctatttagcattgtacttttttgcatttttgtgctttttgttggtgagttccctgtttaaaatggctttcaagtgtagtaatgaagccctgtctagtgttcttaggagaagactgtgatgtgccgtatacagaaaatatatgcgttaactaattttaatgcaggcgtgaattataatgctgttggccatgagttagtgttattgaatcagaaacacctgtgaacaaggttatgtgcggattggttgataaacatattataaccagaggctcacaggacactaaccttatatttctcctctatgcaatggttcaatattcacaaataacgagaatccactctcattgcttgttgttgtagtttcctaagactaccatagcaaattacagcaaactaggtggcttaaagtagaaatttattctctcacagttccagaggttagaagtctgaaatcaaggtgttggatgtgccatgctctcacataaagttctaggggatactcttttatttttttcttttaaattttagagtttaccagtcaaacttgccattacttgccttgtagatttgtcactccagtctctgcctttattattcacaggtattctgcaaaccattatgtctatactactttctaaatgcggttaattgtttttctggcattttcaatcaggtggagaattttacagtgtctttctcagacggccgtgtgttatgttacctgatccaccattaccatccttgctatgtgccatttgacgctatatgtcagcgtactactcaaactgtggaatgtacgcaaactggttcagtggtattaaattcatcatctgaatctgatgacagttctctggatatgtctcttaaagcatttgatcatggttagtcccttttggttacttttccaattttttgccatgtctgatttgaagctacggctaatttctcctttcctcctgcataatagaaaatacttcagagctatacaaagagctcctagaaaatgaaaagaaaaattttcacttggttaggtctgcagttagagaccttggtggaatacctgctatgattaatcattcagatatgtcaaatacaattccagatgaaaaggtaagtaaaagaagagtttctaattattaattcaataataaagtctcagaagatgatagtaagtactgtattctctgttgatattctgtttttatcttttgtgggttttttttaggtggttattacctatttgtcatttctttgtgcaaggcttttggatcttcgtaaagaaataagagctgctcgactcatacaaacaacatggagaaaatataaactaaaaacagatctcaaacgccatcaggtactcctagaatatgaaactactatagtgtgaattatactttagaaggtatttgttgattgatttttgatatgattttacattttatggatgtatggcattattaagataaatttagtaattgtgtatatgtattttgggttggggaggtatgagtatttctccctaattgctaatattcccttcatttgatgtatcttccagtctgtccaccccttcacctagtctgttccaggggaagaggaataacttaatctgctttttaaatttgtgaggaatacatagctcacattgactcagctcttcctttcctcctgttggaatctaacctgcctctggagagcaggagctttccattaattttttattctgtgctgtatgaggcttgacctcaactagtgctgcctgggcctgagcatcaagtgtctgattttgtgatttaactagtaagcttagtttgtttgccatgaagctgtcttctactttatcctttattagttttaaaagtggtattttggtttctgctattaatttttcaaaatgttaggatctgggcatgagaatagagatgttatttattgtttccctttgtgaccccaatagtacaaaaatttcattaatgtaaaaaatttttttcttaagttctgagaaaattgttatttttaataatctaagaaacggcctccttgatcaagttgaacaaactatttcactctttttgtcaccctattccatctactaactaatattgtgtttatttatttggaaaaccaaaaaaaataaaataaaacaagcatccatgcctggtaaaatttatcataaatatttcagaaatacattccacccaatattccttctcaactttgaaatataatgcatctgtgataaagttcttggtagctgtgtaaaacagataaattttgacaactttcaaacacaatatgtgttttttcatttcacaccagacttggaaataagactaattgaaataattttcttttcccctactcaaactcttcatagtaaagtttgggaaataggcagggtcttaacactcacaaatggtcttttctgctactgtatatgctgtgtgccctatagtgcccctaaactcaggatctgcctccctgcctacatatcacttggagaataacttcctgaaaactttcctaaagcaattcccctagaagcttccaatacttctaggggaattggaagagttcagaaaagtgtctcccctggccagtcctcaagctatttgattcacccattgtatattgcattaaatgagagttttagaattacaagagatagatatatatgtattctgcttttattttctgctcaagatagccttgtattaatcagattttttttttcttttggagacaaggtctcactctgtcacccaggcaggagtgcaatagcacgatcttggctcacttcagattttgtctcttgggttcaagccattcttgtgcctcagcctcctgagtagttgggattataggtgcatgccaccacacccagctaatttttgtattttttgtagagacaggatttcaccccattgcctaggctggtcttaaactcctgcctcaagtgatctgcctgactctgtctcccacagtgctgggattatatgcatgagccactgcacccagccttagtctgatattaactgtagaattttctcagctttttgctagtgagatcccttttcttgatttatttccttaatgcaaatagaagtttccatttttttgaaggattaagagaagtttttttgaagaattaagagaagtttctatacttatggttaaacttcttggacccagtcagaccactgtttctctcctttttcttggtgaccatactccctcttttatacaattacctcacatccaattatatctttccgttttctatttagaacattaagcagcaggctccctatgttattgcaagctactaaacatattaacttgagatagctatttttcaggttttatattttgcttttatgttataattcatataaatctattaatggagtggctcaaacttttattatgacaaagaaactttgtcaagtagctaaaattacctgatgaactattgaagcatcccctggtacattacagctctcagttcttcctgtcaacaaatagccataaactccaaagcaaaagaagtcctagaatttggccctatatatatgaggcaagataaaagaaataagctggtacctggctgactcaacaacagtctgattaaaaagggtcaatgaccatacatggaaacttttatcatcagtatatgtaattttcaaatacttgctaaatttggtaatatatttgcctcttctaatttatttactttccatctttaaattctctaatggcatgtaaagttgtattttagttctatagagatgatctaaaaactgagataagttacaatttactttagcctattttgtccatgaatgccctgacccttacaacttttgtctcaaatgcaatatacttctgaactgcaacatttgaaaattttatttgtgtatttatttatttactgtaacagggttgtgcttttaacttgagcctctacagtcctaaagcccataggtttcacaagggcattgataatggtgttagatgacttaatcaacttgttatatacataattcccctagcccgattttggaattgtctactctttctccccagaggaatgatccaatatatagcacttaccattccttagtatttatgtttcaatctattggtcaccttttttatatgtaaaaataacagtttgattatttccatagttgtttcccctattgcacaattttcatgcacagataccaaccactgattgttattaattaataattggaattatagctaatctctgtgtagagcctacccttgcatggtggacggtcccagacagcaacacaaaaagctgccagacatccctgccataagttattccttcccaccagaggaaatagttcattttctagtctccaattccagtgaagtaaattgagaaatctagtattggacagtatagcaaagttactttaaagccaaactgcctgattcgtatcctggctatattaccaataaactaacaagctaattgacctcattgcctcagttttctagtgatcgtaagagtagtatttgctcatttgttcttatggtggtggttgtgagatttaaatggattgttcatgaagtgttcagaatggtgctggacatagaatatgttattatttacagcaatttattatcagaagtaacaagtagagatatggggggtattgccttctaacataactagggagctgggtcctctttgaccacaaatgttgggcatctcagataccacttctcatagcccaaactatactttttcctcttcagcttgtatgacctaaggccacaatgtattctgtgctaaaggaggaggtattttgtttctcccctttagtgttttgctttgttcaaattgttacaattctctaacacattctttttttcatacaatcctcccctttcctaaaagttaatcatgaattcagtggacctgaatctgagaaacataccacattacacttcaaatggcctttatcttgattactgaggatctgtgatagatcaaacatgtctaatctttatcttagactatttcttaggaatctttgtttcatcatacaaaatatctgcaagcccacctatcagcgctttcgacatgcctggaattatcagtattccaaagatgaacacaagaagtgtaggggtgttttatttccagtatcaatttgattggtgtttaacatatggttatcttacaaagaataatttaaggtcttaagtgagtgtttaatttacatttgctgacttttttattttaggagagagagaaagctgcaagaattattcaattggctgtaatcaattttctagcaaaacaaagattgagaaaaagagttaatgcagcactcgtcattcagaaatattggcgaagagtcttagcacagagaaaattattaatgttaaaaaaggaaaagctggaaaaagttcaaaataaagcagcatcacttattcaggtatagtatcctggactaatttttgaatttaaaaaattttaatgacttttttaagtaagaaggcaaaatgtgatgaagttttcaatgattatattttaggattctttatctaatacttaatttaacaaatatttactacctgaaaagctcgttatggtgttcagcagaaggctgaaacataattgaaatgcatttgctctgaaaaagcaaacattctaattctgtacctgttgctctcttctttgttgcgtcttctacgctgtgggacatgctggcctactgaaccattctactttgtagatccacataaccaaccaggttcttttttatctttgctttgagtcctggaaacttctctttgggacaactgtacacatttttctctctactccacttagttggcatgtaaaggaaatagtacttataattagtctatagaatacctatattatttttctttttaggaaaaaatatataatactgacttaatatagtctttacatctatgtaaattagtttttttatattaaattatattttaatgacatgagagatgtgcattatttaaatttactatttataaatgccattgaagcttcaccccatcaatatatctgatttatgaatttgaaagtttttgtgtctggctaccattattgataaatgagggttctctgacttaaataattgtcttttttaacctttttttaacatgtaaaatattacacatagaaaattacccaaaataaaaatatagagcctaatgatttttcacaaaataaatgccaatgtaaaaccacctaggccaagaaatagaatattgccagtgtagcaaaaggcatttttcaattaactctcccatcccagctcaagctaaccattatgctaatcatgccattttcctaagtgttttctttaaacacaataatttagtttcgcttactttttgaattgttacaggtgagttcaaaccatatgaattctttgatttgatattattacattttttgagatttatcagcgttgagtatagccgtggtttaatttttttatttcgtattctgcactatacttaatctgttctatttttgatgaacatttggctttccagttttgagctattatgattaaaggtattatgaacatgtcttttggtgtgaaatgtattcagtctcttcaattgtactaggagtacaattgttcttaaggcatataggcatacctcgttttattgctctttgcattattgtgctttgcagctattgagtgttttacgaactgaaggtttgtggcaaccctgtgttaagcaagtctgcaacactttttccaacaggatatgctcactttgtgtttgtgtcatagtttggtaattctcaaaatatttcaaactttttcattagtactacatctattatggtaatgtgagattaatgatctttgataggaagtgtgagtggtctagatagaagatgaaaccagccacaacattcccataagccaaagcctaatccagagaaggcccaaactctattcagttctacgaaggttgacagaagtaaggaagctgcaaaaattttgaagctagcagagaatgattcatgagatttaaggaaataagctgttcccataacataaaagtgcaagataaagcagcaagtgctgatgtagaagctgcagtaagttatccagaagatctagctaagatcattaataaaagtggctacactaaacaaaagttttcaatctagacaaaacagacttctattaaaagaagatgccatctaggacttttgcatctagaaaggggaaatcaatttctagcttcaaagattcaaaggagagttttactctcttattaggggctaatgcaactggtgactttaagttgaagccagtgcttatttatccttctgaaaatcctaggacccttaagaattatgctaaatatactctgactgtacactataaatggaacaacaaagtctggataacagcacatttgtttatagcagggtttactgaatattctaagtccgttgttgagacctactacacagaaaagaagattccttttaaaatattactgttaattgacagtactcctggtcatggacatggacaaggagaggaatgttgttttcatgcctgctaacacaacatccattctgtagtccatggataaaaattaatttgagttttaagttgtattatttaagaaacacatttttgtaaggctatggatgcaatatatagtgattcctttgatgggtctgggtaaagtaaattgaaaaccttctggaaaggattcatcattttaggtgccatcaaaaacattcatgattcgtaggaggaggtcaaaatatcaacattaacaggagtttggaacaagttgattccaaccaacttttatggatgacttcgatgggttaaagatttcgttggaggaagtaactgcagatgtggtagaaatatcaagagaactagaattagaagtggtgcctgaaggtgtgccgaattgcagcaatctcatgatataagctgaacagatgaggaggtgcttcttacagataagcaaacaaagtagtttcttgaaatgggatctactcctggtagccaagtgtggtagctcattcctataatctcaacaacttgggaggctgaggtgggaggatggcttgaggctaggagttcgagatcagcctgggcaacaaagtgagaccccatttaaaaataaaaataagctgggcatgatggctcatgcctgtaatcccaagcgctttgggaggctgaggcaggcagatcacatgaggtcaggagtttgagaccagtctggccaacgtggagaaacactgtctccactaaaaatacagaaattagctaggcatgggggtgcatgcctgtaatcccagctacttgggaggctgaggcaggcaaatcccttgaacctgggaggtggaggttgcagtgagccgagatcacgtcattgcacttcagccttggtgacagagcgagactccgtctcaaaaataaaaaaaataaataaaataactagccaagtgtggtggcacacatccatagtcccagctactcaggaagctgaggtgggaggatcccttgagcctggaaattcaaggcagcagtgagccattattgcaccactgcactccagcctggatgacacagtgagaccctaactgtttaaaaaaaaatgtactttttgtaaaatttaaaacagtatataaatttagttgacaaagcagcagcgggctttgagaggattgaccccaattttaaaagaatctctactttgggtaaaacgctaataagtggcattgtatgctatggagcaatcttttctgaataaggagtcaatcaatgcagtaaaacttcattgttgtcttatttttaaaaaattgccaaagccacctacaataactaccattctgatcagtcagcagccaccaacattaaggtaagaccctccactagcaaaaagattacaatttgctgaaggctcacatggttcttagcattttttagcaatttagtatttttaaatttaggtatgtaccttgtagtgttttagacacaatggttttgcacacttaatagactgcagtatagtgtaaagataacttcggtatgtattgggaaaccaaaaaaattgtgtgactcactttattgtaatatttgctttattgtggtggtctggaactgaacctacaatatcttcgagatatgcctgtatatatttcaactatccaagagttttttaaagtacttgtaaagatttaaaacccaccaggtgtttatgaccattcacatgactccatgtc

SEQ ID NO: 41 - DNA, 10309 bp, Homo sapiens
  source 1..10309: mol_type = other DNA
agtcagaggtcgcgcaggcgctggtaccccgttggtccgcgcgttgctgcgttgtgaggggtgtcagctcaggtaagcaaggagagtattccggttccccatctgaaagaaggtacactggagaaggtcactgagtcttggggggaaggagtcctgtttccgcctaatatgggagttttcgtctcctctgaaaggagagccttagaaaagccactgttgagcggagggtctcaccgtatctttgcatgaaatcgtggtcagagctcccccgagccgtcctcctgccacagcagggagaaatttgccactagaagggacataacagcccagtacttgctgcgggttgtgcactggctgttctttttttttttttttttttttttttttttgagacggagtctcgctctgtcgcccaggctggagtgcagtggcgggatctcggctcactgcaagctccgcctcccgggttcacgccattctcctgcctcagcctcccaagtagctgggactacaggcgcccgccactacgcccggctaattttttgtattttcagtagagacggggtttcaccgttttagccgggatggtctcgatctcctgacctcgtgatccgcccgcctcggcctcccaaagtgctgggattacaggcgtgagccaccgcgcccggcctgttcttttgtcttcttcaacatctggtccaaacccacgtttcgttcattaattatccaaatttactgcagacttgatacaaaaaaagactagggacctgctgtcaaggaattcctcctaaggagaagaaactgtcaggtgaattagaacacgatgcaaatagatgtagacgcacagagggtgacgttggaaaggtgtgagtggtggggaggcattactggagaaggagttgtgatttaatatgtaacctttaatatctaaaggtgtgaaagaataaaacttttatgggcagcaggaatagtgcagtgtggctgaagcatgagtttgtggagagtagatactggatataaggcgggatataagggttagattgtaaagaacctttataccctgaaaaataggcagttattcatggcatttgagccaaagaatggcatatgccaattttggttaacatagtgaggctggagtctggttgcttccttgggagaaattgtcttgcttgttctaatccttttaccatggctttccactgttctcattttatataaaggtatactttatacttgtgatacttttactgtacagtcaaccctctgtatccatgagggatggttccaggacatcctgcagatcccaaatccaccaaaggtcaagtcccagatataaaatggtgtagtatttgcatataacctatgcatgtcctcccatatactttatatttaagagatggggatatcctttgttgcacaggctggttctttttttcttttttttttttttaagaaagggtctcgctctgccacccaggctggagtgcagtggcgcgatcttggctcactgcaacctccgccttcctggttgaagccattctcctgcctcagccttccaagtagctgggattacaggcgtgcaccaccacactttgctaatttttgtatttttaatagagatggggtttcctcatgttggccaggctggtctcaaactcctgacctcaaatgacccacccaccttggcctaccaaagtgctgggattacaggtgtgagccaccatgcctggccagttttgttttgttttgtttttgagacagagtcttgctctgtcgcccaggctggagtacagtggcgcgatctcagcccactgtaacctccaccttctgagttcaagcctttctcctgcctcagcctcctgagtagctgggattacaggcctccacccccgcagctggctaatttttatatttttagtagagaggggatttccccatgttggccaggctggtctggaactcccgatctcaagtgatccacctgcctcagcctcccaaagtgctgggattacaggcgtgagccactgtgccaggcctcacaagctggtcttgaacctctgcatgtcctcccatatactttatttattttagagatggggttctcctttgttgcacaggctggtcttgaacccctggcctcaagtgatccttctgccttgatctcccaaagtgctgcaattacaggtgtgagccaccgtgcccagccccacccccatatactttgaattatttcttgattacttataatacctaataaaatgctaagtaaattgttgttacactgtattgtttagggaataatgacaagaaaaaatgtatagtacgtgtttggacgaagatgtttttttttttttttttttttttgagacagagtcctaatctatcgcccaggctggggtgcagtggcgtgatcttgaagtacaaaacacttccagcaaaaaatctttatttttaagaaaaaagtattttttctcattttctatttttgtcataaatttttattctttccagtggaaccaaaacttgaacttccttttggttgatacatgcccagcaagactgatcaaagaaaagatggcacagataaacagtgttagaaatgaaaatggaaacataaccatagataactacagattaaaaagataaaacattatacaaataaattgaaaattgcatgtaatagataaatttgtggaaaaatttaacttgccaaaattgatgcaagaataaataacttgaataagattcaagtaaattggatttgtaggttaaaattttctcaaaatgaaaacaccaggatcagatggagttattccagacaacctagtaacaaattatctcttggactaatccacaatatgttaaaaaaaaaaaaaaaaaaaaaaaggaggcaatactccctaactcattttaggaggctagcataaccttgatagctaataaagacaaaattagaaaggacagttataggccagtcttactgattagcatagtgttaaaagctttccctttaaggttagaaatctgacaagaatgccaactatcagcttttctttctttcttttttcttttttttttttggctgttgtttagacagggtctcactctgcctcccaggctggagtgcagtggcacaatcatggctcactacagcctcagtctccccgggctcaggtcatcctcccaccttagcctcctgagtagctgggattacaggctcatgccagcatgcttggcccagctatcagctttttcatttaacattgtactagaagttactgtcagaatagaaggcaggaaaagaattagaagggaagaaataaacttgattatatgtggatgacatgattggcagtgtggaattaccattcccagactgctccccaccccaaatagattcatcattagcattactaaggctttggttaaaaatcagttagattggctgggcgaggtggctcatgcctgtaatcccagcactttgagaggctgagatgggtggattacctgaggtccgtggttcgagaccagcctcactaacatggagaaaccctgtctttactaaaaaaatacaatattacctgggcctaatggtgcatgcctgtaacgccagctactcaggaggctgagacaggagaatcgcttgaacccaggaggtggagattgcggtgagccaagagcacaccattgcactccagcctgggcaacaagagcaaaactccatctcaaaaaaataaaaaaaaatcaattagatttacatgtatcagtaagaaatgggtagaaaatagtgtttttgaaaagatagcaaaaatataaatacttagaaatcagtctaacaaaaattagataaagctttatagagaaaattataaaacctttggaaagcatcaaaaaaaagactgaaacagcgtgttcatggatcttaggattcaatatcataaagatatcagttatctccaaattgatctatagcatcaataaaattacaatccaaaccacagaaccctgttatgatttggattataatttcagatatacatatttatgtatatatttatggacttatgaactgattctcaaatttatatggaagagcaaagagtcaagaataatcaagtcattcctgaagaaaaagaccaggtggataagctatagtaaaacatcacattgtacaccttaaatatatacaatttgtatttgccagttatacctcagtaaagctgggaaaaaatttaaataataaaaaatgaataagctatagtaattcaaacagtggagtattgtctcagaaataatccacttgaccagtggaacaaattcaagagtcccaaaacaaatccacacatatagaaatttaatttatagtaatatcagcagggaaaggatggactgattcagtaaatgatgttagaacaattgactattcatatggggaaaaactttaaattggacccccacctcactcactatacataaaattcaattcctagtggattcaatatttaaatttgaatagcaaaattataaaatatttgaaggctatgtaggaatatctctacatttgggggtaaggaaaaatttaatacacaaagtataaatgtaaagaaagagattttaagattgattatgttaagagtatgtgtttattgaaagacaccatgtacaacatggaaagataagcacaaactgggggatatttgtaacacattaaaggattggtgttggctgggcgcggtggctcacgcctgtaatcctagcactttgggaggctgaggtgggtggatcacgaggtcaggagttcaagaccagcctggccaagatggtgaaaccccatctctactaaaaatacaaaaagtagccgggcgtggtggcgggcgtctgtaatgccagctgctcgggaggctgaggcagagaattgcttgaacccggaaggctgaggttgcagtgagccgagatcgcaccactgcactccagcctgggcaacagaccgagactccgtctaaaaaacaaaagggattagtgtcctttgcttggttagtaaagagagaactagagttgagaagagtgttgggtgaatatgtgtgtaggtgttggttttaggtgagagagactttgagcatatttgaacattgagggtaagaaagatggaataattgatggaatggtatccctgaagattgggagaaggtggaatccatagcacatggagagaaactcggacatttaacatttgtttgtacctgagaatgttgactatctctaccattcttgctctcacaaagcatatgtagacttcctcacaacagcaaatatttgtcaaatcccttactatgacaggcatgctaaggctacaatagtaagcaaaatcagacccaggcctggcctcatgagtttataatttatcagtggaaacacccattatttaaaacctttagtgtttttattttttgtagaactttttgcatttttagttctttattttaaaaatatatttgcttgtatagataaacgttcacaagaagggagtggaaaaactcagattcccttgtcagaatagagattaataagaggaatcttggactggcgtggtggcacacacctgtacttccagctacataggcggctgagatgggaggatcacttaagcccagcaggtggagattgcagtgagctgagattgtgccactgcactccagcctgggtgacagagcaagaccctgcctctaaaaaaaaaaaaaaaaaaaaaaaaaaaagctgggtgcattggctcacgcctgtaatcccagcactttgggaggccaaggcaggcggatcacctgaggtcaggcatttgagaccagcctggccaacatggcgaaaccctgtctctactaaaaatactaaaatgagctgggcatggtggtgcacgcctgtaatcccagctactctggaggctgaggcatgagaattgctcaaacccagaaggtggaaattgcagtgagctgagatggtgtcactgccctccagtctgggtgacagagtgaaactgtgtctcaaaacaaaaaagaggactctgtcccccaccctcactacattgaagctgtttgctgaaaacttcatagtcattattgctgatgattttatggtcacctcttttctcctccagtgcatcccaggcagctcttagtgtggagcagtgaactgtgtgtggttccttctacttggggatcatgcagagagcttcacgtctgaagagagagctgcacatgttagccacagagccacccccaggcatcacatgttggcaagataaagaccaaatggatgacctgcgagctcgtaggtatcaaatcatgtatatgatgaaagtcatgaccctattgaagattgtgctgaaataaaacattttgtgtattcttctaaagtaaggagcagttataaggtcagagtgccctaccatctttctacccaaatttgtttacatttataaaaggtttgcttgacatttcttgcttctttgactttttattataccttatgctgatttatagccaagatttaaagcagtgaagcagtgtttagatcaaagataaccatctcaaatatctgtgaggccagatgggaaacatacatgattagaatactgcggtccaaacaaaacaaatctataggttgtatttggtcttgtggccagcattttgcaacttctgctttagattttctatatgtcctttgtttgacaccattaactttttgagtacattagcattgtggtgtgttgcatgaggacttgttaaagtcctggcagagaattattgtcctaggcctagtttctctattaggaccatagacctcattagctccatatggtagtaattcaaatgatctgattcccttttaactttttctttcttttttcttttaagaaatattaggtggagccaacacaccttatgagaaaggtgtttttaagctagaagttatcattcctgagaggttagtatgaatcagcttctcaacctacatggtgaagtgcatttataaattgggagacagagcaatgtagtagatagagcataaaggactaggttttaatcctggccttatcatgacttaaggtgacctcgaccaagttattttctctctctggagttcagtttccttctccagaacaatgggcgagatcacatcaaagaccccctcactttctaaattgtgataaaatatacataacataaagttgaccatttttaagtgtacagttcagtggtattaaatacattcacattgttatgcaaccatcaccaacatttatctccagaacttttcatcctcctacactgaaacttcatagccattaaactctaactccccatttctccccgctctcagcccctggcaaccactattgtgctttcttaacattaagctccccccggctttttcttttaacatttattttaggttccggggtacatgtgcaagtttgttatataggtaaactcatgatatcacggggatttgttgtacagattattttgtcacccaggtactaagcctagtatccagtagttttgcccttctctgtcctcccaccctccaccctcaggtaggccccagtgtctgtcgttcccctctttgtgtccatatgttctcatcatttagctcccacttataaatgagagcatgtggtatttggctttctgttcctgcaaagaccatgatctcgttctttttatggttaaggccccttttaattcaagtctcctttaaggctctcatcaggtgagttacagttgtagttttgtacagaacggggaagggaagaaatgactatctgacagttgaaacatagacatctaatcactaggtcagatcctggccaaacttgttaaagtcttgggagaacagcttaataatcatgtggtgcatcagttctaaaaatagactgggaactttgcaaggtcggtgtctcactaaagatacataataaccaaatgcaacgtatgaattgtaattgggtcctgttttgaaaaacccagcaataaaaaaaaaaaactggggagaacaactgaaatctgaacagtaaatgatattagggaattagttcttaaatttttcaaaggggtaatagtattgcatttatatgggagaatgttcttattcttagaagatatgctggagtatttagaggtaaagtggcttgaatccaggtggtagatatatggatgttttcaatactgttatttcaaactgatttattttaaattttcatagtgaaaatttaggaagagagaaagtttgcctcccaaaggcagtctccctgacatttctataataccaaaattattgtgaccaagaaactatttaaatgtatttagaagcaaaattatgtaatgaaaattatctgttgtcttattctttcataggtacccatttgaacctcctcagatccgatttctcactccaatttatcatccaaacattgattctgctggaaggatttgtctggatgttctcaaattgccaccaaaagtgagttgtgggtaaatggttgactctacagcattctgttttcttcatctattaaacttgaattagaggatcacattctaatataaaagcaactgttcatctgtttgtatatagggtgcttggagaccatccctcaacatcgcaactgtgttgacctctattcagctgctcatgtcagaacccaaccctgatgacccgctcatggctgacatagtaaatatccccattttcctctgcaacacatatcctaccttgtctataccgctaactctccctgtgtgaggatagctgcagcagctctaaccactgcaaatcatgtttttctccattaactcttttctttgatttcatctcagtcctcagaatttaaatataataagccagccttcctcaagaatgccagacagtggacagagaagcatgcaagacagaaacaaaaggtataatgtttgctactattgtcagttaattaagtatatatagtataaagtatatatgtataaataatgtttttttttttttttttttttttttttttttttgagacggagtctcgctctgtcgcccaggctggagtgcagtggcgggatctcggctcactgcaagctccgcctcccgggttcacgccattctcctgcctcagcctcccaagtagctgggactacaggcgcccgccactacgcccggctaattttttgtatttttagtagagacggggtttcaccgttttagccgggatggtctcgatctcctgacctcgtgatccgcccgcctcggcctcccaaagtgctgggattacaggcgtgagccaccgcgcccggcctaaataatgttttttagatttgccaaatttgtactgaactctagaatgactagttaatctttttctcctattgcaaccttctaaataatcattcagcaaaatagcctaatagctcaactaacagtagatgtttcataacagttgtcacctattgggcaacactagacggcaggcagcatctggttaattttttttatattgcaggtagcagggatagtggagtggtgtctcagattctttttttctaagttgtccttttaacactgagaagaatctatatttgcagggactagttgcagagatgggggaaacttttcttaggggaccattcatggaagaaagttaaaggaaaaacttcaggttgatagaatttcctcatttagcaaaattcaaattacaggaacatggaaagtagcacatcatagttcttgctgagttatgccatctttcagattgagttaaatagcagtggtgttacttgtaaaaagaaataaaaattaaaacaaaaaaattgaggaagatgtctttgagagaatatcgtatgcataatactgtatttaaatcttgcaacaaagaagtacatggaaataatattacagagcttcatttttctccatcctggcatttgtgtgaaccttactgtgtttcaccctgtctcctctttaggctgatgaggaagagatgcttgataatctaccagaggctggtgactccagagtacacaactcaacacagaaaaggaaggccagtcagctagtaggcatagaaaagaaatttcatcctgatgtttaggggacttgtcctggttcatcttagttaatgtgttctttgccaaggtgatctaagttgcctaccttgaatttttttttaaatatatttgatgacataatttttgtgtagtttatttatcttgtacatatgtattttgaaatcttttaaacctgaaaaataaatagtcatttaatgttg

SEQ ID NO: 42 - DNA, 15596 bp, Homo sapiens
  source 1..15596: mol_type = other DNA
ccaagctaacctccccaccccaataggatctggtggaagaaaagtcaggcaaacacaagcacgcacacaccactgggagatcagatcttctagctggctctctgctgccacagctccgccgaagggagggggtggaagaggaggactaaactcagagctgagaggagaggcaggtgtgtgcaggtaagcccagttgggagatgggcaggagactgggaagaatctttcatccagtaagtttcctccagctctgtccatttattgatctagtctctatcctctcactccttccttcctcccacctctttctcctctcaaatgagttcaaatttagtcttcctaacttctttcctatagcctcttccttttcttttcatcactctgtacccctatatttgcttactgcaaaagttaagctttcctgctgcagatgtttgttgtagcacagagagccacgctgcacaaagtgtttctacagatcaggtgtttccatagaaactggactccagaacccatttctttgcaccttttgtgtattgtcacacattgtggaagtcacacacatcacacggaggctgcacgttcactaccatcaccccacacgaccatacaaaatgaagacatcctgtccattcacctctgccctctgcatctgacatgcagagctagaccacatcatcaccagacaccagcagacacacacacacatgcatgcacacatgttccctgcatcttgtctctcgccctctcacacacacctccctagctgtaagagcaaagataaagtacgttttcccactgagatggcagagccagaagaaaatcttgcatcccaagtccaggccgaatagggaggagataagcaagagcgggagctggaagggtttcttcattatttagggcttcactgggtaggagggagagaaaaacggctttttccaacctgcacagtgtcttctcagcagctttcaatttctgtctcactggtccaaaccacttggcttttggaaagaaagaagaaagcgacccagttcccaatccttgaaggtcctaattcccagctctggggacagttcatttttttatttttttttcctgcaggcagccagaaaaatatttttctttaaagccgttctgaaattattccaaccatttaggttggcaaaaggtcctgtggcagaggagaaaaaaaaaaaaaggcagcagttccttaagcagttggggaggggaaaactgaagggcggcccctctcctgctcccctgctcattcctctctattaatagagagggtctgtcccaaggcaggcggggtgtagggagatcaggggtcccacacacagctgatcttcacagtcacctaagggctggagagggaggagtgtggagggcttactaaaaatacagatgtcggctctcactgcagatctactgaatcgagacccaggaatcttgttttaatacttcaggagattctgatggtccaccagggctcgagaatcaggggcctgagagagagctttgctgtaatttttaagcccaagactccggcagtgttagctgggcagaaggactgtgtcctggaaaaggagcaccagagtgtcccaaataggccacctcttttttggggagtgggagtaaacagggaagagctgtctccctctctcctccttgcaagcacaagcagccatatataccacagaggaacattccagtaagaaagttcccccaagatggctccacagagcttctgtttcccctcacctgttaatctgcctgccccaggaccccaggagcatgtgctgggcccttcccctgacccttataggtccctgctcctccttcccagcagccacctgtctgggctctcacagagggtgagctgaacactttcttcatgccccctccacctccctagtgggcaatcccatttattgggcatgtgagtgaagcatttcaaggctggaaggggcaaaaagctgggagaagtcaagaatcgcagtggaactccatggcccactgaggaaggcagacttgcaccttctgtggccagtgtcccctcacctgttgcagaaagcatcggtgagaagttggtgaattagaaagacagaacaagctttccctaggtggctggggacttccagagtctcctcagttagttgtttctgagacccaagtgtgatctcacaagccacaaaggggaggaagttgctctgtgtggaagagctggtaccccactcacaaggatccctgccttcgagcagtgcatgggggctgccctctagccaggctggagggaaggagaccccattactttgaaataatatcaacaagaccttaacattcagaaaacactcactttgcatgtattaactcatttaaccctcaaaacagaaaagaaggtgttagtatccccattttatagagcagaaaagcaattgctttgcctaagcctacctagctaagcatctgaatgaagaactgcaggattgggtctcagatctataatcactcaaggcatcagacacactcttctaggctttcttcaaggcttggagatgctgggggaatggggcagaggatatggtaggtggcgggctgtcagagaagagtcgtctcaccctggtttcttccccaccgctcagaatggaaaactttctcttctaaactagtggcctgaggccagaaaatcttcattctgtttacactttgccttgtggtagacactggggagacagatggtctctccataatagtgttatttttatttttagcactttttgatctgtagtgcattttaaagctgctaactgcacttgcttctgacaattgggtaaggaatataggtatagggaagatttttttattcccattttacagataagaaaactgaggcccagaacagggttcgcatcactaggtagtggtggaggggtgagaatcttctctcctaactagtatgcaccacaggctctcctcccactgccccaggcaagctcatccttgtatcgtttcaccttcctagaaaggggcatcttgaagtcatcatgcccccataaggctcctttgttatctcaggaccacatcagccctaatgggggccttgaaagggcctcaggctcactcctctactaactctgctcataaattggcaaagactgcttgattctccctgcttccaacacccttctggactacaggaagagatacagagagcaggatggctttcagacacctaggttgagaacagaaagaagggaaaaaagagagaggggtgttccgacattcaccggcacagcgctaggtcagaagcagccccattctccactgcagggtagctctgggtcaaggcatggaggcttaggggtgaccaattagacaggagatctgacaagtaagaagaatgccagttcagagtgcggcgtaaccctgctgctagccctgcctagccctgggagacaaacccaacctcattcccagcccaacctcaacctctccatacaaagccaattagccttaaatagctgctcctaatgacttgaccaacccatcaggacttccacccaaccctgccctgagcagaaacattccaccactcctgggttttaacattaaattaatgagagagatagggaagggggctatctcactttaaaaatcaaggagtccttggggcgctgtggctcatgcctgtaatcccagcactttgggagactgaggaggacagatcacttgagctcaggggttggagaccagcctgggcaacatggtaaaaccccatctctacaaaaaagacaaaaattagccagctgtggtagcacatgcctatagtactagctgctcaggacgctgagatggaaggatcacctgagcccagggaggttaaggctgcagtgagctgtgattgcactactgcactctagcctggtcaacaaagggagaccctgtatcaccaaaaaaaaaaaaaaaaaaaaaaaaaaaaaatcaaggagtctctctagagaatctgctgtttataaacaaataaatgagtaagtaagcctctgccacttgcagagattttgcactttataacatgccttcaaatgcatgatctcatttgatcctcacacagatgaggagcccgggttggagagtcagagccaggagtcaagcccagatccacaatagttggaattgaaattagaatttaaaactctcttagaggctgggtgcagtggctcacacctgtaatctcagcaatttgaaaggccgaggtgggaggattgcttgagcttaggagttcaagaccagcctgagcaatacagtgagacccccatctcatttttgtttaaagtgaaaaaagaaaaaaaaattaagattctcttaggaaacgttctttaatgtggagagtgaatgttgggttgggcaaagcaattgcctttctcttccgtgaagcagcagcttttccagaactgatggtggagagcagaactgcatgcagttggctgttgtaggtggtcaacaaaccttcactgattgagcaatgagcagagcccagtagaaagctgtgggtggagaagtgcacttgtgaaagcataagaaaaatttaaaaacacacacatggacccatcctaaggaatcttatgattggacagaagtttctagaaggcaggagcatagagtgtgggtctgaggctttgtaggagggactatgactacccatggagtccaggtaccctcagtctgtcacacagattctggtttcagagacctaggacatcacggagcactgccagagagaatggctgtgctgtcagctgtcagaacttttcatcctgcctcatggcaaagctccggcaggaaggggcatcaccccatgagaaaagccttagaaatgaatgctatttccttaagagagaagcatccctgcacttggaatggttctgattcagccctggggctgagggaaggggaggagagcaggctcagcttccccacataacttgctcctgggagcatttcctggggaacctcctgttggctctgggagcagcttggctaggcccagaggtttggaatgtaaacgggtcagaggactagtgaaaagataagttcccaaagggtctggtgctgcacatggggatgaggaaggcctgtgtttactgtggatgagaaggcgcgcacagccagcctgctgggtggagctgtgagtaacctgcctgttcctctcacccctgacaatgaagaccagggctgccctggcactgagccaaggaaaccccgccccgcccagcacaggtcacagccacagtgcctcactgcttttgctggaagccctgggcaaattggtgcccagtccctggcatatgctttcggtgacaaaggcaatgaagggatatagaaaaactcccgccagtgctgggagcctccttgggacagggcttctcacagtatgaaagatttctagatcatttctaggcttctgggtgattagaaaataaatttttttttttaaatcagggtcacaaaaattgaggcttttagaaatgtttgttttagaataccaatgctttaactacccccttaatttatatgcaagatgactgttctgttttccagaaaattacagaacttacacaatgttaattcatagttcaccaattacaagtgaagtggggttcagccaacaagactcaagcttaaagttttgcaattaatgccttctctttttaacccttgcaatgtatctctgacaatgttatatccttaacgggagatcaagccaaaaacctaactgcaaggtcctttgtgataggaggccagggaaaatggccttccagacctccttggagaggcctgccttggaagagaccaccttagagggaggtggagaaagacagtctctgccttccttcccttccgccttccttctttccttccaatactcagtgtactgcgtatgggctcatatacgcacacagaggataagtgagtgagtttgcttatgtgcatgggacctgaagaggtgtgtgtgtgagtgtgcagactggatctgctgttaaacagcatcttggccttggcgagccacttcttccttccagtcctcagtttttgcaaatggtggggtctggagttgattggtggatttcaagccatttttagcaaagaaacgtgtcccctgcccctcaacaaatgaatgcttcggctaaacctcaatatatataataggtttttttaaagagagctgctgaggttggcacagggatgggttgagggtaccccagggccatctcctcagtctcctccccacaggggtatgtcacagaaatgaaagcagagttggaaaaccactaggttataggatctttaaggacctttctggatttaaccaggacgctaaggttcatacatcctaacatccctctcatgaagacactgatgattttctcatgctgtgaatgggaggactgagggccagagtggttaagggtcttctctgacaagccccaggactcctgactcggagtccagtgtgctttctttctttctttttttttttttgagaaagagttttgctcttgttgcccaggctggagtgcattggtgcaatctcggctcactgcaacctcctcctcctgggttcaagcgattctcctgcctcagcctcccaagtagctgagattacaggtgtccaacaccacaccctgctaattttttgtatttagtagagatggggtttctccatgttggtcaggctgatctcgaactcctgacctgaagtgatccacccgccttggcctcccaaagtgctgggattacaggcttgtatgccactgtcccaccagccccaatgtgccttttttttttttttttttttttttgagatggagtctcactctgtcacccaggctggagtgcagtggtgcaatctcggctcactgcaaactccgcctcccgggttcacgccattctcctgcctcagcctcccaagtagctgggattacaggcacccgccaccacgcctggctaattttttgtatttttagtagagacagggtttcaccgtgttagccaggatggtctcgatctcctgacctcatgatctgcccaccttggcctcccaaagtgctggattacaggtgtgagccaccgcacctggccaccaatgtgctttctaccagcatgtcccccgccctcttcagagcaggctcaacacatcgagtggctaagccaatggccagggaatccagagcctcaagcccttgttattcccttacctgctgggtacaggcaaacaaggagatgcttccacagctccctgagctctgcccatcttccctagagctctagttctgcccaactctggcttcaaaaacatgacaactagttactgagggcccaaggataatgaccttatgtgtcttctccctgcaggtgcatcacctggatcatgaggtcacccctctgctggctcctcccacttctcatcttggcctcagtggcccaaggccagccaacaagacgaccaagacccgggactgggcccgggcgcagacccaggcccaggcccaggcccacacccagctttcctcagcctgatgaaccagcagagccaacagacctgcctcctcccctccctccaggccctccatctatcttccctgactgtccccgcgaatgctactgcccccctgatttcccatctgccctctactgtgatagccgcaacctgcgaaaggtccctgtcatcccgccccgcatccattacctctatctccagaacaacttcatcactgagctcccggtggagtccttccagaatgccacaggcctgcgatggattaacctggacaacaaccgaatccgcaagatagaccagagggtgctggagaaactgcccggcctggtgttcctctacatggagaagaaccagttggaagaggtcccctcggccctgccccggaacctggagcagctgaggctgagccagaaccacatctccagaatcccgcctggtgtcttcagcaagctggagaacctgctgctcctggatctccagcacaacaggctgagcgacggcgtcttcaagcccgacaccttccatggcctcaagaacctcatgcagctcaacctggcccacaacatcctgagaaagatgccgcccagggtccccaccgccattcaccagctctacctggacagtaacaagattgagaccatccctaacggatacttcaagagctttcccaatcttgccttcattcggcttaactacaacaagctgacagacaggggactccccaagaactcctttaatatctccaacctgcttgtgctccacctgtcccacaacaggatcagcagtgtgcccgccatcaacaacaggctggaacacctgtacctcaacaacaatagcatcgagagtgagtggggtgggccggggcggggccgaaggcaaggaggttggcttgtgtagcacttccaccctctctagggagactcagggtggggtggtataaaaagcatccactttggcactggacttcaattcatggccttgccacttgctatctgggtgaccttgaaaagatatttgaccagtctgggaagtttcctcatctgtaaagtgagaatggtaacaatatcttctatcacaaaggtgatatgaggatgtaatagtttaatatggagaaagtgcccagaataccatacttggagggtcataggttttcttcctccattcttcctcagccccagttccttggcaactggatctataggtagggtagacatggaatatactcctggacattctgctaaaaacagaacagagacatttaaatacctatcctgaaatgtcctgggtctgccctctgcagaaacctgcccctgtgggaagatgcttcttcccaagcctgagcctgggttttgattcagggtatgcaactggtaaaaatgtggcagtcaggaaaagaaggtctgcatgctggtgctttctgaatctatctggaagggtgcgatgtttaggtgcacttaaggaagagtttgcctaagtgacatttacagggttctggacttggagtatcaattgcagcccaggagaggaggctggaagttgcagttttgcttcaatcaaaaatttcagctcggagcagagcattagcagaaaggtttagaagtgaaataatattttctggtccttgaacaaaatcagcctacattcacagaagggatgcagcagcagaagggaagagagggattgagggaaaagagaaggacccctagaatgatatttggggatccttaggttccaaaccaaagaatgagatggagattgttggtgtctctaccgacaccaacaatgggcgaatagatcgttcactcatttgggataatttcaagaagtaggggaggattttttttttaatcttacaaaaaaaaaatgggaaaaggggaagactgtataattttaccctggagacagcacactaaaataaaacacattacccccaggaagctatgaggccaaaatacagacagaagggataccttgattaataaatggctgataggtctctaccagattgtggaagaacaggttgctggaggatatcccaaccttctaaggttgaagtcagagaactcacacctcacccacatgagcccaccccatccagcctgtctcctgtgccttttacccgacagaatgggctgagtggggcctaggtcagtggggtgattacgttcttcacaatgaccataatgctgccactggtactgtctttaaacagcttacaaaatgcctttgccaacattctctcccctgattacagggcaggcaccactcttaccatttcacagattgaagaactcagcatgagggtggctaggccacagccccaagctcataagagaaaacccccgtgtcagggcccttctgctactccaatggcaaagaagaaagacgaggaaaaggaagaggaagacaattacaatgaagatgatgcctactcttcctcctcctgctcctccataaatgataagtgaggcaaggcttagggagaataaaacagttcatttaaatgctggcatgcctggtgccacaggcatccaacaagatgtgatggaggaaatggaatctcaggccatggacccttcagaatcagtaggctcatcatgtcccgggggttccggagctctccccagatcctctttcctcttcctgtcatccttatttcagttaccatcttttgcccatcctcatgtctcacatccaattcaaaggaaaacctgcagagtaattttcacatccacctactggcttcagatctcaccttactccattgcttctccacagtgtagccggattatctttgtacagcataaacctgaacatagggatctctaaggacccttccagatttaacgctccaggataccatggttcaagtatcctgttaataacatcgctctcacaaagacagtcctgttcactgccattcctcagaccagagatcaaaagcctcttagtgaaagcctaactaccttcccagcttactctccttagtacatcacattgggcactattactattcccagattcgcccacaagcagaattttggcctccacaacttcattcaaacagattcctctatcagaacaccatcccccaggtctccacctgttgtaattctacctattcttgaaggcccagttcaaaatttacttccaattctctagagttaacttgcaataacagttgttgatcaattccaacttaattcattttacaaatgagtaaactgagcctggaggtcaaggcagctcatctatgatcacacattcccaaagctagccagtttcagagagaagtctacagtccttgctctcgggtgtcttcccccttccccttcctcatcttggccgccagcctccactcccttctgatttctcgtcttctttttccgtagaaatcaacggaacccagatttgccccaacgacctagtggcgttccatgacttctcctcggacctggagaacgtgccacacctgcgctacctgcggctggatggaaactacttgaagccgcccatcccgctggacctcatgatgtgcttccgcctcctgcagtccgtggtcatctaggccctactccgccaccggatctgctctgaccgcacttgaaggctggggcccaggcacctgtgccggccattcgttttctctctctccctttctttctcccagctttgcctcccttatcccaccctcgaggcagggaaaagccatctattcttctgcagcctcaggagcgagacttcaaggactcagtttggttccacccagttgaaagacacccagtgcacacccaaactcctggccttctgtggtttccctttgctccagaaacacagatgtgtctaaagacttggtgtccccttctctctcctcccccacccgccactcctgggtacatctgggccgtggactatctgatcttggtcctggccgagcaaacagcccggaggtaaggttcagaaagtccccctggggactcctccatcttcggcagctctggctcaaagaggccgagaaacccagttctcctgggccaaggatcccttctggcaaagctgctgctccgccgcttggttccccggcaccagacatcgccctggccctgctggcccgggtatcgggaaggaggagcgagggaatgacggaggtagggtgcagggtcagggctcccgcaggggcctgcatctggccagcaggacacagggatgcgcagggcgcccccttctgttccagggtgaacatagcacacgccctcctggctgggcctcaggaggaacagccaaggagaagaatggcccaaggaactaggaagcagccatgggagaggggaagggttcaagcccgggatgggcccgcgtgacgtcgatgggtcctgcggcccccttgcccaacctcgggtttagggaggagggttcacagtgtttttgtgggggcgggggaaggaagaggcagccccgcccccgccatctgttctccatcagtgtgcgcggcccagccatttccaccctcgggaggcggctcctgagaaacagggaggaaggggcggagcacctggacgtctcccagaagcccctccacgtttgaaaatgcgcctcctcctcggagacagacgcatcggtgccacctagtggctggtgggagtaacagctggtcccagtcttgcgcctggccctcttcctggggtgattttcctcggtggaggaggcccgtggggtcccaacacggaagagccatgggccgtgtgcatggtgtcgctctcctctagggtctagcgggcacaaacgtccccaggctgggctcattcccatcgtgagtgagcccaggtgaggacatagtcggctcccgtttgttgtaggcccttcccaggtgccttctcagctccctcatctgtaaaccgaggaggtggataagatgctcccggccgggcgcggtggctcacgcctgtaatcccagcactttgggaggccgaggcgggcagattattgcctgagctcaggagttcgaaaccaccctgggcaacatggtgaaacccccgtctctactaaaatacaaaaaaattagccaggcatagtggcgcgcgcctataatcccagctactgggaggctgaggcgggagaatcgcttgagccggggaggcggaggttgcagtgaggcgagattgtgccactgcactccagcttgggcgacagagtgagactccgtctcaaaaaagaaaaaaaaaagatgctcctctgaggtccctccggcgctcatgttccgagtctgcagctccacactttaaatcatactcgaatgcaggacaagtcctaaatatttgccccttcccttgcagtaatttattttctgtatggactgtccctcccccagaggcttccccaccctccattgcctggcccaggtgagcagcttggcaggtctccaagtggaacccggtccagacagggctgcctcgacttcacctttccccctaacttcctccaagggatgctgccccttctcagccccctgcgtgtgtatattggtgggaggcatagaggatggatgttctagaaatgagtaagacacagtgcccacccccaagttaggatgaaaaaagttccagaggtttttaagaaattggattaagctgggtccctaacttcaagaaattcccattatgctccttctcacctttcttttttgctaattatggaaaatagggcccatttcatcatagcctccttcccccgtgctccactacaatcgccgcattctttctagctgcagctggtttcttcaaggctcctgcttaaagtccacacgttattatggccgaaagcaacctggtgcttcggcctggataagagccccttctgcatcttattcacagcttgcagcctcagcccctttgatgaggccctcaggggagaggtcattaccttgatcctgcaaacccagactcgttgagcagcaacgcaatcaccatcatcccactgcccaatctagaatatgtctgctctcctttgctctctgcagctgtaagccagaggggattcaaggtaaataggctttacaggctcccctcctccaaacacacacagaatgggctggtttctttcaagtttaaaaaaagcccccttctccatgcacaagttcattccctccatgctgtcgtcatcgacatatacaggtgtgtacgtaggtgtatgtgtgtactctgcacgtatatctcttctgtcttgaagaccctgttaactttgtgaaataacttccacatttcaacacacttcacagtacaggaaataaagtaatatgaaaaacaccctgcgtgaactcaacggtgtgaacaggtcaagaataacacttcaaagtcatcttgccagccaggcgtggtggatcacgcctgtaatcccagcactctgggaggccaaagcgggcagatcacctgaggtcaggagttcaagaccagcctggccaacatagtgaaaccccttgtttactcaaaatacaaaaattggctgggtgcggtggtacatgcctgtagtcccagctacttgggaggctgaggcaggagaattgcttgaaccctggaggcagaagttgcagtgagccgagatcgcaccactgcactccagcctaggagacaaaacgagacttcatttaaaaaaaataaaaataaaaataaaaataaagtcatcttgccacccaccccctaccattgagccaccatgcccagccccaaagcctcttaattgctctaacaagatgagtggggaaaagattatactcttaagaaattcctacgaaagctatccaaaagccttttctttcctcttttcttattatttttaaatagaggcagggtctcattatgttgcccaggctggtctggaactcctggcctcaagtgatcctcccaccttggcctccccagagtgctgggattacacacgtgagtcaccatgcccagccccaaagccatttcttgaagaatttctcgcaaactcacaaccctcatgaaaaattaatcctcagttccacgagactgcccacccacagacaaaaaaatatatatattcctaaagtcggaccagaaatctgacagctgcctttgaaacccaaagcctcgggttctttcaagctacatgtactaaattgtcgaaggtctcccaggagctctgtactgaggcagacacagaaagacacaaaacggtcgtctttcctgcccaagtaaagcttacagactaactggggagatgtagtgtgcatacaaaacagtaaaagagccatctcaaggacagagagcatagaccaagtcatctggaatggtctacatgccatgcggaagtccaccgaagggttagaacagggtgtcccagactctctcttctgagggaaggttggttgcaaaagtgggattcatgaccctcccaggctacaccatcttctttagaatgagaactgccaggtgacgccctcgctgctcctacctggctactaaacatcgacttcggttcacttcacggatgttcagtggatatcggtcacatgccaggtccccagctacgcattcaaggatggataatatacatagcagcacatccttgaggaactcataccttggtaaagggaaagaaatccatgaatggatacctctgtgtcctaagtgtttgtaataatgctgtgtgtcaggcctctgagcccaagctaagccatcatatcccctgtgacctgcatgtgcacatccagacggctggttcctaccttaactgatgatattccaccacaaaagaagtgaaaatggctggtccctgccttaactgatgacattaccttgtgaaattccttctcctggctcatcctggctcaaaagctcccccactgaacaccttgcaacccccacccctggccaccagagaacaaccccctttgactgtaattttccattacctacccacatcttataaaatggccccatccctatctcccttcgctgactcttttcggactcagcccgcctgcacccaggtgaaataaacagccttgttgctcacacaa

SEQ ID NO: 43 - DNA, 17944 bp, Homo sapiens
  source 1..17944: mol_type = other DNA
gagcagagtttcagttttggcagcagcgtccagtgccctgccagtagctcctagagaggcaggggttaccaactggccagcaggctgtgtccctgaagtcagatcaacgggagagaaggaagtggctaaaagtaagtgttactgctctgggatccccagacgggatgctatctggaaagggctcgggacgatggctcaggtaaccccctccattcccaactcccagtctcctagatagtggggtgacaaggacaaggaggcagactgtgtgactgtgtgtggctggggagtaagcgtgcatatcgcagtgggacgagtagggatgcacgtgtgtggaagccccccatccttttctgagaaatatcagcaggtgggaagggacctctgtggtcagcatatgtaattctactctttcagcttggtctgtgcctggatttcctaactcctcatagttgattaactgtgtggccttagacaagccacctaacctctctgatcctcagtttcttaatctgtaaaacaaagatagaaataacacctatcattcagggtcaatgtgggttcaaatgagaaaacacaggtgaaatagctttgtaacctctagaatgaaataggaattgtttcatatttttcagtttagtttaattaatcaaggatttattgaacaccaacagacctggaattagatagtgcgcataaagtatggcacctagcaagtcctcttccattctttgaggtttcccacttgtggctttctggcaaaggcatgttcagctccttttttctgggcttccaagaacctctgaaatcctttgcaattccacctcgctttgctctagcagattcctgccatgggagacataaatgtgtgtcatcgcatcatcctgcccttcctagaggtagaaaaaaagaggtcctcacgggatcactgagtgaggtggagctgagccccacaggcagcatgatcaactcctgctgttcctcctggctctgcagccagcagatctcagacatgggcttcccctccctttgcccatcctgacagcagcccaagccagcagtgggaccgtccggcacaagggcagcagcgggtcaagctccatccctgacccccagttccctttgtgcaattgccacagtgcctggggccattgaagctgctcctattttgtgccatcactttcccccttcactaggggaattatagatcctttaacatctggagaggagatgccaatttcaggggtttaggtagaaggcagctgtctggtgcctggacataggtcttcccagagccagatctggaattctctctccatccttgtcccgcccctggatgtgctaaagtagcagaaagaacactgagccaggagtcaggaaagcaactctctctgcttatctcctagtgccgctagacctctgtggctttaggtgataaaaaatggggtcacacaggcttccatttagtaaacccacttgccctgggctttcacaccttcgtctcattctcccttgataccaacgaggaggtaggcagggttggttttgtgatgtcattccctagttgaggaaaccaagacaccgtgagtctatgtgagtggtgtgaagtcaccagcaagtttgaacgatgaggttttggtacagccattttgatatggtcatgaggacattttgatgtcacctaaaaagcaaactatccaacttaaaaaaaaatacctatgcattgtgctcagcagagaccttcatctatgtcttgccctctctctggaggggctggggctggagtcccaatgtcactggcatcgacacagtatggtggagtggaaagaggctttggcgtcaacatgcctggttatacccatggttatgtaacatatcctacacatggtaggtgctaaataaatagcagctaatattttccaggaagaaatttctctgttggcacctacctctgggtccaggtgtctcttcattttttaattttttatttttttgagatggaatcttgccctgtcacccaggctggaatgcagtggcgtgatcttggcttactgcaacctccacctcctgggttccagcgattctcctacctcagcctcctgagtagctgggattacagacccatgccaccacacccagctaacttttgcacttttagtacagatggggttttaccatgttggccaggctggtcttgaactcctgacctcatgatccacccacctcagcctcccaaggtgctgggattacaggcgtgagccactacgcccggccccaggtgtctccttataagaactgccttttccgtgaaaggcagagaggaaagaactgaacaaattctcagttcgctaagattgaatatcctgcttcttcctctctccactgcttcctctcaataggaagaccctctgaggtaaagcagagtggctaagggcctatgctcttgatctagaatcccatctaagtcacttaccaactgtgcaaccttgggcaaatgtctcacctctctgtgcctcaattatctcactcatgaaatggggttgcccattttgtcccatctcctatggtggctgtaaaaatggaacacattaacacatgtaaagcacctggaaaggactcagcgtacgttcttctagcctagcccatagtgcttgtctcctctcttatccacatgagtccaacctaagtagctcactctccatctctctatcttcaaaggatgtccagcaagcagacttctactctcataccaagtccaggggacctttcttcctctgaaaaagagggaaacctgagattagatggacaaaggtttggactccacaccatgagagatgaagtgcagtcactttaactgaacaggagctagttaaatacattttataaaaagaaaaactatccttcagcacagcttacactcctgccccaatccacaattgtggggacatatgttacacatatgttgggatactaacttagtaaactgaaaatgatctagcacatcctagcctcagcagtgaaaaaacaactgctagtttaaggaccagaaaacgtgccctcatgcatgatataatatcatatatataaaacccaataaagcaggtccctttgctcatttaaagagtgataatggggtagtgacctcaaattaggattctgctgtgggtcttggggtcgagaatccctataacccttagatttccaacctgtgtcatgaggataacaacatctatctcttgggttgttgtgctgatggatgaagtcttacaagaaaagaacctagcaaagcatttggcacgtagcaggtgcccaacattatgttctttttcttccttccttaagcaaatcctttaaatccagccccagccaccctgggctggggaggtctcccgagatttgaatccccaggtttggaagaaagtctctggttttgagaggaaggggtctgtaatgattctgaaagctcgaggtcctttcaaatgctactagagaaattgtgcttcaagttttagctttgggcaaagaagagctcctgttcctgaaagcaggggtatcctctcctgccaatcatcccatctaggactggactgtgtgcatcccgctgatgttgccatctgcccgacctgcctgtgcatgcctgatgctctcatccctggcttgagaccatgcagagggtaatgggtgcacacacatgtcccctctctacacaaacatgcacagccacccaaacatgtcacaaaatgagaagtctgggacagaggtcagggtggtcttcaccttggagaagctggcatctgactctctgcaacccaggccaagtccagaggagggctgcatcccccagctcagcttgtgggaagaccactcctgtctcacgcaaatatgaggcagcttgcttatctagaggtgaggacaggaacaagaagcaaggacagctgctgctggtgtgggttcttaaaagcaggcagcattttgtcctcccacctgtgactgcacccaccctgtgccagcacaagtagaaaatggtagatctcccaggactttgcagccagcccatcccaactgtttctgagacttcctggcctcctgaaagctgctcccacctgggagcatctcccatggcagcttgcagtgcccacgcaggtgatgacatcccagctagtgtcccctgattgcttccatgttggagctgactggtatttggccaaggccccactccaggcattaatcattgacctggtaagaaaggtctggggcaattaaccggactcaagagagcctcaacgttgccatctgacacccatatttgttcccactccctccctttattcttccaaagaactgcagaaacaaaatacctttatattcacaaggaaataaaaggttccttgctgggaaattcccctgcaacaaagaaataaccaagataaacaactctattgcctttggctcaagctggtgaagggagtctgggagcaggagcaggggccagggtggtgagggaggtctgggagataacgcccagcttcctcctgcttacagcgtccttatctttatgggcactcattactgcccaaacttacgatcatttaacactctctttgtcaagacaactccaaagtttaaagtctgtcaaagtctgggaaagtggagacttctgtctcctcctctaggctgtagttggggtcttgatgacagctgctgtcaggcagacccctgggaccctcaactctcctcagccctgggctgtgtccacggtggagacaaagtccacacaggctgctccgtctgagtggtctcatcttcgattcttcatctttgtctgccaggccttaccaggcaggattacaaagaccctaacacctaagcttttaaccccaattccataaccaagttgctgggaaaacgtaagcctatcattcagcatctcaagacctcaatgttttatccataaaatggttgtgattatacccgtctgtcttatttcaagggaacatataaagctcaaatgaaataatgtaaatggtagtgctttcataagcaacagggtctctacaaataacacaaataagcataaggtaaaagcatgctcttgtatttggggtgcgatacagtagtggagaggttaagcacatggactttgcagtcagacaaaggtgggcccaaatcttccccgacccccattctgtgtacccccacacatttaaccccatgtgcccttgaggaaagtacttaaccttgaagccttcatttcctcccatgtgaatgtggataaggatactaacctcacagggctgatatcaagtctgtatgagatagtacacataaattattcaacacagtgcctgagacagaataagggagcaatcaatggggttaggaccatcatcattacatttacagccttaataatcatgacacctcctctgtgggtctcagtttcctcatctgaacacactgtgaaatatgtcagcccgcttcacctcccaggaatgtagggagggcagctgaaacagagagatgggggccacgtattggtaggaaccaatcacccagcaagccattcctgagatcttacggtgtgcctgggactgtgtctcatgggcagggaaacagagcaaatgacacaatatctctatcccaaaggagcttgcagcttagttgagaagacaaaagctacttctagctattaaggatatacaagtgttgaaggatgataagactttgaattgttatggaaaaagtggaggcactgattcattcaacaggatttatgtcagttgctggagatacaaagccaaatagatgtcacagaaactctaaggtcaactagtcttggaagacaaggggcgcttcatctccttgtgattattgtttttcagcattgcacaggagaagtcggcctgagtggtgcggcgctcgggacccaccagcaatgctgctcttcgtgctcacctgcctgctggcggtcttcccaggtgtgtctgccaggccccaactctccaagctccaccccttcagcctgcccgactccagggttcacctccctggggacactaaaatcagactcatccccagggatgtccctctcaaagttggcacttccttgaggaagagtcatacagagaagacactgaaaggccacatctgtgagcattggaagtcagggacaggaatggcacttcctaatctcaaggccaggggtctgtgaaagatcttctttgagaataacaaagaccttaacttcaaccaagcatctctatgacccgctgtgaaatctgagggaagtcacttatcctttctggctctcaatatttttatctgggggaaaaaaaagaaaagaaaatcatctacaaagtgcttttagaaatataaggaaataacacatggcaagtgcaaacatgtaacaccttacgaaagtggtgttattgtttgaaaaaacaatggatggctggatgctggctcacagctgtaatgccagcactttgggaggccaaggagggtggattgcttgaggtcagtagctcaagaccagcctggccaacatggagaaaccttgtctctactaaatagaaaccaaaattagctagcatgcacctgtagtcccaactacttgggaggctgaggcatgagaatcgcttgaacctgggaagcggaggttgcagtgagccgagatcgtgccactgcacaccagcctgggcgacagagagagactttgtctcaaaacaataaaaatatataaaataaaaaacaagggttatcataaatttgtcattcccttgtccttgaaatggttatcattaatgaataacaattccaatttaatcatgattaaaacagtcactttatttaatctcagcaattttccagctgtgatatatgataaattatcaacacagggcctacgtgtcaggtagaaaaccacatctactcatagtgggttatctggaacaggctttacctcccaagggcctcagaaagcctctctcttctgttcccacagccatctccacgaagagtcccatatttggtcccgaggaggtgaatagtgtggaaggtaactcagtgtccatcacgtgctactacccacccacctctgtcaaccggcacacccggaagtactggtgccggcagggagctagaggtggctgcataaccctcatctcctcggagggctacgtctccagcaaatatgcaggcagggctaacctcaccaacttcccggagaacggcacatttgtggtgaacattgcccagctgagccaggatgactccgggcgctacaagtgtggcctgggcatcaatagccgaggcctgtcctttgatgtcagcctggaggtcagccagggtaaggatccaagctccttgggcttctgggggaaagttagagggaattctctaaggtgcatggagggcttgaggaggaacttcctgacaaggatgtgtagccgggttgggggtcagaaggcacccctttccccaggcaaagacttctttaacaggagaaggagacagatagggcctacttgggggtgatgagtgaacccttctaggacttggtggcctataacattttaggctttctggagaccccagcttagaagggtatcagaaggacaagttttctggtgtttgctacaggtagaaagggaaatctgacatcaggctaaggagatagaaaaggtagggagagatttacagggatccttaaattcctatcattaatgcacctttccatcaaggtttgggccgccaaaaggcttcttgtaaaatgcatattttttttttaacctgggaacccttagtcttttggtattatcagggtaaattagattattagatcttgaccaaagaccaagatcctgaaaggatgggttgctaacaagcctattctagttggagaaagagaaaaaaagaaaagctctttctgacaagggtttaacaatgaggctgttttagatagtcaagggcaactcaaaagagaggtctacggagaaaagaaattcagggggactcccaaagacatgtcttgctcctttggaatatgcatactattgtctgtggactaaatgaggaggtcatttaggtggggatcaagattcaaaaccacagaatctttagaggtgaagagggcttagagttcaccctaaccggacacttagaagaacatgctgatgacgggtatgcagcctctgattaagcactttagcagaaactcactgctccctgagacagcccatttcacatttagactcttgtaatttttagaaacttctattgtatgcgttgaaatccatcaccctgcatttacattcattctgttcatttcagcacacattaatttggccacctactacccagaggcattgtgcttgtcacagcagaggggtcaaacatgagaaaaacatgttccagccttcaaggaacttccagtccatggagaacataattacccatacaccagattggatgtaataagtgatgcagatgtatcaagaaagcacagggcagggagagattagtgttagcttgggaaaggtttcatggagaagaccgctgtcaagctgggccttccgacagcattcctctgggaaggagggcattccaggttataagtccacccacaccctaactaggaatagcaaatagtcctatgttgcaagaaagtagaatcgtaacttgcctgccccctaccttgcacccctcatcctgcaggtcctgggctcctaaatgacactaaagtctacacagtggacctgggcagaacggtgaccatcaactgccctttcaagactgagaatgctcaaaagaggaagtccttgtacaagcagataggcctgtaccctgtgctggtcatcgactccagtggttatgtaaatcccaactatacaggaagaatacgccttgatattcagggtactggccagttactgttcagcgttgtcatcaaccaactcaggctcagcgatgctgggcagtatctctgccaggctggggatgattccaatagtaataagaagaatgctgacctccaagtgctaaagcccgagcccgagctggtttatgaagacctgaggggctcagtgaccttccactgtgccctgggccctgaggtggcaaacgtggccaaatttctgtgccgacagagcagtggggaaaactgtgacgtggtcgtcaacaccctggggaagagggccccagcctttgagggcaggatcctgctcaacccccaggacaaggatggctcattcagtgtggtgatcacaggcctgaggaaggaggatgcagggcgctacctgtgtggagcccattcggatggtcagctgcaggaaggctcgcctatccaggcctggcaactcttcgtcaatgagggtaagaccctagagagggagggggagtaggtggggcagtctcgcaggtgagagccaagctcagctccctctgagtgtattcatcaatagtcatcaatcagccaacagcatccactcaatgaccagccccgaactggaggctgcgtgggctgctgcacaggacagcaagaaaaagcaacctctgcctgatggcagctcctaattactcttctgttatcaaagtcattttgatggctgtccctgcttaacaagcaagaggtgagtaaagctcttgattgaggcaggacttatagactgtgtttcagggctgtggcaggctctgcaggggtcctctgtcccctcccctggcccctgaacaagatgggtgcctcatccctcacattcagatggaaaaaggattggcttatcttggtctcaatgcgttcccaggagtgccccagcctctaaatgtttcactgtcacatttcgtagggttatttgtgaatttcagcaccatctggcccactcagccctactccagtgagccatcagcatggtgaaagaattaaatcccagctccttctcatcccagagcaccctgcatagagttgccctcgtgagaagcagcaaaccagtacttgcagttccaagtatctgtgcttgtgactttttttttttaaaggggcttatattctctgcatgccatgtccacatccagctctgggttttcaccagaatcccctgcatctttggtcacctgcttctctctggatctcagctttagctgcctggagaatggctatcgtctttgagatgccccttggggccccaacaattaagctcacctttgctacatactttatagtttacatcataccatcctaaatatattttcttgatttgggcataatccattgggccacttttgtggaatacacttgttagtgtactaaatagacaaaaacctacacagagggagactttgtaagaagccaaagaagagctgatatcctctccttcaactccttccattctctgctcagaataagatgggggaaaagaacaacatgtgcaggctgatggggagactccaagcccttggagtctggccctgatggctccagctgcaggctctgtgacattaggaaagctccttttcattttctgaagagggtaaggtgatgcgtgtaaacttcactccccatcctggctgagaccccgggaagaaggcttctcaggccacgcaaggctcttcctgcgtggccatcctcccatcccatctctgtctgtgcttccagagtccacgattccccgcagccccactgtggtgaagggggtggcaggaggctctgtggccgtgctctgcccctacaaccgtaaggaaagcaaaagcatcaagtactggtgtctctgggaaggggcccagaatggccgctgccccctgctggtggacagcgaggggtgggttaaggcccagtacgagggccgcctctccctgctggaggagccaggcaacggcaccttcactgtcatcctcaaccagctcaccagccgggacgccggcttctactggtgtctgaccaacggcgatactctctggaggaccaccgtggagatcaagattatcgaaggtaggagttgacagggagggagaaagctctaaaacctctccagccagcagcagcatccccaaccactcttcctcctttttcacccgcctccaccctgatgggccagacctcaggagggagcccacctatccagaggtcacattttcatgcctataacacgcaccttacactctgaattaccatacatggtacctcctactaccaagaacatgggcttctttcgcagtgtgcaggcatcagctgaagtcaaggattgcagatacctctttgtattgagtctagaagagaaggaagagtgaggaaagcaaactgaagtccatgtgtgaagatctatggtctatggtagactctggattgatcatggtgctcatcaataataattattacctaggcacacaattacatttcttctgtagtcagaataacatacttatttctaatgctatccaaagaggatatgtagactgaacatggtggtgcatgcctgtaatctcagcaccttgggaggccaagacaggaagattgcttgagcccaggagatggaggctgcagtgagctatgatcgcaccactaccctccagcctgggtgacagagagagaccttgtctcaaaaacaaaaacaaaaatatatatatatatgtatatgacatgtggacaaagattcccaccagagtcacttccctgcagcatctccaagtaccaacttctgtgtttatttctacctccctccctcctccaggagaaccaaacctcaaggtaccagggaatgtcacggctgtgctgggagagactctcaaggtcccctgtcactttccatgcaaattctcctcgtacgagaaatactggtgcaagtggaataacacgggctgccaggccctgcccagccaagacgaaggccccagcaaggccttcgtgaactgtgacgagaacagccggcttgtctccctgaccctgaacctggtgaccagggctgatgagggctggtactggtgtggagtgaagcagggccacttctatggagagactgcagccgtctatgtggcagttgaagagaggaaggcagcgggtgagtctccaaggacagggcctgcacccctcagacccagaggcaggacttcctgaaggcccctgcctgagagcttctcaatcagtgctggcccctatgtttggctgtaagaggctgaaagtggagagtgggaagggaggggacatttaggtcctatatagcctcgttgagcccttcaaaagggacatctcaaataaacataccaactaagtaaaaatagtgggtttgctatttaacctcggcattaagacaactcccagctgaatgtggtggctcacacctgtaatcccagcactttgggaggccgaggtaggcagatcacttgaggccaggagttcaacaccagcctggctgacatggagaaaactcgtctctactaaaaatacaaaaattagctgggcatggtggtgtaatcccagctatttgggtggctgaggcatgagaattgcttgaacccaagaggcaggggttgcagtgaactgagatcgtgccaccacactctagcctaggcaacagagctagattccatttcaaaaaaaaaaaaaagacaagtcccatagttgccacttcaacccagattgaagtctcttctatatctggaaatattcttctctgtatagaagaataatatgcatacatcactgtcatatgcaatatgttcatcccccttccccctgccaaagctcgccctcgaaagagggccagataccttcatttacaaggtctgatcaggaaaattaggaaacatctagtaaatttgcatttcaagtccccttttaaaatttcacatgaaatgttttagccctaataagggtatttgtagtccctcaagaaatcctattgggtctggaccctgcggatgggactcactgaggggcccatcgccaggctacctccagggggcagcactatcatacccagctgggcagtcaggaagcctggggcagcgtctcagagccttgaaaatctcccgggcataagtgatgggtcagcctttatgcacagctggtctatgacacgaagccttgaaggtccccactatacttttggtagtaatggggcagagatcatctgtgacagctgaagaaggccatcacagctgtttctaatgtcatcctgggtcctaccccaacagccttgagatcgaaccctgaccctgtgattcctcatgaagtctcccccagactccttcacctcgaggagtaagagcatagagaaaaatcacaacccaggcccactcttccctgctgcagggtcccgcgatgtcagcctagcgaaggcagacgctgctcctgatgagaaggtgctagactctggttttcgggagattgagaacaaagccattcaggatcccaggctttttgcagaggaaaaggcggtggcagatacaagagatcaagccgatgggagcagagcatctgtggattccggcaggtaaggaaggattcaaggctccccactcggagaacaccccagagccgagcacctgaggctgggccaccaggtccaaggaggaaagcccatctgtctcttgagcactggggcagcccttactacctctgcttatatgtgggagggtcctatggtaccctctgcccttctcccatggctggggaggtgtttacaattcagttcaatcttccaggcctaggatgcaacaaggcccagtgcgtgcctttgccagtctgggaaggcttcttagaagaacagagctagggagctgcatcagcagggtggggtggataaacctgggaggaaaaaggactaagccaaccttgccagcacatcgtcgggcccccagatctcccttccagggatgaactaacttaagccttcttccagctctgaggaacaaggtggaagctccagagcgctggtctccaccctggtgcccctgggcctggtgctggcagtgggagccgtggctgtgggggtggccagagcccggcacaggaagaacgtcggtgagtccctgggatactccctgcctcccacctccaacccgagccctcagtcctgaatcatccacccatagaggaagctgctgtgtctcttctttttcatgagctaaaacaaaggatcccgagaaagcaggatggggaaagataaacccacacatactcgaaactgaaattcagagctgctgtccaaatactaacactggaaaatcatctccaattacccaggatctaggttcagagacagggctgccaggaagaggagattgggtttcaggagaccctgggcttggactaattggataactaatgagctgtgtgacattgagccatccttatgccatgcctcagtttcctcatggctcaagtcaaggatgataatcaggacctcacggggctgatgtgaggaccaaaggagatgctgtgcattgaaaggtcccagagtgacaaagatcagggattaccaagtcctgattacccaggaaaagggactggggaggagactcggatcatttccatccccctgggtcatagtcagagctgcaccacctcagctgtcctgcagggctacagtggatccgcccagagagaagcagcccagcctggccttctaggtcccagcccctgtccttacaccaactcctcttcctcccggacagaccgagtttcaatcagaagctacaggacagacattagcatgtcagacttcgagaactccagggaatttggagccaatgacaacatgggagcctcttcgatcactcaggagacatccctcggaggaaaagaaggtatgaccctcactcaagggaatgctcagcccctggggagagtaagaattggtctcacatctgggttgggaaaaggaggctagtaagggctaacctaccctctttcttcacacagagtttgttgccaccactgagagcaccacagagaccaaagaacccaagaaggcaaaaagggtgaggaggaagaaggaagccccactacatgacaaagaaatgcagcatgaggggatgcagttagacttcagaaagaactacctcaacatgggggccgatcccagaatagggaggatgatataaatagtcctcaggagtcctcaggactttttgaggaagaactatatcttactggttgtgggatgctgatgtggataaggcccaggaaggaggtgagctatatgattaggctgtaaaactgcaggagagaggcaggccaggagatgaggaaagcaggtgcataaaagatgggaagctacaatgccaaatgctggtgattaaatggatgctcttcctgggttgggggacccaaggacctcaggccacacatcctcccttgagggtttgctcaggaccagctttttgcctgggcctaggagacatttgcttgcggtgggcagtttgaggctagaagcccctgctcacttctcttgaagccccaccagaggcaactcctgccttgggtgccatataccatcccctcaatctgccctaggactcaggggaccaagaaaaataacatctcatgcctttaatcccgaggtgagagtttttgttgttgttgttgttgtttttatcatatctactttttcttgaaacatctctggcatttagcaaagttagaacgagttattcctgggacagccttcccctttaactttgtggtgccaaaaagctacctgtctgggctggtggagaaagaaaaacatacaccaccgtggttgaccccagcctaggccaccttgcccgtggactgtgtgggcagcttccggggacaggcccgggcaacagaggcggttccactccgtgtgtcagaaggaggtagtgagacagaagaagatatttttagaggctgcaactttccatttctcaaaatgcgtccttcttggtgagcatgggggctgggatgagaacagtgggccccaaaggcttgtgttgcttggaccaagatcacgaattcaggacattaagcacctcccctcccctgactccacccactgagccagtgcccccaacactgatgcctctcctcttgccccttagtcatccaaggaggaagccgagatggcctacaaagacttcctgctccagtccagcaccgtggccgccgaggcccaggacggcccccaggaagcctagacggtgtcgccgcctgctccctgcacccatgacaatcaccttcagaatcatgtcgatcctggggccctcagctcctggggaccccactccctgctctaacacctgcctaggtttttcctactgtcctcagaggcgtgctggtcccctcctcagtgacatcaaagcctggcctaattgttcctattggggatgagggtggcatgaggaggtcccacttgcaacttctttctgttgagagaacctcaggtacggagaagaatagaggtcctcatgggtcccttgaaggaagagggaccagggtgggagagctgattgcagaaaggagagacgtgcagcgcccctctgcacccttatcatgggatgtcaacagaatttttccctccactccatccctccctcccgtccttcccctcttcttctttccttccatcaaaagatgtatttgaattcatactagaattcaggtgctttgctagatgctgtgacaggtatgccaccaacactgctcacagcctttctgaggacaccagtgaaagaagccacagctcttcttggcgtatttatactcactgagtcttaacttttcaccaggggtgctcacctctgcccctattgggagaggtcataaaatgtctcgagtcctaaggccttaggggtcatgtatgatgagcatacacacaggtaattataaacccacattcttaccatttcacacataagaaaattgaggtttggaagagtgaagcgtttttctttttcttttttttttttgagacggagtctctcactgtcgcccaggctggagtgcagtggcgcaatctcggctcactgcaacctccgcctcccaggttgacaccattctcctgcctcaccctcccaagtagctgggactacaggcgcctgccagcacgcctggctaattttttgtatttttagtagagacagggtttcaccgtgttagccaggatggtctcgatctcctgacctcgtgatccgcctgcctctgcctcccaaagtgctgggattacaggcgtgagccaccgcgtccggcctctttttttcttttcttttttttgagacaaagtctcactgtgtcacccagactggaatgcagtgacacaatctcggctcactgaaacctctgccttccaggttcaagctattctcatgcctcagcctctcaagtagctgggactacagatgtgggccaccatgtctggctaattttttttttttttttttttttttgtagagacagggtttcgccatgttgacgagactggtctcgaactcctggcctcaagtgatctgccgcctcagcttctcaaagtactgggattatataggcatgagccactgagcctggccctgaagcgtttttctcaaaggccctcagtgagataaattagatttggcatctcctgtcctgggccagggatctctctacaagagcccctgcccctctgttggaggcacagttttagaataaggaggaggagggagaagagaaaatgtaaaggagggagatctttcccaggccgcaccatttctgtcactcacatggacccaagataaaagaatggccaaaccctcacaacccctgatgtttgaagagttccaagttgaagggaaacaaagaagtgtttgatggtgccagagaggggctgctctccagaaagctaaaatttaatttcttttttcctctgagttctgtacttcaaccagcctacaagctggcacttgctaacaaatcagaaatatgacaattaatgattaaagactgtgattgccacca

SEQ ID NO: 44 - DNA, 32742 bp, Homo sapiens
  source 1..32742: mol_type = other DNA
ttacgcatgcgccctggtcaccccgcggtttgtccgcgcctctgctaccccctgcgcaggcgctcaaggagctcttggactccaggttcccgcggctgggagaaaaggaggcggggatccgaagggggaaatgactctgaggcgcccggacgtcgctcggaagccaatcagagagcgtgacgtcagtttggcgcggagtttggcggccggggcttacagtggcgggagttggaggcgataacgatttgtgttgtgagaggcgcaagctgcgatttctgctgaacttggaggcatttctacgacttttctctcagctgaggcttttcctccgaccctgatgctcttcaattcggtgctccgccagccccagcttggcgtcctgagaaatggtgagtaacggtcccaaccgctgctcggagctggcggaattcatttcccccgaaacacacgccacctccgaccagggccgactccaattctgaactcagcttctgagttctcccatggcaagggtaaattagtgttagcagggactactaaagaaagctgtactttcatcccctcgggacacttgtaatcgtaatcgggcttttaaaatcgtaacgtaggcagggacgtcgaaataactgccttccaaggccccttacagcttacatctccattgcgcgttaacgggaaaatgcatgcatttgtgtgtatatgtttccttcaacggttatttgagatgctcaaaactcctaatcattgattaattcattcgtttgttgtagaatcttagtgagcccagctatgtgctataggtatataccagtgaatatgacccgctgttaaggaactcagtcaagcagagaagacaggatatctgcttctaacaggaacaaaatcttattttccccgtttactacacggtcataaaaatttaaattatagagtgaaagatgcctgtaaccacatccgccagagatgacccctgttaatagattgaagtatattattccagatgttttcgacgctagaggtaatacctattattttcagaaatcggatcaaaacgtccagttttttcactttaatggtataagttgaacgtattcccatgttaatacgtagaaatctaacttattttcttacgctaaaacattggcaataagagatttgaggttagatttggatgtcatcaacttaaactttttggtaagtttcagataagggagctaactacccagattaaccttggacagaaataaaatctcactcatgtgaaggtcgactatagccagaggttctttttccccttgaaactatgtggaaaacgaacctgagaagggaatttttatattcagcgatgagtctaggaaaataatattgagaaagagactgagaagtagtccctcaacttcctgctagcagtctgaaactttataccatccttatttatttccctcttagataatctttgtaattatacttaaatgctcctctttctgtctctcctgggaccttgtttgagtaacttctttgtcctctgtttaagagtgacagtacgcacagtggctaagaactctgtctttgaagttaaactgcctgggttttattatacttccacaccttactatatgtgtgttctgggggagctgttcagcctctattttgtgacagattttctcctaattctccatgtgtttacctttcccttccctctttcctattctcaagtactcattcgttgttacataatagtcactgaaattcattcgttattatatgaaatctatagaatcatctcctttcctcttcagtgttggtgttccatccttgaccccttttcttcttctacctactcctttggatgatcacagccacaaccagggcttcttccacttctacatacatacaaccttctgttacttatatagtaagtcctcacttaatgtctagataggctcttggaaactgtgactttagggaaaacagtgtataactaaactaactctaccataggctacttgatataaataagaattgtttcagtggcatattttggtcacacaaacaccaccgaacttctaaagaaagactcaaagtacttttaatattaaatgttgaaataattgtgtgctatacatatatttgagaaagattaataaaaacaggtgagataattatccaagttttggtgtatcagcgagtgacctcggtcatagtggtggtgggctaaatcaaggaataaatgtttgcaaagtgaaaattggaaggagcacctcctaccaccacccaggtcaaaaacaatcacaaatatggcagctcactgagccctttcataccaaatcgtttattgtcattcatttgtatgattattgtaaagtttacccatttttattttacaatgatttgtattcattcattttctgacacacttattccagctcagggctgtgggtgcccggagcctatcctggcagctcatggtacaaggtggaaaccagctctagaccagacactatttcatcacaggaagcactcacacacactcattgtctactgggaccatgtagacacaccagtgaacctaacatacacatctttggcatgtgggaggaaaccagagtacctggagaaaacccctatgaacatgggaagagcatgtacaaactccacacggccaatggcctcaaacaggaattgattttttcctcatgaacagtataacgaaatgacattgtacaaaattatgttattggaagacttcctgtacctgagattcatttctataaaagctgtgtgggttgattagcacctagacggtcaatcccacaagcatctcaaactcaaatacccaaaactgaactcagcttttcccccaaacctgcaatattaccaattttagagagtggcctcattatttaaacctgccagaaacctgagtaaattaaagacttcttcatcttcctcacagttacacattcaaaacatttcgttaaaatctcttgaatccatcctctcttctttatctgttatgattatgcatctttactgtatgctggatgtgttctatttttactattccatttccctaggttgggccctaatgccttcttgtctggattgtaagaagtctcccagatggcctcctagtttgtctgtcttcggtttattctccacattgctgctaatgatccttctaaaatggaaatctgattactcttctgtgtatttttaaattgatatctaaaagtttttattataaacttaaacaaatgcaaagaatataatttctgaccatattgggaatattgacattttaaaaataaaaatgctatatcactcctttaagtgtatctaatataatttaaatactatagtgatttgataatcacatcatccattttttagaaaaatacaaactcctctttatctgctggacattccatatagctgctttttcctcttgaatttatttccatttcatttctcctacagaatttctcctaatgtaatttaattttatgcttgaaaagctcttttactgatcactctgtcatacccttctgtgtcaaaaaatgtgtttaaattgctgttttctgtcataagcctccaagtattaaaacttctttatggattgaattttcaattcaattattagtactatatgattgattaaaacaatatagattaccaattttgataattattaaccaaaagtaaaattttattggaagtccatctttttaaagagatgaatttgggtgtttatggtccctttattgaaggaattatttaattatctcttagttaaggttccaccagtttatttgtttttatttaaaaatatttgatacccaaaagtttttattctttggatcagtgcaaggtttaagattggggcacgggaatgcctttcttttataaagtggaagaaaggaagtgatgaagggaaagggaaaaagtggtacctcaaccttctcagagacatcaggtttttcagacaggtgagttttagaaatgcgtatatagtcatccaattgcttataaatggagataacattttgagaaatgcatcattaggtgattttatcattgtgcaaacatcacagagtataaacacaaagctagatagtgtaactactacacacctaagctatatatttttcctaggctataaacctgtgtagcatattactgtattgaataccgtaggcaactgtaacacaatggtaagtatttgtgtatttaaacatagaaaaggttcagtaaaaataggatataaaagataaaaaatggtaacacctgtggagggtgcttactatgaatgggagcttgcaggactgggggttgctgtgagtgaatcagtgagtgagtagtcagtcagcacgaagacctgggacattatactactgtagactttataaacactctatacttaggctgcattaaattgattaaaaaatactttcttcaataataaattaaccttagcttactgtaacttttaaacttacaaacatcttaaattttttaactttttgacccttgtggtaacaggtagcataaagcacagacacattgtataattgtacaaaatattttatttcttcatattcttattctataagtttttttattttaaatgtttttcttttcttaacttttcaaaccttttgttaaaaactaagacacaataggaatttttaagctccattataatgttgtaagactaccattgtgtatgcggtctgtctttggccaaaatgccattacatggcatatgactgtatatcgtagttgagtacagtagtacctccttatccttgaaggatatgttccaagacccaaccctatgtatgctgtgttttttactatacagacacatacctatgattaagtttaggcacagtaagagattaacaataactaataataacatagaacaattataacgatattctgtaataaaagttatgtgaaggtggcctctcggaatatctcatggtgctatatacttgcccttctcatgatgatgtgagatgatataatacctacaacatgaagagatgaagtgagatgaatgacgtaggcaggcactgtgatataacattaggctactacttccaactatgtgacagacaaagcagcttctatgtgatataacattaggctactactcccaactatgtgacagacacagcagctaagtgactaaagagcaggtaacgtctatggcactgctactctggacacagggatgattcatatcctggacaggtcagggtaggacagtgtgaaattttcttgccactcaaaatggcacacaatttaaaacatgaattgtttatttctggaattttcagtttaatagtttcagaccgttgttgactataggcaactgaaaccacaaaaagcgaaaccacgggtgaggggtaactactgtatctggaaattgagtctctgaaaactctcatgttcttgtatactacttggaatatgtgcatgtaactccaggggcttaagttgtacaatgaggaaataatagctttttccaaatgtgttgtggaggaaagcattacagtttcatgttcataacacaataaggatccaaaagtagcttagggtggttcatcagtgaagtgtgtattgcagggattgcataagtagaggggtaggcaaggaccaatcactcaccattcattggtgtttggatgttaattataggcagtgaggcagagttaaagagtcattgtttaattgtaaaaaattgtaggttttttggagtgtatcatcttcatttcaaccaagttgttcaaaagtcccttttgagtttttattttgcagttgatttttttttttaattccaaaacgtgtatatttacataacctttgaacagaggcttttgtttttacacacttattccgtaggttaatacttgtgacctcaacataactattgcatttttggcgggggggtggggggtggggacggagtgtcgctgtgttgcccaggctggagtgcagtggcgaggtctcagctcgcggcacgctccgcctcccaggttcactctattctcctgcctcagcctccgagtagctgggactacaggcgcctgccaccacgcctggctaattttttttttatgtatttttagtagagacggggtttcaccgtgttagccaggatggtctcgatctcctgacctcgtggtccgcctgcctctgcctcccgaagtgctgggattacaggtgtgagagaccgcgcccggcctattgcattcttttagtggtctttaacagctcctttacaatgatatgtgatgctgaaattatgacgtgatggccccagaactaattaaatttggattaaatttctttggtgcccttctgttgattcattcagattatgtctatgaacatccaaatgtagatttgtctgaggttatgtcaggctaagatgtattctccacatagtacttttgatgaaaagtgaggattcagagtaccctaaaatgtgagtttgttaattatttaagatgctttcaatagattgtaaactcagtgtttcctccaatgcttattgaacatttggttttcagtaattacttgttgaatgaatgtttattttatatatttaaaatgtcttgatcacaaatcagtataataaaaacaaatctctgaagatgtctttactatgtaggagcatagtgcacattagacctctgacccaagcagaataaacttttcttctaccctgagtctcttgttctctgttctaaattcagtgaaaatttacccatctttcaagacctcctgtaaagactccctgacccactaccactagccagggctaattaaatgttttctaggggtaggtacataacacttcactttacaatttctctaatataatttaaggtactataattgctgctattgacattttagattcctacaatttcagcactaaaggaaaacagaagtaaatttggtgaatatgttactggctatagtagctgcattgacatattattttctttggctctttgaccattggattttgtatgatgttctggaataagaatttaattgaaggggatagcagttttaatggaatgcttttgtggttgtctctttggtaggagaagggggaagatctttcttaatatgcagaggcctcttgtttcttctaatctcaatgtactagtgagagtctccattttagatagtaagcccaaagctatacctccccagaagttggaagtgctctttcattttttccttaggactccttaatgaaataacagaaatggtgtcttccatagatattaatagtaagtggatctatgttaatatctaaagtttcttaaggacaaatatttacctctgaatttgttaaaaatgctgaaatgtgatgctgtattggaattctataaggaattatcttgttttaggatggtcttcacaataccctcttcaatcccttctgactggttatcagtgcagtggtaatgatgaacacacttcttatggagaaacaggagtcccagttcctccttttggatgtaccttctcttctggtaagagaattactatctaggcaaggcttggacagaaatgatctatttcacacttatagggaaaatatactagagtatttccctttcaaagaaaagtaaattaggtggatgttagagtttttgtaaaaactgttatcttctgatttataaaatagacttttcttaatctctatacatcattagcataactatatttcctctaaagcataggactattatagcactatttttaaaaaatcaatataaggaaggggttgcaaaggttcagctactatgaaaactgttttatccagtagatacataccctttgatctggttgaatgtatctttctgtgactcattggggaatatatgaacagaaatagaagtacttcagccaggctcagtggctcacacctaaaatcccagcactttaggacgccaaggtaggtctgggcacagtggctcacacttgtaatccccgaactttgggaggccaaggcgggtggatcacttgaggtcaggagttcaaggcagcctggccaacatggtgaaatcccatctctactaaaattgcaaaaaatcagctgggcgtggtggcgcacccctgtaatcccagctacttgggatgctgagacaagagactcacttgaacctgagaggcagaggttgcagtgagccaagatcgtgccattgcattctagcctgggtgacagtgagacttcatctccaaaaaaaaaaaaaaaaaagaaatagaagtatttgtctccacccataatagtttgagaggaaagaaaaagttgtgacaaggaaatttaaaactaatagactccttataaaaattagccgggcatggtggtgcatgcctgtagtcccagctactggggaggctgatgcaagagaatcgcttgaacctgggaggcggaagttgcagtgagctgagatcacgccactgcattcctgcctaggtgacatagcgagactgtctctcaaaaactaatagactattacatagtcatgattgtggtaaaaataagtaaataaaaatatggttaaaaaaactaatagactcagcctgctggcagcctacatcatcatatgcctttgtttgccattggccagtaccactcttgttttaagtactaccctcgatttagcccttctctaaataagagattatctgaagaaaattttggtggttttgagtaagcttaaaaatttttgtagctaggcatggtggctcacgcctgtaatcccagcactttgggaggctgaggtgggtggatcacttgaggtcaggagttcgagagcagcctgaccagcatggtgaaaccccatctctagtaaaaatacaaaattagctgggcgtggtggcgcatgcctgtaatcccacctacttgggatgctgaggcaggagaatcacttgaacccaggaggtggaggttgcagtgagccaaactgcactattgcactccagtctgggtgacagagcaagactccgtctgaaaaaaaaaaaaaaaattgtgttactctatatatttttttctttatttctgctttagctcccaatatggaacatgtactagcagttgccaatgaagaaggctttgttcgattgtataacacagaatcacaaagtttcagaaagaagtgcttcaaaggtaagtctaggtctacaatttttgttttaacatttaaaaaactttacacatcctcaagtatattattatttgaacacattctgttttagtctgtcttctgttgctataaaggaataactgagactgggtagtttatatagaaaaagtttacttggtgtgtgattctgctggctagaatagtagacatctggtgaaggcctcaggctgcccccactcctggcagaaggcaaagaggagcccatgaatacagaggtcacatggcaagagaagggtgtactaccaagctcttttttaacaatcagctctccagggaactaatagagtgagaactcactcatcttttcacctcttagggagggcgttaatctgttcatgagggatccacccccatgacccaaatgcctcccattaggtcccacttccaactttggggattaaattataacatgagatttgggaagggacaaacatctgtagtatatataacacattcccaatgatattaacttctgattaagtctttttagggaccagattagatgtgaatggtggactgcctatctgtcaataactgttaactgtgacaatgcctttactcaaagttaagaaaaatactttttaggattaaaaacaattcttcaaaaagttaaatctttaacacttaatgtgattagagaagtgttgctttaaaatacttatattaatcaagcatttttcatgtttaaagcaaagttctaaccttaagaagctgataatttggaacccataagtcaagtgttgaaataactgaaataaaacaaagactataaatgatgtagaagtagaaagaaaacacactggtgtcaaagagaaagctctcatgtagtaaagaaggctaggaaaacttacgaagcatggggcatttgagttggattatggtatttagaccagtggaaatggaagggggcactccaggtgacgggaaaagcattagcaaaggtctagagatagaaaagcataggatataataggaagtgaccaatttgtttggaataaggtatcgagaacagtgagagatgaggcttgcaaccaagataaagactaaagaatgcaaaatgttgaatgtcaaactaaagtattttacattccattcagagagcatcatgaagttctttttgtttttggttttgttgttgttgttgttgttgttgttgtatttttggtagagatggggtttcaccacattagccaggctggttaactcctggcctcaagtgatctgcctgtcttggcctcccaaagtgctgggattacaggtgttagccactgtgcccagccagtatcatgaagatttttgaactggaatatatttcagaaagattccattgtagagaatatattactagtgaactcatggaaaggaatttgacatcagatggtagtagttctcatgtggtaattaagggaatgtgtaatttctgtgagtccacaaattctctttgctcatgccaaagggtgctgactactgattttttatgtgtgcatctttatttttattattttaagttccagggtacatgtgcaggacatgcaggtttgttacgtaggtaaacatgtgccgtggtggtttgctgcacataccaacccatcacctaggtattaagcccagcatgcattagctatttttcctgatgttctccctctccatgctccccctcaagaggccccagtgtgtgttgttcccctccctgtgtccatgtgttctcgttgttcagctcccacttatgagtgagaacatacggtgtttggttttctgtttgtgcattagtttgctgaggataatgacttccagctccatccatgtccctgcaaaggacatgatctcattcctcttatggctgcattgtattccacagtgtatatgtaccacattttctttatccaatctatcattgatgggcatttgggttgattccatgtctttgccattgtgaataatgctgcagtgaacatatgcatgcatgtatctttataatagaatgatttatgttcctttgggtatatacccagtaatgggattgctgggtcaaatggtatttctggttctaggtctttgaggaagcgccacactgtcttccacaacggttgaattaatttacattcccaccaacagtgtaaaactgttgctatctctccgcagccttgccagcatctgttgtttcttgactttttaaataattgccattctgactgacgtgaaatgatatctcattgtggttttgatttgcatttctctaatgatcaactactgatctttttactactacagctttccaggcatttaaagttatattaatatgggtaccacagaatacaatttagacatttcacatttaccattttctttgtttagaatggatggctcactggaatgccgtctttgacctggcctgggttcctggtgaacttaaacttgtaagtgactttatttcattaggatctgggtaaatactgataagggagtgctttattaaattgtgtttaccttatttttgaaaggttacagcagcaggtgatcaaacagccaaattttgggacgtaaaagctggtgagctgattggaacatgcaaaggtcatcaatgcagcctcaagtcagttgccttttctaagtttgagaaaggtaggtttgtgcttatcttctttcatctccttaaccttctttgcagttgggagataagaacctgtaattgtttctaccctttcccctgtcaaagttactgctttacctacatagatgattaagattctttttttggagacagtttcgttctgttgcccaggctggagtgcagtggcgccatctcggctcactgctacctccgctgcctcccaggttcaagtgattctcctgcgtcagcctccggagtagctgggactacaggcgcacatcaccatgcccagctaatttttgtatttttagtagagacggggtttcaccatgttggccaggctggtctagaactcctgagctcaggcaatccacctgcctcagcctcccaaagtgctaggatcacaggcgtgagccgctgcacccagccaggtgattaagattctaacatgactgaaaaccttaataaaattaaattggttttaggcccactcttctggacattatctctagcttgtccctgaaagtcaagagtctttgataagtttttctgtaatcttgcacataaggtaaagatttataaacagctacaataccattgttcaaccttgattgttcattgaagttaaaaccttgtactgggcactcattaactatttgtaaaacagagttactttaactctgcttgtaaaatctaaatgagctataaggctgataaacaacataatttttttctacctaaaaatttatcatgtatttggtttaaatggcctgttttttgttttttgtttgtttgtttgttttttgagacggagtctctgtcacccaggctggagtgcagaggctcgatctcagctcactgcagcctccatcccccgggttcaagcaatcctctccctcagcgtcccaagtacctgggagggattacaggagcctgccaccacgcccagctaatttttgtgtttttagtagatctggggtttcaccatcttggcgaggctgatcttgaactcctgacctcgtgatccacctgcctcggcctcctaaagtgctgggattacaggcatgagccaccacacccggccaaatggcccaattttctattatgttttcaactattacttaaaattgattttcctatgtttatattgttataatggacaaggaagatttaagagttatataacacagcacagtactgtagcagctagggaaaaacttatcagtggtgtctgaataagctcttcatttctgtttttgtttgtttgttttctccttccatttgtttctcactaaataattttttttaaatggaccaacaaacatttctctcaaaggagtctctgaagtaatctgactttaatctctgaataatagtgacagacattacaatctcctttatcactaaaaaaaaaaaaagtactctgttttaaaaatcaaatgttttcatttattcacctgagccatttaggaggttaagctggtttggactggttttttgtttgtttgtttgtttgtttgtttgtttgttttttgagacaaagtctcactctgttgcccaggctggaatgcagtggcgtgatcttggctcactgcaacctccacctcccaggttcaagcaattctcatgcctcaacttcccaagtaactgggattacaggcgtgtaccaccacgcccagctaatttttgtatttttagtagagacagggtttcgccatgtcggccaggttggtctcgaactcctaacctcaagtgatctgcccgcattggcttcccaaagtgctgagattacaggcatgagccaccatgcccagcctggcttggacttttaagaaagtcggttttaatttactgtggttgcagttgaaactggaaccttgaaggggaaatatggcatgatttttcttatttctgcataactttattaacatatttaagtagttaggtatgcttgtgttctagttttctacactcttgtgtcatagttcactctgagtttgtaaacataattttaagataatgaaaatttacctaactaaagagtagtggaaaacatatcttttggtccttttgcttaatttttacaactctgcatgtgaatcagcctgtgacaatgagctgtagaagaaaaggcactgagttagagattggggcaggtggcttttttcatgattttcagtagttcataggtactctagtgtaaattagtctgatcggatactgctcccaagccctgtggtttgttttgttaaaacagaatagataatagctccactcactccatcagccataagccctcttgcagggcaaacctttgcaactaaacatggaagccctctgttttattctggcctcctgggcaaagtgattttaacctccttgggccttcattttctaattttatgagataaatacctagtctatttaggtcacaaaaatattgtagacataaaagtgaggtgaaatatgaatacttttttttttttaatctgagctcattatggtggctcatccctataatcccagcaacttgggaggctgagaaggattgcttgaggccaggagttcacgaccagcctgggtaacatagtgagaccctataagaaaacagaaaattagcttggtacagtggtatgcacctatagtccgagctacttgggaggctgaggtgggaggatcgcttgagcccaggagtttgcagctgtagtgagctgtgattgtgccatcatactctagcctgggcaatagagtgagacccagtctcaaaataaattaattaaatcaatcgatctatctataatcaatcagaggaccatataaatacttagtgttttgtgggggtttttgtaggtagtatggtagaaaacatctttggtccagttccttccaccctacataggtaggatacaaataatcctaactggacatagtcacactaatggaatttgccttccctaagtatctaccaactaaaagcaaagaaaatggactcagataagtgctttgtgtggcaaaagggcaggtattagaacttctagtggataattaaaattgattataaatttatttcctctcctacaaacttacctatatttacaccttctttctcattcttcattctcaagttttaattaaatgagaatctcttgcaagtgggccaggcatttattttttcaaagttcctcaagggatttcaatgtgtagctaaaattgagaaacattcttgatccttcccaagaccttccaccatcacatgtatccccactaccctgtatcttcaagttctccctctctattggctgtttctccttaggagaagatatttggcctattttcccaaatatcttaaccctgtgttctcttttagttgttactgtttcatattttccatctcctttaatttggtttaatctattttccacatctagccctcttcctgaaatcactcttgctaaggttattaattatctaattatcagaaagcacgaaacttttcaggtcttttcttctgcttgtataatatgttacacttttggtcttttatagaatttcaataaaagtctttgcttagaatctgtgatatcccactccctctggtactccttctgtccttctctttattctttcatagttgcttttacctaggttgaagtgttagcaaggcccaggatttggtgtttagcctttttttgctttcaacctataccttcttggacagtttcatctgtaccagttttgttttgtttttcatcctacttgtgttgacccagatctatattcctagccttaacctttctgcaagtacttcagattcaacatatcaaaaagtgaacccacaattcctccctgaactcatgatttctccctggcaatgccatctttttcctctcctctgatatcatttccttgaacaacgtatttaacttttcttatagtgtgagtctgatggtaataatttaccttagtttttctttacctgaaaatgtccttatttcatcatcattctcgaaggacatttttgttggatatgaaattcttttttttttttttttttttttttttttttttttttttttttttagcccagaggtcctttattttttttttttaacacctattatgccatgaattcatagggaataggttccagcagctcaggctccttcccattggttctcacaaagtgtgcttctctgggtggagcaggctggcgctttagttgaacccaggtacctttctctttggcttctttctttttctgatcattttccttcacacgtttcaggaagctatctcggctcttagaatgcttaatgtgctcaatacgcacattaattctcttggcaagaatcttgcccttaacttgtttgtttacaacaatgccaacagcatgctgggtaacattgtagactcttccagttttgccatggtaacacttgtggggcattcctttttgaacagtacccgttcccttgatgtctacaatatcacctttcttatagattcgcatatatgtggccaaaggaacaactccatgttttctaaaaggcctagagaacatatatcgggtgcctctcctctttccctttgtgtttgtcattttggcgaattactggaagatggcggttccggccgaaaagaagctggatatgaaattctgggtcaacagcttttttttcctttcattgctaaagttgttccactatcatctctgctttcattgagaactctgtggttgttaaaatcatttccctgtatataatatgctgtttttcctgactattttcaggattttttgtctttggtttctagcagtttgactgtggtatgtctagtcatggttcccttcacagttttcctgtttgaggcttgttttagctttttgtatttgtaaattcctttttactgaataggaatttttctatcatttcttgaaatactttttctgggccaggtgtggtggctcaggcctgtaatccaagcactttgagaggctgaggcaggcagatcacctgaagtcaggagttcaagaccagctaggccaacatgatgaaatcccatctttactaaaaatacaaaaattagccaggcgttgtggtgggcacctgtaatcccagctactcaggaggttgaggcaggagaatcgcttgaacctgggaggcggaggttgcagttagctgagatcgcaccactgcactccacactccagcctgggcaacagagcgagactctgcctcaaaaaaaaaaaaaaaagaaatattttttctgcctaatttattcatattctctctcctccctgcttcttctgttaccttaattacccatatatatatattttttttcaattactcatgtatttgacttttctaaattatcccatgcatccttgaggttttgttttttttcagttatcctaaacttaagataaaatgaacaagccataaaattcatccatttaaagtacacggtttagtggtttttagtttattcactaagtcgtgcagctatcaccacaatctaaatttagaatcttttcatcagtccaaaaagaaacttgaacgcattagcagtactttcacccattccttccaaccttatacaaccactatagtaatttcggtctctatagatttgcccattatacacatgcatacaaatggaatgatacaatatgtggtcttctgtgactggcttctttaatttagcctaatgttcagttctatttttctctctcttcttcaaattgaatgatttctattaatttgtcctaaagttcactttctctattttctccagcctgttcttaggcctatccagtgatttttttttttaatttcagatactggttttcagttctaaaattttcttatgttttttttaagacagggtctggcactgttgcccagattagagggcagtagcatgatcataggcacatgccaccatgcctggctaatttctttttgtattttttgtagagatggggtttcacccatggttggtcttgaacttctgggcccaagggatctgtcaaccccagcctcccaaaatgctgggattacaggcatgagccacagtggctgaccttcatttgtttgtttgtttgtttgtttcctgctgagatttatcatctttttattgattacaagtgtatatatttttttcttcctttttttgttttttgttgttgttgttgtttgagacagggtctcactctgtcacccagtttggagtgcagtggcgaaatctgctcactgcaacctctgcctcccgggctcaagtgatcctcccacctcagcctcccaagtagctgaggctataggtgcatgccaccacacccagctaatttttgtattttttgtagagatggggtttcgccatgttgcccaggctaagtgtacgtttctttaactcatttaacatggttatgtatcctttacaaccttatctgataaatcaatatctggattatcttgggattggcttccattgatttattttcccttgagaattattcgttttcctggctctttgtaagtcaagtaatttaagattatattcaggacattgcgagtggtatgttggattctagattctgttatattgcttagaaaagagttggtgttccttttttaacaggcaattcacttgtttggatccaaattgaagactgtcacacctacaggagggcagtggatcttatctcaattattttctttagtttaagcctcagctgcaaactgctttcagtttctcttgcccatatggtacaggggtcagccagagacttggactgagtttaaacacggaatcatgggttccctttctctagctgtctccaggttttccccatcccctcactctctgactgttcttgttgctcccagtctccttttccttgttcttctggcttgaaagatggcagattttttaatttgcattttagctgcctggtattaatgctgcaactttggctgtcctcaaggtaaaaccacacacacaaaaaaaaaaaaaacaccaaaaaacccagtaacttaatctcaggccaatcatttgctaaagatgttgactctcctccaaaaattgcatgtttaagaggaaagtgggccaggcacggtggctcatgcctgtaatcccagcactttgcaaggctgaggtgggctgatcacctgaggtcaggagttcgagaccagcctggccaagatggtgaaaccctgtctctaccaaaaatataaaaaattagccgggtgtggtgacacatgcctgtaatcccagctactcgggaggctgaggcgggagaagcgcttgaacctgggagacagaggttgcagtgagccaaaatcgtgccactgcactccagcctgggtgacaacgagacaccacctcaaaaaaaaaaaaaaaaaaaaaggaggaaagtggtaacttaaagggaggagtaaattttatccccaaacaacagtttctattttaggcggagtaaattccaacaaaaggggaaaaatgaacccgagtgacattctgtacaaccaaagctgttaaaaggaatgaatagtgcctgacacttaaaaagtgctgaattagatgaatggtttcaacatggctgactagatgcatctggtactcacctctttcacagagtggaaccaaaatagtgagatattatagtgacagtgagatcgtagataatcacccttcaaatagatcatctaagagagaacactgggattcaacagagaagtgataagaagctccggaagcaaggaaggagagaaaagtaaagcagcctgtttggctgggatcagctaggaatctggagaggcttcctatgcagggacagagtaagtgggagacccccagcagcccaaatacccactgtgaaccctaataatagccatgggagaccccttgatgctcacggaccctgagactaacatagggagctgcctggagacttcatgaaggcattgctccagagagatatcatactgggtcccacaaaccctcaagtcctaagcagctgtaacactgattttcagagcccagcccccaccagactgtgtcctgccctgccacccaggctgaattgggagccacacacagcgacctcattcccctgagtggaggggcagctgcacattttcacactccccaaggacaaattccacttcctgcaaccaccaccactctgggctgctgcagggcagaggtgtaagcaaaactcagtcgtttaactgcctgcctatgggtactcccagggaaagcaaccccactctgcatgtcagtactgcagcatagctgctgctgccccttacctgagcattccactggaagcctggggatcaccccacccctgccttccatagccagcacctgcatgcaccaccagggtcactgagggcagttccacctagcctggcttcatacacgccactacccaagcacaccctctgggaggcctgaggattgcccagttcagttcatcaccagtggtgcctgagcactcctcctagagtctaaacttgggcctactcaatctgctgctaccaccatagctggcaccaacctgtacatgcaacctgcaagtctagggactggcctgcccaacctgtcacagccaccgccaacactagtacggaacacttgggttccaggggattttttcatcactgctactgtcatcatccacaccactccacacctcctgcccaggggctcaagaatttgcccacccacctggcccactgctgccatttccaatacctgagtaagtcatctgaaggcccaagaatctacctgcctggatccattaacaccagtgccagcgtatgctgccttggggccaaaggacacacaggctcagaccactgctgccaccactggggcctgaagactggcccacctggtatttcaatttctggcaaaacttaaccagtctgcactaaaaaccacactctaatctaccaacgaaaccagataccaatgactctatggccaaaagaaatgatagagactatgctactgcttgcatccagaaccaaagccaagtgtcctctccaaccatcaccatagatacatcttcaggaaaatgttctccactacaaaccaaattcaaaaaattggaaaaagcaactgttacaccaggtgcacaaatatcaacataaaaacacagagaaatcaaaaagcaaggatatgtgacacatccaaaggaacacagtaattcttcagcaacaaatcccaatcaaaaaggaattctcaaaatcctggaaaaatgatccaacatactgatactaaggaagctcagtgagagaaaagagaattctgaaagacaatacaaagaaacagaaaaataattgaggaaatgaatgaggaatctaccaaagagataggtatcataaaatagagctaaattctggaactacagaattcatttaatgaaatacaaaatacctttgaaagcttcaacaatagactagatcaagcagaagaatcccagaacttgaagatgttttgaagatcttttaaaataacctactcagacaaaaatagagaaaaaataataaacatgaatgactaaagctttcatggcatatgggacactataaagtggccaaatatatgaattttcagtgtcccagaaggcaaagataaaatgaaagggttagaaagcctatttaacaaaataataggtgaaaacttcccaagtctagcaagggatttatatatccacatacaggaggctccaagatccccacatggatataattcaaaaaggttttttttccatggcacattgtagtcaaactcaaaagtcaaagacaaagtgaaaattctaaaagcagagaaaaaacatctagtcacctataaaagaaaccccatcagacctaacagcagatttctcagcagaaatcttatagttcaggagagaatgagatgatatattcaacatgcttaaagaaaaaaaaaaaaacctgccacccaagaatactacacccagtaaaattatccttcataaataaaagagaaataaagtctttcccaaacaagcaaaagctgaggaaattaatcaccagtagatgggccgtacagaaaatactaaaaggagtcttataccgggaagtgaagagcaatatttactgtcatgaaaacacaagaaaatataaaaactactggtaagcaaacacacaaacaagaaagaggaaaggctgaaatgttaccactaccgaataccatgaaaccataatgataaaaagtaccagagaaaggaaggaacaaaggatatacagaacaaccagaagtcaatcaataaagttaggaataagccttcacatatcaataacgttgaatgtaaacatgttaaactttccatttgaaaagtacagactgggcaaatagacaaatgtgacctaattatatgctgcctacaagaaacgcatctcacctgtgaagacaagtataaactgaaaataaaggaatgtaaaaagatactacatgcaaatggaaaccaaaagcaagcaagaatagctatacttacatcagataaaacagactttatgtcaaaagcagtaagaagaaacgaaggttattctatgatgataaatcagttcagccaaaggatatatcaattgtaaacatgtatatacctaacactggagcacacagatatataaagccaatactattagatctaaagggagagactccagtgcaataacagttgaggacttcagccaccccactcagcgttagacagatatctagaaagaaaattggatttaaactgcacattagaccaaatggacctaagagatatttacagaacatttcatccaacagctacagaatacacattcttctcatcagcaaacagaatattctccaagctagaccacatgttaagacacaaaacaagtctcaacacatttttaaaagttgaaataatatcaggaatcttctcagaccacaatggaataaaactagaaatcaacaacaaaaggaagtttggaaactacaaatacgtggaaattaggcagtatgattatgaatgacttgggtaaaggaagaaattaaggaaatttttacaattcttgaaacaaatgaaaattgaaacccaacataccaaaacccatgggatacaataaaagcagtactaagaggaaagtttatagcaatacacacctataccaaaaaagtagaaagactttaaaagaatctaacaatgtacctcaaggaactagaaaagcaagaacaaaccaaaccccaaattaatagagggaaataataaatagcagagcctaactaaatagagacttaaaaaaacaagaaaaagggtcaacaaaacaaaaggttggtttttggaaaagataaacaaaatcaataaggtacttgctagactaaccacgaaaaaaaagaaagatggtcttaaataaaatcagaaatgaaaaaggaaacattgcaactgataatacagaaatacaaaagatcatcagaaactattgtgtacaactatacactaactagaaaacctagaggaaatggatagattacaggacacatgcaacctaccaagactgaatcagaaagaactaggaaacctgatcaaatcaatagtaacaagatcaaagcaataataaaaagtcttccaacaaagaaaagttcaggaccagatggcttcactgctgaattctaccaaacttttaaagaactaacaccagttctcaaactattccaaaaattgaaaaggatgggaattctccctaactcattctacaaggccagcattattctgataccaaaaccagacaagcacaaggacacacacaaaaaaactacagaacatacggacatagatgcaaaaatcctcaacagaatactagcaaactgaattcaacagcacattaaaaaaaaaaaatacaccatgatcaagtgggatttatcccaggaatgcaagaatagctcaatatagacaaatcaataaacatgatacatacgtcatcaacagaatgaaggacaaaaaccatatgatcattttagtagatagagaaaaataattcgataaaattcagcatctcctccgaattaaaaaactcaaccaactaggcatggaaggaacatatctcaacataaaaaggctgtatatgacagactcacagttaacaccacactgaatcgaaaaaagctggaagcctttcccttgagaactggaacaagacaaggacgcacgcttttcaccactcctattcaacatggtactggaagttctacccagagcaatcaggccagagaaagaagtaaaaagtatccaaactggaaaagaagttgtattttccttggctgatgttatgatcttatatctagaaaaacttaaagactctacaaaaaaaaaaaaaaaaaaaaaaaacctcagatctgataaattcattaaaagttgcagaatacaaaatcaacatacaaaaaaaatagcatttctatacatcaataatgaattagctgagagagaaatcaggaaggcaatcccatttacaatagctacaaaaaaataaaacacttaggaataaatttagccaaagaggtgaaagacctctataaggaaaagtatgaaaccgatcaaagaaattgaagaggagacaaatggaaagagacctcatgctcatggatgggaaaaaattattatttttaaaatggccatactaccccaagcaatctacagattcagtgcaatccccatcaaaataccaacatcatttttcacagaagtagaaagaacaatcttaaaatttatgtggagccaaaaagaacccaaatgccaaagcaatcctaagcaaaaagaatatagctaatataataactaaaacagcatggcataaaaacagacacagagaccaatggaacagaatagagaattcagaaataaatccatatatttacagccaattgattttcaataaaggtgccaagaacctacaataaacggtgctgggaaaactgggtatccacatgcagaagaatgaaactgtacctctatctcactatattaaagaaaatcaagataggccagacatggggctcatgcctgtaatcctagcactttgggaggccaaggcaggtggattgcctgagctcaggagttcaagaccagcctgggcaacatggcaaaaccccacctctactaaaatacaaaaaattagcttgacgtggtaggcgcgcctgtagtcccagctgcttggaaggctgaggcatgagaatcgcttgagcacaggaggcagaaattgcaatgagccaagatagcaccactgcactccaccctggttgacacagtgagactcagtctcaaaaaaaaaaaaaaaaaatcaagatggagtataaagacttaaatgtaagacctgaaacaatagaactactagaagaaaacatagggaaaacacttcaggatattggtttaggcaaagattttatggctggccaagaactcaaaagcacagacaacaagaacaaatagataaactagactatactaaactaaaaagcttctgcatgccaaaactttttgaatgggaagtatttgcaaactatttatctgataagggaataatatgtagaatgtatacaaggaactcgaacaactcaacagtagaaaagacaaaatattaaaaagtaggcaaacacagactgggcaatgtgccaaaactgtctctacaaagaaatacaaaaaaattaactgggcatggtggtgtactactgtagtcccagctacttggtggggctgagatgagaggatcactgagccctgagcggtgattacatcgctgtactccagcctgagtgatagagtgagatcctgtctcaaaaaaaaaaaaaaagtaggcaaagaccatgaatagacatttcgcgaaagaagacatacaaatggccaacaggtatgtgaaaaactgctcaacatgactaataaccacagtgagatatcatcttaacccagttagaatggctattattaaacaaaacatgctggcaaggatgtggagaaaagagaactcttgtacactgttggtggaaatgtaaattagtccagtcactatggaaaacagtaagatttctcaaaaaaaaaaaaacaaatagaattaccattgatctagcagtctcattattgggtattgattcaaagacaaacagtatatcaaaggaataactgcagtcacattgttgcagcactattcacaatagccaagatatggaatcaacctgtctattaacgaacaaatagagtttttaaaaatgtagtatatacacaattgaatactatttggccataaggaaatgtcattcacatcaacattatgttaaacaagccaggcacaaaagataaatttcacatgttcccatttatatgtgggtgctaaaacagtatcatggaggtagagagtagaatgataaataaccagaggctggaaagtgagtgggtgtgaggggggaatgaagaaaggttgcttgatggatacaagcataaagttagatagaaggtgtaagttccattgttcgatacctgactattgtcaccttacaaattattgtatatttcaagcagctagaagagagaacttaaaatgttcccagcacatagaaatgatgaatacaaggtgatggataccccagataccctgacttgatcataacacattctatgcaggcatcaaaatatcacatataccccataaatatgtaaaatactatgtatcagtaagaaaaattgcatgttttcattcagtttccacagagccctcaggtagctgtttttgtgttttatcccatgtacaactaatgcaagtggattagtttaagtgctcactctttcacacaggaagcagggtttttttctggcttaattttaaagaataaaacattacagataaattgaagttctcctatagtgccttttccaatcccattgcatcccaggcaacctctttaacaaacttcatatggatctggtccatatttttatactgagccaatacagtttagaggtttggagtgtaagctctggattcatactgccaggaatacctttacaagttacttatcctctctgtgcctctcttggtacttacctaataaggttgatagcaaggattgagataatttttataaaacacgcgggatagtagctaacatttagaataagaagcactctgtattttgactcttgattgttattcttattacaactgtactatatattttatatgggttttaaaaaatttacagaggggtgattctatgaagttttggttcaacattagcatctcaagctcttcataatcctttttcctatttgttattgagccatatatttttaaatgtttgatctccagtgacagatacagtacctagcacataatagatagtctacaaaatgtaaactgaaatatatgtgtcattgactggttttgttaacctcttaataatctgtttatttccccacagctgtattctgtacgggtggaagagatggcaacattatggtctgggataccaggtgcaacaaaaaaggttatctagatctattttaattttgagagatttgggattaccctgtacttaattttgagtgaaagagttagtgatttcatctgattaccaccagggggcatgtactcataatttcccatttctgctcactgttccagatctcaggatcttcactgagtgtcctgagtgataaatacatgagtgtcactgttacaagtattacactcatgtatttatctcatattgtcttctgaattataatgccatttacccacattattgatggacttaaaaatattaatacgcagcctcactggtaaatgtctttattttggtttttaagaattttttttattttattattattattttttttttttttgagatggagtctctgtcacccaggctggagtgcagtggcgtgaacttggctcactgcactccccacccgctgggttccagcaattcctctagctcagcctcctgagtagctgggattacagccacccgccaccatgcctggctaatttttgtatttttttaatagaaatggggtttcactatgttggccaggctggtctcaaactcctgacctcaagtgatctgcccaccctggcctcccaaagtgctgaaattacaggcgtgagtcaccaggcccagcctgattttaaagaattagattgaattaaacataagctcatggttgtctcatgatgctattaagcagacgatgattatctcactgttcacttttagttaatttattaaaatttttttttgtgtctgcattttaaaaaattggtaacatagttctacatattttcaggggtatatgtgatatcttgatacatatatagaacatgaaatgatcaaatcaggataattgggatatccatcacctcaaacatttatcttttctttgtgttgggaacattacaattcttctcttctggttttttgtttcttgttttttttttttttggagacggagtctcactctgtcacccaggctggagtgcagtggcgtgatctcatctcgctgcaacctccgcctcctgggttcaagtaattctcctacctcagcctctcaagtagctgggattacaggtgcatgccaccactcccagctagttatgtatttttagtacagacaggatttcaccatgttggccaggctgatctggaactcctgacctcaggcaatctgcctgcctcagcctcccattcttctagctattttgaaataaataataaaattatttagaaaaattttaataaaccttattttgtagagcagttttaggttcacagcaaaactgagcagaaagtacagagagttcccatatagcccctgccctgcccacacacagacttccccactgacaacatcctgtgcctgagtggtacatttgttataatcagttaacctatgtcaacacatgctgtcactcagagtttataatttacatcagtgttatatattcttagtattacacattctgtggatattgacaaatgtgtaatgacgtgcgtccaccattgtagcatcatacacaatagtttcactactctagaaatcctctgtgctccagttattcatccctacctccctctaagccctggcaaccactgatcttattacttcccccagtcacatttcctccatgtcattttatggctttatcaagctcatttctttccagtgctgaataatattccattgtctggatgaaccaaagtttatccattcacctactgaaggacatcttggttgtttccaagttttggcaattattaaagctgttataaacatctctccctttttatacattatagtctcaccacaggagatgtagtgcagctggctctgctggcttctaatttcaccaacttggtcaaaaattacttaatattgaagttttatttacacatgttatattcagcatgtaagaatcctgaaacctaaatttccttggaatatctttcagatgggttttataggcaagtgaatcaaatcagtggagctcacaatacctcagacaagcaaaccccttcaaaacccaagaagaaacagaattcaaaaggacttgctccttctgtggtaaggttttacagatgtatacatgtgtgcagatcttatctgtaggatagaataaatgggaggctattgattaagtgaatgagaatcttcatgattctcatttgatatcagtggtttattgcttattcagtacctacatttgtggttctcaaattttaatttttggttcttctgaattataatgccatttacctatattattgatggaattaaaatatatgtagcctcgttgataaatatctttaaatttattttggttttaaagaattagattgaattaaacataagatgttgtctcatgccattaagcagaaagtggtttttttttttacaatttcaatatctacattttaaaaaattgataacataattttacatattttggggggtacactatgtataatgatcaaatcagggtaattgagatagccatcacttcaaatactgtgtgcatcagagttgcctgaggcacatgttgaaaattcaccttactcatccctaaaaatctctctacacacacagacacaaacacacacacacaaacacacccctatagtatagtggaattcattaggaaaagtgggggaggagtagtttgaagaagcatattaagtactgtgatgcagttttctaaggggaaagaatacctgttgttttcgtaatacaaactacagaaaaatatgttttttgttttgagacagagtctcgctctgtcacccaggctggagtgcagtggcgcaatcttggctcactgcaagcaccgcctcccaggttcacaccattctcctgcctcagcctcccaagtagctgggactacaggtgcccaccaccacgcccagctaattttttgtttttttagtagagacggggtttcaccgtgttagccaggatagcctcaatctcctgacctcgtgagcctcccaaagtgctgggattaccgatgtgagccaccacgcctggccagcttatttttaagcatttgacaaaatattgttaaatatattgagaaacacatgggtagaacatagtaccactctaataacttacagtcagagctcaaacaatgcccataatatatcctttttctttaaaaaattgccctttttctcactttaatgtaatttttttttcatattcctggtgtgtagggtacaagttaatattttgggggaagtatgactgctaagacattaagacttaaaactatacaccgtgaacaggacacaagcatgaatggaagcagatagtagaggccatatgaagttaaaacgagtagcatttcagacatttaatctggttctgagccaagataacttgttaagtaatagcaattaggaggtacgactccactgggcctctttttcagggcatgaaataatcttttattcataattcttttgatactcctatatgataatctaggtagacagcaacattttagagattaaactggcacaagaaagttaaataagtttcctaaggatacacacagcatattagtagggctgagtctaagtagatgcagtaggctcagacgagcaaaatcttttagtcaccagtttgttttttgagtataagttgaaatattaacactgtatactaaaacttaatgatccttgctaaaattacctcttggtcagcatatatatctgatcgagatcattagacaagacttcatctaagtcagtctggggagaaaagtcgttttttagcaccttgttcccttgatggtaaagattatgatgcccaagatagaatcttcttcttttcttgtgctatcaggatttccagcaaagtgttactgtggtcctctttcaagacgagaataccttagtctcagcaggagctgtggatgggtaagagtctatttcttttttcttccgacgagatcttttttatgagattgtgatgaggcagtcacatagtctcattataattgaatgtgtgtgctttcaactgtcaacatagcaagtaccccaactgaggaaaggagctatagatcacattggaaaatacctagttgaaggactcttgctggataattaaatgaaagaatacatgtgtcacgcttagcacattgtctagcacataagagcagtggtagctgctgttgctatcttagaaaagaagctggctgggtagcttgcttgccttatgcaatataatttagtcactaattctcattttgaagagtaaaatttctgttactttgggttttgtctttttcaggtttaagaatatcctaaaagaagaaatctgattctggggatgtaattgacatttctgggagtaatctaactagattgatgatagtaaggtctaatgactttcacatacctgtcatccatgattagtctgaattcttggcttccaaataagtctgctctgtgatgcttgttgattgtgttgtagaatattaattctatgcaaatggagactctttctttttaagtttccttcctattatatctctcaaggcatccttctcttaaaatttttaatttaaaagatgatggcttaccaaactaggatttccattgtgtcctctgggcactaaaaccctctgaaccaaattctcaggcaggaatgaaggattatctaaaggttattagttctgcttgtgaatgactgtgaaagcttgctctgtttgtttccaagaatactgtcatttcatagcaggtctgtgttttcaagttacctttatactagaagtagaggattaagacaattatctcaatagatgaaatgaaaaaatactttatttcacagaacaatttgtttagattatttaaagagttatgtatggagatataaccacagggacagaacttgctacttatgatatcaaaaatatatgcagaatattaaaggcttaggaagtgtattttctaaaaacaatggaacaattactatcggcactcaaccttcatcttccttttccgttctcttagagtaaactccagtaacccatcactgggtcaaatcacatctgtttccgttctgtcagaattataagcctgatattggagacaacagtataagatactttaatttgtttcccaatgaaatatccttactgtacctagttaatgtgccagaggagttagattaaaagtcatttcacatttagtgtagttgaagttgtttggggttggaagaaggtctacaaaatatttatttgccttggtttttaggataatcaaagtatgggatttacgtaagaattatactgcttatcgacaagaacccatagcatccaagtcttt

SEQ ID NO: 45 - DNA, 32742 bp, Homo sapiens
  source 1..32742: mol_type = other DNA
agaccagaagcgggcgaattgggcaccggtggcggctgcgggcagtttgaattagactctgggctccagcccgccgaagccgcgccagaactgtactctccgagaggtcgttttcccgtccccgagagcaaggtgagcgtcctgactgggtccggatcctggccctggcggcgggcggtaggcggcgggcggcgtgggggtgccgctggctttttgccggcgggtactgggcggggaggcctctgggatcactctcccggccctgtaggtgccggggaccgccccctcccacccgaccgaactggagaatccgccccgggatgtggttcgtaggggtgtctgcgcccttctgctcgggttcaaactggtctcggattagtgtcccagaccctactcggtcacggactcacactttaggggatcattttcttcctccgtaaaagaattggagatgactaggtatttccaagccgccttcccagtcccgtaaccaaccttattgaaattcaggccctggtcctttgttttattgagtagatgtaagcttgagttttgatctggttggcgacgtggggtgcctatggttagttacgcgagcatttctctttcccctctcttcttcctcccgtccacatttttttttttctttttttaaatagagataggcctccctatattgcctaggctggtctggaacccctgggctcaagggatcctcccgccttggcctctgtaagtgccaggattacaagcatgagccactacgcccggtcctcccttccacatttatttgaacgcgcctgtgtgcccggctcggctgtgtaatgaggacccagaaataaaaggcatgggtcgtgtccttgagcctgacctagaggagaaggcagggttatcattctcagacccagccttggtacagtgcacggggactctggctttttggaggaggtggggaattctgacaacgggaaagcagtggtggaggtggggcaggaggaggtcacacaagagcttccttggggactaagggactgggtagttcgggcatgaagagtgccctccacgtatttaagagataaagatacagcattttctggaaaggacaatagtcctgcaagtcctccatgcaggaaccttcatccagggcttttcttcactccccacctcgattccctgttcctcaaaagtaaacttctgggtttatttttttgttcttttgccccaatggcccaatacaggtggctgatagctgatcccttaatgggccaaaatctgctctaatcacagttagcttggtctacatctatattgttctctatcttagactttggaatggaaaagcattcagcttgccagtcttctttatgtttattcccctcattttctaatcatctttctaaattgctcctttttatattctgttggctatagcatcttgatgtaatgatttcagttgctggctgaattgtttagggcaattacagttgtgtgtctctgggtacagttctttgactcctgacaaactagattggaatggaggatattgagacagggtcagttgtcctttgttggttgagaggcatgtgactcctttcagtagttttgggataaatgggagtggaatacaagatgctgtgttccaagaactgagagctagaaaaaaaaacaaaactggtagcaaaacacagctttccagggctttgatatccaacttatatgttgtctaagacctttgcttctccctcttaattttttttattgttcttagtactttcatgaactgcttattgttttgataaaaagtttcattgataaaatcgattgaaaaaaaccattaaaatggccgttaactttatttagtaaaaaaacaaattctcaaactcttgcctaagtaactggaaaatgaatgatttttctttttgtttatgttctgaaggctaaaataaaggaaagttgctatattttcttccagctgatttctatttcctaagatgtggctgagaaggaggtaggccacttcaccctttgtaccataggctgaaatatacaagtgaaaaagtgtttttaaaaagtatgtaatagctaacatatatggaaagcttaccaggaaagcttactgtttctaaggccttaggaagtcaccatcattattatcctcattttacaaacaagggaaacaaggcatagagcagctaaataacttgcccaaggtcatacatccgtaagtgcctgagctagaagaatccgctttgtttttttttttttttaaattttaaatctttaatttctgttttcacgtattttcttcttgcttccaaaaggaaaggagtgcgtagctctgttgcctgtacatcgtccacagcccctgggttggagcggggtcccctgggccgcccgggggtccacatgcagcccctggggggccggcgcggggtgaggtccgggggctgccttattgctgaggtctggccggttggtgccgccgctaggcgagctggctggcagctcctgggagatgaagcgacgcaggccctccaggtactggctgtagagctcgatgtcgttgtgcctggtgccctccacccacagcggctccaccgccttggggcagcgctcgtagagcgccagcccgtgcgagaagtcgatcacctcgtcctccgtgccgtggatgatgagcacgggcgacgtgatcttggacaccttctcgatgttagggaaggcgtcgaagcagtaggtcttcttggtgtcggggaaggcgacgcgcatgcccgaggtgagcggcgaatgcagcaccaccgcggcacactcgtagcgcgaggccaggtccacggtgggcaccgtgccgatgctctgcccgtacaggatgatgctgtccgggctgatgccgtacctggaggcgccggagcagggtcagccgcggcctccgacgcgcgcgcacccttcccgccagcgggcgtccccgggcccagctccggatgcgaccctccagtctccccactcagccaagtcagtgggtcaggcccaggctccacaccagtcccgagggccacccccagccctcaacaccgcggcggtgggcgaagccagcggccccaccccgttccctggcgctgccgttccctggcgtttcctagctaggatctgtagggatcccgcctacggagtggccctggggcggaggtaggggaggccctggcgcctctcctcctgatcacccctaggtgcacactgggaactgtgtgccccccacatcctgaatgcttcacgccttcctgcccgggttagaaagccgttcctggtgcactggccaggacagcggacactcttcctccctgcagcccttgcccacccccttggccatgaggaattcaggcagctgtgtccccaaatgtctccacccaattttggactctcggagtccccacgcccaatgagatgccagtgcaacccaggtcagcatcgagggtcgtggctgcggaggtggcaccccctcccaccagcaccttcccttgggagtggacaagtcctcggccacctcagcatcaccagctcccacccagggccacccccacccccaggtcactggtgtgcagcccgtgacccagctgatccagcaccagttacaaggcctcctcgtgcccagtcccaaccacgcgggacccacctgccaccctgcccatgccgggaccccacaactctcctcccacacgctccaggctctgatcccaggcagatgccctcttgcaaggcaggagcatgggcaggtgtgcgtcccctctgcctggcattcggactccaccagcagggctgtccccctccctggcctggaatcccagcctcctggcagcactccacagctcgccactcacccatgccccaaaggatgctgcctggcttgtgcctgtggccccagctctgccttagcctccctggcctgctccctggcagccatggtcagtagtgtgctgagccagcccagccctgtcacctgctaccaggcaggagcccccagctgccacctggatgtcaccactcaaacgaacaggacacatccccagtggaggccctgggcatgctctggcctccccctcacagctctgggcctaggttcctgcaggacaaagtggcagcaggacagatggccgagcagacagagctcagagctggccatggcgggtgtgactctgccagtggcccaggcagtagagacaggaggggccgaggaagtcgcatgaagtggttggtgtcagcgccccacactgctgggaggcccctggagccagggtggtgccaggggaccagctcccaggcccacagcagggactgcctgcaatatcaccaaggcaacgaggaccccacctccccagggcctctgacttctcagagctatgcctggtccctgcgggagcaggtcagaccagtgggctgggcagggccaggacgagacagccccagtggatggcgagcaggaaaggtcaccagaggcccacccgggtctcctcatccaaagcagcactggcccgggcggtgctcaaacaccagtgaaggccccaggcaagcgcagggctggggacctggatgactaggagggctggatctggaatggaggctggcccagaccttggatgtgtgctgggggtctgcacctgaccctgcaggccctgccccaggatggccaagctccgcagccacagggcctcatgggccaggcctcgggacctggatgcagcagcctcgcctcacttggccccaagtgctgcctcggccgatggggccccagccacacgtgcacagacccccagacaccacccactccctcccgccgggtggcatccacgcccctgtgacaagctcagccccttcccgtcctcaggccaggggttcccagggagcctggctccacaggccagggtgtggaaggaccgcctggccacacctcagccatgtggaggctgcacctgcacacccaagctcgcctgtccggctctctggccctgtgcatccactgtggctcccctcctgcagagccgcccaccttcctcccagggaagcccgccccccggcccccggcctggtcccctcttgggtgtgcccaggctgagctgcccccagggttgccctcacctggtgcgcagggcctgccaggcggcgtcgatgtcggcatagaggttcctctcggaaggcctacccgagctggcaccgtagccggagtagtcgtaggagaagatgttgcaatggaggcgggagcccaggccaatgtagaagctgctcatctggcccaggtccacggcattgctgtgcgagaagaggaccgtgtacctggcaccagtcacgcagcgaacatacatgcaggagacgcggttgcggcgggcgctcttggtggggaagacctcaatggtgtccagctcgcgctggctgtactggaagtcggcgcgctccgtcaggtgcagcttccagcgcccgggtgcgcccgaggaggcccgcagggtccccaagggggcggccccggccccaccaggccccggctcgggctcagtcaccaaggaataggtggcctccggcggcaggaaggcgagcttggcagcgatgcggccggggcagggcgggcagcagaagaggcagcagagctcactcagcgacagcccgttcatggcgggcgccgcccgggccaggcccccaccggggccccagccaacaacgccgcccggcctggcccggcaggggaggggtgggggtgctccgagtcgcgggcaggggggagggcgcccccccagctacggccccagacggcagccccgttaggaggccagggcccagccccatcgcggtccaagccgagccccagggagcctcgcaaccacaggtctccatgtcacgccgtgggaagcccaccccggcccgcgcccctgggccccagggccgcactccatggcgcctggccgcctgcccgtgcgtccgtcggtccctccgcgccccggccggcctcctgcatcgccaccgccgcagctccccccgaagaatccgctttgaatctctaaggttgtactgtatatgtctttcctggtcagtgtctgtctggagcatgactttaccaccttttgcagtgattctagtactaatacggcattcactcttcattcatgcatgcattcattattaaaaaatgataactgcttggaaggagatgggctacctgtgctgtgagtaactatgatgggaaactatggccgggtcagggatctcagaaaagtttcccagaggaagagggacaaagtgtgagtggtaattaaccatgtgaagagggaaagaggagcatatgcagaatatcttgtcatgcattttctttgtttataggacctatttcacctgaaaaccttatggcaaaatattatttttttcttagcttttatttttggttcaggggtacacatgcaggtttgttttacaggtagactcatgtcatgggggattgttgtacagattattttgttgcccaggtactaagcctaatactcaatagttattttttcttctgctcttcctcctccaactctccaccctcaaggaggcctcagtgtctgttgttcccttctttgtgttcatttggttttctgttcttgcattagtttgctaaggataatggcctctaattccatccatgttcctgcaaaaaaccatgatctcattcttttttatggctgcatagtattccatggtatatgtgtactacattttgtttatccaatctgtcactgatgggcatttagattgattgcatgtctttgctattgtgaacagtgctgcaatgaacatttgtgtgtgcatgtgccttttttttttttttttttggtagataagggattttgccatgttgcccaggctggtctcgaactcctgagctcaagttatccacctgccttggcctcccaaagtgttgggattacaggcatgagccactgtgcctggccatgcatgtgtctttatggctgaatgatttatattcctctgggtatatacccaggaatgagattgctgggttgaatggtagttctgtttttagctctttgaggaattgccatactgctttccacaatggttgaactaatttgcactcccaccaaaagtgtataagtgttcccttctcaacttggccagcatctgttattttttaactttttaatcatagccattctgactggtgtgagatggtatttcattgtggttttaatttgcatttctctaatgatagtgatattgagctttttttcatatgcttgttagccacatgtattttttttttttttttagaaaagtgttcatgtcctttgcctactttttaatggggttgttgtttttctcttgtaaatttaagttccttatagatgctggatattagacctttatcagatgcatagtttgtaaatattttctcccattctttaggttgtctttttactctgttgagtttcttttgctgtgcagaagctcttcagtttaattagatctcatttgtcaatttttgcttttgttgtgattgctcttagtgtctttgtcatgaaatatttgcccattcctgtgtccgggatggtattgcctaggttgtcttctgtggtttttatagtttggggttttacatttaagtctttaatccatcttgaattaatttttgtatatggtgtaaggagggggtccagtttcattcttctgcatatggctagccagctatctcatcatttattgaatagggaatcctttccccattgtttgtttttgtcagctttgtcaaagatcagatggttgtaggtgtgcggcttatttctgggctctctattatgttccattggtctatgtgtctgattttgtactagtaccatgctgttttggttactgtagccctgtagtatagtttgaagtagggtaacatgttgctgtcagctttgttctttttgcttaggcttgtcttggctatttgggcttatttttggttccatatcaattttaaaatagttttttctagttctgtgaacaatgtctttggtagtttgataggaatagcattgaatatgcaaattgctttgggcagtatggccatttcaatgatactgattcttcatattcatgagcatgggatgtttttccatttgtgtcactctgatttctttgagcagtgttttctaattctttttttttttgagatggagtttcgctctttgttgcccaggatggagtgcagtggtgcgatctcagctcactgcaacctctgcctcccaagttcaagtgattctcctgtctcagcctcctgagtagctgggattacaggcgtctgccaccacacccagctaatctttgtatttttagtagagatggggtttcaccatgttggccaggctggtcttgaactcctgacctcaggtgatctgcccgcctcagcctcccaaagtgctgggattacaggcgtgagccactgagcccagccttctaattcttattgtacagatctttcacctccctggttagctgtatttctaggtgatttattcatattgtggcaatcgtgaatgagattgcatttttgatttggatcttggcttggctgttgtcagtgtataggaatgctagtgatttttgtatattgattttcgtatcctgagagttggctgaagttgtttatcaactgaaggagcttttgggccaagactatggggttttctagatgtaggatcatgttgtctgcaaacaggggtagtttgacttcctctcttcctatttggatgccttttatttcttcctcttgcctggttgctctggccaggacttccaatagtatgttgaataggagtagtggaagagggcctccttgccagttttcaaggggggaatgctttcagcttttgcccattcagtatgatgttggctgtgggtttgtcatagatggctcttattattttgaggtatgttccttcaatacctaatttattgagagtttttaacgtgaagggatgttgaatttttaatgaaagcttttctgcatgagataatcatgtcatttttgtctttagttatgcttatgtgatgaatcatatttattgatttgcgtatgttgaaccaaccgtaaatcctggcgatgaagcctacttgattatggtggattagctttttgatgtgttgctggacttggtttgcaagtatatttttgaggaattttgcatcgttgatcaaggatattggcttgaagttttctttttttgttgggtctctgccaggttttggtatcaggatgatgctggcctcatagaatgagttgaggaggcgtccctcctccttaatttttttggaaaccaggggtacagacaaagtaccctgtacacccaacagtaatcccacaggagaaggcagaggccccaggccatttaatcagcagcaaggtgattatgtgatatgtcttttcacagttgagttagatgtactccaccagttatgatgggaatcaatttaaatatactttcttgatcccagaaattcaagtatgtggacaggatgttacacatggcaggatgattgttacagcgcaactaacatatttcaaatggacaaaaaattagtataatttacagtatcttaagataaatttcctttgaatgggagcttcctttctagtcctttgaggtctacaaggcatatctagaaaatttactactgtggaagatgaagactgtttaaattgaatggggggcaggaaggggaagggcctatggtttttctttttgattaactgctgtaaccctgtccttcaggcagctgaaggagtgtcacattttctttagacatcattaggcaccaaagctcttgtaggacaactttgatgctacatgaattctgccattttgctagcactgatatggctttttggtccaccactccattacaactattaaccctatttatattaatttttgttacaaatcttacaaaggcagggtgcttctgggcatttaggatacattctattttaaggctgtatacttgattttcgtaaatcattcttggaggcccaattatcatccctgtccatcttgtcccaggtcttcatcatcttctaaacaccagctaactatgccacctcctacctttttctggccttcttcgagttcttccatcagttggaaacttcgagagacttttactcctgatcctgtggtgactgccatcttgcatcactgttgccccatgttttgtataatgaaaaaactgagcaatagaaagcaggtagtgatataagaagtcaacaccgagaaataagaaaaacagaaagcaaagggaaactaagcaggacagtatgtacttcagaatcaattattggttgccacctttcagaggatggagaagataggtattatactttgttatcttttgaaatgtggtcttgaaacttgatttttaggggtggttagatagattcattaatttctgagactttgtttccttttactgtggtaagaccaacagtctggttattcttttcagtttatttacaaatgttggagtaataaagaaggcagaacaaaatgagctgggctttggaagaatggaaagaagggctgcctacaagagctcttcagaaaattcaagagcttgaaggacagcttgacaaactgaagaaggaaaagcagcaaaggcagtttcagcttgacagtctcgaggctgcgctgcagaagcaaaaacagaaggtacccctgaagctctggtatttgtagctgttcactcattattgacagagaagtgctggtatttaaaactgttcactcatttttggattaattatttcatcttctttacatttagagaaaaatgattttgctgtcttcaggtggtaattcctctcccctcccccacccccaccccaggccccaatccccttctttttttttttttgagtcatttttattttaattgcttttaattttccccatttctgtcctcatttctgcttacctgctaatatttagggctattgagttccatttcaacttccatgtgggaccatgaattggagattgcttttgcactgcatagcaacaaggcaaaaggtgtctgctcctaatctggggacagtattagagcattttgcagttaaatggttgtggctttcttagactgggctttttaccttggtattcctcaaccttttcaggtctagaaaatgaaaactaaacagtactttttaaaaattacctctctattagccaactaaatagtgatacagtcattgcttctaaaaggattttgcttgtgggagaattttctggtttctaacaataactggttttagcagccaaacttgaaaatgaattgttaagggagatttataggatttatttcctattttttaatttttgaaaggatagtaaagactccctttctaggatgggtgtgtctggccaaagatgatatactacatggcttcaaagaagtttcctatctattggcttcaaagtgtgatcatctaaaatttctgtgttcatatggcttattgcagctgtatctcaggaatttagtagtcaatgttagactcaggtttaccaataatacttggtaaattcacaaaataagggagttattgtcttctgaacaattctcattaggttgaaaatgaaaaaaccgagggtacaaacctgaaaagggagaatcaaagattgatggaaatatgtgaaagtctggagaaaactaagcagaagatttctcatgaacttcaagtcaaggagtcacaagtgaatttccaggaaggacaactgaattcaggcaaaaaacaaatagaaaaactggaacaggaacttaaaaggtaatattttgggatggtatttatagggatgatatttgtatgtattaatcagatgcgtttgtcttttcctttaacaatataattattatactttgcaattttttttcctggtagaataagtaatgattcggtctctgtaccgtaacttgaaagagtggaagattaaaaacaaacaaacagtgatttggttttatcattgcatagctcagtacgatataaatttatcaaatgtttgctgcattactcatgtattcattcagtatatgtttattaagctgtaccatgattcagacactattggtcactgagtaatacaataataaatagtactatcatactatcaaattgatagtatgataatactagttacatagcattatttgatagtatgatagtacttgttaaaataaaactatcgacagctgttaccgaaaagatggaaattagttgaagcatactgatggctcgtgttttctctgggtggaaaagctgctgtagagaatgagagggagaactagggaattataaaaggacggaatagcatggagggcccagttgagattggagacagaatataagcaggcccaatctgcaaggttgtgtgataatttaaaaaatgtttccttttggctgggctaggtggctcatgcctgtaatcccagcactttaggaggccgaggcaagtggattacctgaggtcaggagtttgagaccagcatggccaacatggtgaaaccccctctctactaaaaatacaaaaattagcgaggtgtagtggcgggcacctctaatctcagctactcaggaggctgaggcaggagaatcgcttgaacctgggaggtggaagttgcagtgagccgagttcgtgccatatccttatagcacatttggttttaaaatattcttcttatctagtagactacaaaaactactgaatatggttttaaaatttacactgctaacttccaaatgcattgcagaaacttattttttccatcagttgtcactgattaggtttctggaaggtctccaacaagtgaggttgaaccgtttggaatgtttgttaaaactgtggagattggcaatctcatatagttcaacctagtagaagatgcttttagctttgtagtgcttttttgatgatggtgtttgtgtttttcttcttagggggaagaagaaaaaatggtttatgaaaataatagcagggtatacttttgtttaagtaataaataactttgtttaaaatgaaaggatagggaaaagagaataagatacgaatttaaagtggaaaagaaacactggttttgcaagattcttcaaaattcacctcgaatcagcagatttgtgacatctttgctaatctgtagacctgcaacgtccaatatggtagtcactggctacaagtggcaattatgatgtacttcaaatgtggctggtgcaaattgagatgagctgtagtgtatgatggatgccaaattctgaaaatttagtatgaaaaaatgtaaaatattttattagtaactttcctattaattacaagttgaaatgagagtatcttgaaaatagcaagttaaattaaatattaattttacttatttctcggtgctttttaaatactagtggaacatttccattggaccttgctgtttcctactgtaagctcagatgtggtggtttgatttgctgagaagtcatttttagctcatacattgcctcttctcagattaaatttggagctaaatggagctaagggctttctttctttctttgtttctttctttccttccttccttctttccttccttcctctttctttctttctttctttctttctttctttctttctttctttctttctttctttctttctttctttctttctttctttctttcttctttctttccaccctccctccctcccttccttccttccctccttccctccctccctccctccctctctctctttctctctttctttctttctttctctttctctttctttctttcttctttttctttttctttttttctttttgacaaagtcttgctctgttgcccaggctggagtgcagtgctgtggcacagtttcagctcactgcaacctccgcctcctgggttcaagtgattctcctgccttagcctcccagctggggctacaggtgcacaccaccatgcctggctaatttttgtatttttagtagagagaggttttcgccaagttggccaggctgatctcgaactcctgacctcaggttatctgcccgccttggtctcccaaagtgctgggattacaggcatgagccactgggcccggcattactttctttacttcctgttttaagtaatatgtcacggcaaagagactggtgcacaccattagccattctaaaagagctttcattttattttttatgttaaactgaagtcagagacataagagagttggaagaattgagccctcttttaatgtgggttttttggttttgaaaggtgttcagagcttacttgcatgatagttctgaatacctttatacagggtgtacatatatacaatatgtaacttatgtttcccatttcttgtaactatttccagccatatcttttctagatgcattatattgatttaatttttatatctgtgttttaaaaatgtcatataatatatgatctgtatatcaagtctatgtttttgaaataactgactaacctaagtaatgtcatctattctcacgatttgagcccatgcttcaatgacaccactttcttcccatgtttctgaagttctaggttcttttatgtctctgtctttggcttagaatatgaaatttgcttggaatatattccaatcctccaactcttctttgctgtctgtattagtctgttctcaaactgctataaagaactgcctgagcctgggtaaattacaaaggaaagaggtttaattgactcacagttccacagggcttttcttttccgctgggaaacttacaatcatagcggaaggggaagcaaacacacccttcttcgcatggtggcaggaaggagaagaatgagaaccaagcataggaggaagccccttataaaaccatcagatcttgtgagaacgcactatcacgagaatagcatgggaaaactgcccccatgattcaatcacctctcaccgggtccccaccaccccaccacacatggggattatgggaactacaattcaagatgagatttgggtgggaacacagccaaaccatatcactgtcatagtggttattatagatcttccttatagcctttataacattgtacttactggtttatgtttctgtttcttttactagactgagttcctttgaagacacaggactgggtttatgtctggcacataagttagaccttatgaaatgcctgttggataaatgaaatggttaagaattcttagtggatgggtttctttgtaagtttattactctctgggaatgtaaggcattgatattctgtagcctttgctctaactgatttgtctgcctcttgggtccttttctaacaggtgtaaatctgagcttgaaagaagccaacaagctgcgcagtctgcagatgtctctctgaatccatgcaatacaccacaaaaaatttttacaactccactaacaccaagtcaatattatagtggtaatgcattttcttccttggtatagacagctttttgtttagcttgagattttaattctgcaaaataaatgaattaattcaactttgaattaaacttttaatgtatatgtttaaaaactgcagccacttgttacatatccatttgcatatctgttgaattatgttgagctactggattgagcttttaagctttttactttatccttctgtggcatattttcaaagaaattcaatttcagaatatttaaaacacttatgtttttatgtgttttgatatttgagtaatttgatcaatagtttgatctatttccctaaccaaaatgttgtttctactaagatactcatttctagactatcaaaatcgttgttgatctgtgaattccttcatggaatcaatgactgaaagaaaactgtatttgattgtctgtttctaggttccaagtatgaagatctaaaagaaaaatataataaagaggttgaagaacgaaaaagattagaggcagaggttaaagccttgcaggctaaagtaagttaattatgggccctataatagagtatgcagttatagaatactttgatatagaatagaacaaggttagagaaaaatctgttttacatagagctggcctttttgtgtgtgtgtgtgctgagaaaaggttttgggctcagtggaggtgattattttttagttttaaaaatagggtggaatgaataaaatagagtggggaggttagtttatccctaaatattaaatgttcatataatgtacacttaattatttccctattaagacctagcgatcagggctattcttggagacagtggggccagagaattagtcgtgatgctccctgcctggctttatcacctggaggcagttgcttcctatatagtccttttgatctattgaattttacctctaccatttttgttcacgtgttatttgctgaaaacagtttccagtttggcacttactggtggctttccactaaacataaggacttgatgagatggcacaattcagcaagccatttaaggctgaatttataagtaggtaccttaaatgctgagaatgcagaagtacctctggcttagagctttaacaatttttattcttttcatgactttaaccctcattttgatgtcattaggattctgatatgtagcaaaggcattgcttatcaagatgaataaaaattaagtactcattctctagtttgtcctagaaatatcatgtgctttgtcatccagttcagtcatttgtatcaattcttctcttgacattgattcctagagatgttttatggaaaatttgagtctctagtaaacattaaccctcttcctatggcaaaaaaaagtgcttgctgtaaaaatctaatgctgcattcacctccatgtcttgatatttgtcagaatggaggcagagagaagcatagaaagaacaatgcaaagcggtagatcatccacaaatgtatattatatactattaaacactcgatgtgactttttttgggatagtgatatggtggaatgtgagatttttgaaagagttctttagtgtgatgtttaactttgattctcttgggcaaagctatagggggaggtaaccaaggacaggcaaagaaaagccagttttggaattcagaatgaaagtgaatactcacatatgtttaatgggttctaagaaggatgcagaataaatactaagacttagcctattttgaatagattgggcatgagatggtagtagcttattccttcaatgctaagaagtcgagcattagaacattccatcactgggtattagacttatggtttacttgacttgatgaatgttctttgttggtatgcagtgcaactgttaacttcttgggattatggctttatattctatctgaaaataaatagccttgagtatataagatctttaaaggcctctaaagagattctgtttctacagaaagcaagccagactcttccacaagccaccatgaatcaccgcgacattgcccggcatcaggcttcatcatctgtgttctcatggcagcaagagaagaccccaagtcatctttcatctaattctcaaagaactccaattaggagagatttctctgcatcttacttttctggggaacaagaggtgactccaagtcgatcaactttgcaaatagggaaaagagatgctaatagcagtttctttgacaattctagcagtcctcatcttttggatcaattaaaagcgcagaatcaaggtaacattgagctaagttaagtttaaattcactttgcttgaggtaatttcacaggtgatttcagatatttttaatcccataaagtgcttatgtgttttgttaggcacatcggtgttcaacatcctagactggttatgtgaaatatactgtcttttcaataatgataaaaggcatcatagtgttggaatgtagttttatttgtattgaaaagctggtgcctggaagcctctaaagtacgttgagaggctttgatttatctttccagatgcagggcgagtgggttggttacagtttacactccccatgcttctcatctggctccttttgtgacccacagaaccaggctgtggtctgaccagctttggccagaggttgtgtgtgtgtctgcagaacagctttgctgtgccctgccaggttgtccatatgggagcaaacctgtaaccttggctgctgtgccacgctgcagctgacagccaagggtaccaggtggtgttttggaatctactctgtagaagatgataatttccagtgctgtgatatattgaaaatcactgtcagtgttcactggtgagagctgtcacctagccaatgccattggaaccaatgttgtgcgtatgtgggaaaaaagtggaaaaaaaatcattgttaattttggcagtatgggaggttcacactgtcttgatgtttactggaggtaaaactaccagagaatataggagggtgaacttttcactgcttagcactgatttgcattgatatgggcaaaaaacaaatatagtttgctgttgtgtaaaactaaatggtaattttaacaaagggtgtcatatgtgatgtacttttcacagtctcaataagaagatagcgttcctgattttagaaaagcattccccccaccaagtttctttgttaaaatgtaagaaaatctgtttctcctgctttctatagagtatttgaatgcaaatgacaatagaaactaactattgaaattaaatccaattaaagtagcttctgtatttagtgtaaatatttgtttcgtcaaagatttcagaaaagaataaaacaaatgataagttatgaacattttgggaaagatatatatgaattggagtgtgatttttgtttgtggttcaagagctaagaaacaagattaatgagttggaactacgcctgcaaggacatgaaaaagaaatgaaaggccaagtgaataagtttcaagaactccaactccaactggagaaagcaaaagtggaattaattgaaaaagagaaagttttgaacaaatgtagggatgaactagtgagaacaacagcacaatacgaccaggcgtcaaccaaggtacttgacttttcgtgaattactggagaaatcttcatcttttcatacaattatttagaaagagtattttatacataagtttatgaaatgtcagtaatgttctttgttaatatatattaggtactcttgatgcaactgaactagaaagctgttttaagttgggcagatccgggatcaagcctggtgccgtactttcccagctgagtgacgttgggcaagtcactgatctcttttatgttgcagggggtaatagagaataaagaaaatgtatatatagcatctagcatgatgtgtgccacattaaaataggcacttaatggcactttaaaggagttttaggacatttgataggatttaattaatctgctcttgggatcgtatatatagttggtccattgtacccatgagttctgcattcatggattcaaccaactatggatcgtaagtatttagggggaaaaaagatcgtatatatagttggtccattgtacccatgagttctgcattcatggattcaaccaactatggatcgtaagtatttagggggaaaaaagatcgtatatatagttggtccattgtacccatgagttctgcattcatggattcaaccaactatggatcgtaagtatttagggggaaaaagaaaaaggccgggcacctgtggtttacacccgaatccccacactttgggaggttgagacacgcggatcacttgaggctaggagatcaagaccagctagcccacatgacaaaaccttgtctctactacaggtacaaaaattagccaggtgtggtggtgcacacctgtaatcccagctactcgggagtctgaggcacaagaattgtttaaacctggaaggcaaaggttgcagtgagcagagattgtgccactgcactccagcttgggtgacagggtgagattctgtctcaaagaatggctttgtctgtactgatcatatacagacctttttttccttgtcattatttcctaaacaaatacattattacaaatattttacatagcatatacatagtattaggtattataagtaatctagagatgatttaaagtgtgtgggaggatgtgcataggttatgtgcaaacactataccattttatatcagggacttgatcatcctcagattttggtatctgcaaggagtcctggaaccagtccttcatggatactgagggatgactgtacacccaccactgaatcttcttaagactccaacggaggccaagcttcttagcctgttattttgttgttgttgttgttgttcttgttgttgctttggtcccagcctacctctctagccaggcttttcttctcttttttctattactcattcatttactgactcatttcacaagcatgtattgatatttgtgcctgctatatattaggcactgttccagacctggggctggaacagtgataaatagacaaaaatctccagacctggggctggaacagtgataaaccaacaaaaatcattgctttgtggagcttcatcttaatagagggaggcagaaaataacaaaaataaagtaacatagatagtatggtatatggtaataagtattgtagagaaaaatgaattatttgacttttaataaactctttagatatttctgaggctttaggtaaaaaccattgtagtagacatacttctattatttgctttcttggggcaggttctttcatttgtttacttaaaacttttattttaagataatcgtagattcatatgcagttgtacaaaataatagcttgttaatgtggtgggttgcactgattgattttcacacatttgaatgagccttgcatatttggaataaaccctaatttcttacagtgtataatttaaaaaatatatttctgaatttttttttgctaatgacttattaaggattttttgtgtctgtattcataaaggatattggttggctttctttttttcccctgccatctttgtttgatatttgtatcagggtatcctagtttcacaaattagagagtattccttcctcttcagttgtctgaaagagactgtgtagaatttttttttctttctttatatattaagtagaattctctagtgaaatcatttgaatctggagatttcttttctgggagttttaaaattacaaattcaatttttaaaatagttatagaactattaaaattatccatttcatattgggggaattaggatagtttgtattttcatctaagttgtcaactttatgtatatagagttattcactgcattctcttattcttttgatatttgtagtgatattccttgttcatttctgatgttggtaatttgtgtcttctctctatctctgtgtcagtcttgctagagatttgtcagttttgttgatctttactaatctttctaaataatcagcccattggttcattgatttttttttttctctgttttcaatttcattgattgctgcttgctttaggtttatattgctcaaaaaaatgtcattaggacctgttggttgatgatgttgttgagtttgttaatatacttgctgattttctgtttagttgttcaattcattgttgagagagaatgttggagtccccacctataactgtgatttgtctgtttctcctttgatttcttccagtttttgcttcacatattttgcagctctgttggtgaaggcatatacatttgggattgctgtgtcttggtggattgacccttttatcactatttagtgtccatggtaattttctttattctgaagtctactttgtctgttattaatatagccactccagctttcctttgattgttagcatgatgtatttcttcctctttactttcaacctattttgttatattgaggcgactttcgtgtagacaacatataattgggccatgtttttcaatatactctttcactatctgtctttttttttgagacggagtctggctctgtcacccaggctggagtgcagaggcgtgatctcagctcactgcaatctctgcctcccaggttcaagtgattctcctgcctcatcctcctgaataggagtagctgggactacaggcacccacgaccatgcccggctaatttttgtatttttagtagagacggggtttcaccatgttggccaggctggtcttgaactcctgacctcaggtaatccacccgcctcagccttccaaagtgttgggattacagacgtgagccactgcacctgtcctccactgtctatcttttaatgggtatatttaggctatttatacttaatgtgattattgatatattgtgacctaagtctgccattttattttttgttttccatttctttctgctttttcatttgttttctttttttttcctgcctttgcgggttgtttgaacattttttaaaaatccattttgatttgtctatatatttttcagtgaatctctttgtagagcttctagtgattgttctagatattacattatttatacacattttatcacagtctgttggtgtcttcatttcactagttctagtgaattttacagactgttttctcccttttcgtctttttaccctccctcatttataatagaattgtcttaaatgttttctgtacatacatttagaactacattttgcttcaactcttaaacatattttaaaaagctgaggaagagaaggaaagcctattatatttgtgtgtgtatgtttatatatacgtgtgtgtgtatatatatataaaatcattgctaagcctgttcttccttccctcctagatttccttccagtttcctttatttcctttctgtttagagaacttcctttagcccttcttttagggtaagtctgttggccacagatccttagttttcctttatttgagaatgtcttgattttcttttcattcctgaaggatattctgttgggtataggattctgtgttgacagtccttttttcccagtgccatagtgtttttcttcaggtcctcagctccttagtcagtctgccttcttctctccacctttcaaacttgtttgttttactataatgtccagggtttttatttgttctagttaggaggaatagggaaaagtgtgattattccatcttcctggaagtaaaaatcaggttcatttttatatattctcctagtgcagtgccttatacagagaaattctggaaaaagattgattagatatataaaggaacaatggtgcttcagtggaactatgacctcctttgatccatgcatttaatatcctcatgcagtctcactacgtaatagtaatttggtcttttaagttagaaggacttggatttgaacctggctctgccacatctcagttttattgctttttgagttatttaatgaacttctgagccccagttgtctaatcagtaaaattgtgttaataatgcctgtgtcatagggttgttgtaaagattgagataatttttgtaaaggctttagcatagttcctggcacatggtgaacttataataatattagctgttattatcatggcttattttcaagttcctagttaattaagctaattttcagttgcatttctgccaagctaggccttcctgtatgtaagaattacatttctccttttacactttacttatttggttttggagtgacaagttcaccaaatccttgttctgtctgacacatataatgaagtttcttcacataaaatcgtgaattaatatttttgactaggatactgctgagaatacagctctggttttctattagagtcttccctccaggttcttgtttttgttttgagacagggtctcactctgtcatccaggctggagtgcagtgaagtgatcctggctcactgcaacctccacttctgggctccttccacctcagcctccctagtagctgaggctataggcgcccaccaccacacctggctaatttttgtatttttagcagagacgaggttcaccatgttgcccaagttggtattgaactcctaggctcgagcagtttgcccccctcagtctcccaaagtgctgggattacaggtgtgagacatcgcacccaaccccctcaggctctttttttttttttttttttttgagatggagtttcactcttgctgcccaggcttgagtgcaatggtgcaatcttggctcactgcaacctccgcctcctgggttcaagtgattctcctgtctcagcctcctgggtagctgggattacaggcgcatgccaccatgcccagctaatttttttgtatttttagtagagacagggtttcaccatgttggccaggctggtctcaaactcctgacctcaggtgatccgcccaacttggcctcccaaagtgctgggattacaggcgtgagccactgcacccggcccctccaggttcttaatacttgtttgttctgtgctttttgggttctttttttcctttgagctagaaatccatttaactgaaaattcagtctactcttttctgtcttgtccctaaggatagtatgtccttgtcaaatgtgtaactgaaataaaattatgctatgtttatgctggttccagatctaacattagacttatctattaaatgaaatggaattactgtaacaaaaatcaataccgtgttcttaagtgaacatatgctgtttgtagagtgtcttttccaagtatttacaagttgtgagatacaaggcttgaattcatggagaaacagagtgttgagctggcagcagacctggagttcagcacccacagttcacagataaaaaggtccggagtgagtgcccagggtcatgttgtgctacatattttcaaggacttgagctctgggcactgttttagagtattatggagcattcatgacacctagtggtcatatactcttatatgaattaggtatcactgataatagaatgttgtttaaaattttttaaataaaatgtaagtaccttctaaagactcttgtaaccttctgtgtttagtagaaaaggattcttgattccaggacccttttagtggactgtattgcagtttgaaggagtgccagtagagggcgccacgggttcatttcatttactctgtggtgcaaggttttttttttttcctgagatttgttaaactttgaaccatcatttgagcagtgactttttgttttgttttgttttgttttgagacagaatctcgctctaattgcccaggctggagtgcagtggcacgatcttggctcactgcaacccctgcctcctggatttaagcaattctcctgcctcagtctccccagtaactgggatttacaggcaagcgccaccacacccggctaatttttgtattttagtagagacggcgtttcaccatgttgcctcagcatttggaacattgtggaaagaagcattttaatatttaaaatttcccacaaaatccattatgcttgaaacagactatcatatgagggtaatgggcaccctctgatgattttacagcttttaaattacataggctaacaccattgcattttaacctctcatttccatgcaacaaaatgttagatgaatcgttagacatgccgatcttttttttcatggcacaaattaggaagtatttatttaagtgggctaatgctttacatccttgctaatagttcctaaacataaattgtgtgctaaaacaattatagcagtttttctaaaacacaaaatatttgttcatttatgtgagtaatatttattttgtcttgaacatttttattcattattagtatactgcattggaacaaaaactgaaaaaattgacggaagatttgagttgtcagcgacaaaatgcagaaagtgccagatgttctctggaacagaaaattaaggaaaaagaaaaggagtttcaagaggtaaggtaaatggattcatgaggtgtttgtctgaaaggctttttatgggcttttcatagtttgatcacttggaaaggggagttgttatcacaatttgggaaattctcttagaggagaaatgctttgtgagctaaaggtcatcttattttctttcacatcttcacttttgcgctttttttaaatctttcagtttttgattagagaagggaattagtattcagaattcatccatgttttctgatttgtttgagatttgatattcagtaggaaaggatcacttttcttcttttggacattttctctgctgtggaggaaattgtattacattttccagtaggcttttaaaatttttttttctttcactctatttcctttataactccagtatttttttttttgagacagagtctcgcagtgttacccaggctggagtgcaatggcacaatcttggctccctgcaacctccacctcccaggttccagcaattctcctgcctcagcctcccgaggagctgggattacaggcatgcaccaccacacctggctaatttttgtatttttagtagagatggggttttgccatgttggctaggctggtctcgaactcctgacctcaggtgattcacccaccttggcctcccaaagtgctgggattacaggcatgagccaccatgcctggccaactccagttgtttttaaacctgtgggttggtaaataaattaggagggtagttgatgtggtggggaaagtggttggcagaagagtgagggtggaaggtgcccttccataagtatctgccaatttggttctttcaggtgatttagcctgaaaaagtaccatacggattaagagtctatagattttaaataagaatgcctggaaatgttagctgatatctttctgtggttattaaagttaatgggtagcatatatttcctgtccttctacatttaagcccatttaaagtggtatacagttttttgtgttttaaacaccgtttttgagtatgtttggtttcttagttgagctttgactgttgtagctcagttcttctctcttgcccctgatccttcaaagtagaggtaattaatttaagactgaagatgaggtggaaacaggctactttccatgtggtcaactgataagagtccttcccctttccctcagagacctggatttgatgcctgagggcagcatggagcaccaaggctgactatgttcatcgttaagtggacagttggctcagctccctgctgtctcctgtgctctctgtgcagtcgcctgttaggatgctcatgcctcaccctggagtctccctagcgaaccatcatcaggctgatgcacctgccctttgtttttcaggagctctcccgtcaacagcgttctttccaaacactggaccaggagtgcatccagatgaaggccagactcacccaggagttacagcaagccaagaatatgcacaacgtcctgcaggctgaactggataaagtaggggccgtgtctctctctctctccttaatcatcccctcttgttccttgtacttgttacttctctaccataactgacatatgatactttcaaagaaaaagcgctccaccttcactttccctatcaaagtggagaatgtacagaaccattctggctctaggtttcctcatctagagaaacagtgggggtgagttaggatttcagatccgaaagtctgtggagctctctcataatctgttggttcttggttccatgaccaggtgggagctgtcccaagtaatttatgcccccaagtagttaaagcactgaaaattataatcactttacttatttaagactcactcccaaagtggtctcatccagttttgtggctttacatatcatctatgtgatgatgactctacccagcctggatgtctattctagacttcaggtgtgtggatgtgtgcttgacagtccactcacatgtctaaaggcacttcatagtaacatgctaagaattgaactctaggtatttttctttttcaaaactgttcctcccttagtcttccttaccctgctaacttgcacttccattccccgcattgctgggaccaaaacctccatgtcacttctattcttctttttctcttacacttgaatctgctgcctctactgatggatacttaggttatcaacattttcttgttccctgtggcactgtttgtaatatcacggggcaggtatctttgtgtatgtgtgctgatgtttctataggtcagatttctgcatgtgaaatttatagcctaaagaacatatgcatcccaatatttgtgtgttttgtttgtttgtttgtttgttttgttttgttttttgagacggagtctccctctgtcacccaggctggagtgcagtggcacgatctcggctcactgcaacctcatcctcccgggtttgagtgattctcctgcctcagcctcccgagtggctgggattacaggcgcctgccaccacgcctggctgatttttgtatttttagtagagacgaggtttcaccaggttggccaggctggcctcaaactcctaacctcaggtgatctgcccaccttgacctcccaaagtgctgggattacaggcatgagccgccctgcctgggcagcatcctaacatttgacagttactgccaaattgccctccataaaagctgtagcagttactctcctaccaggtacaagagagggcctgtttcctctcatccttgctaattggaggtagtctcggtttttaaaattgttgctaatcaaggagtgaaaaatactgtcatatcattgttttaattcacacttccttgattaccattgaagctatctctttcaatagccatttgtattttttgtataaagttttctgtttctagccattgcccttttgttcaatcatagagcgctgtatatgttgtattacagatatactgtcttttattctgttatatatattgaaaatgtgttctcttagcctgtttcttatctcaacttattttccttttggttatttattaatacctagctgttttattttttgtggttaaatctttttcctgtgtggtctccttgccacacccagcctctttcatctcctatatgcagccgctgagtgacgtcgcaaggtcacattatggtattttaagacatatttagctgtgacgtatactgtatctcagccaaaatagatggcatccattttgatattccatgaccattttattgtttaagaatacatgattaatgaaaaagtaaagaacatgaaaatgaaacttggtctctttttctttttgtagctcacatcagtaaagcaacagctagaaaacaatttggaagagtttaagcaaaagttgtgcagagctgaacaggcgttccaggcgagtcagatcaaggagaatgagctgaggagaagcatggaggtaagggaggaggatgccgaattttctccacttatgtaagaaccaagtgcaaggggaaaagaatattcctattccatttgtcagttgcttgtcatgactgtgtgcctttttcttttctattcaccagaagtaagtattacagaattttctgtatataacccatgacagaatatgattgcttatttttctactctctattctgtatataattactaatatgcatctagcaattatagcatatctagcaatatgtgtctacaacatgacttgtattaagaatatgtagtccttccttaaagattgttttagacccccagggaggtggaaagatgggaaaggaaggaagggattttttaaatggaaagaaacaaaattggaagtatcatctaaatcccttttctaactgttggcatttgtgtctttcaatattaaaaacacgtggaaagtcatagatttaaataaacaaaagtagtgacagataaagagtttctagattaaaaattcttataaaaacatcaagcaattgtcaattatatgactctggcttcaaaagtggacactgaccttaatgttcagcctgtgcatgccctggttgacggtgtctttggagactttgttttgtccacaaagtggtggatgagggttcctgaatggcatggatgccctgatgggattttatgcatacatacttcaatttggcttctctctgaatttatttagtggcctggattttattttaaagggcttaattaagaaccattcagtgacagttaatagactgaaacaatttgaagagagccataaatcaacattgtaattttaagaagaggaacaacacaagaatggtagaaatttcttctccatcaaaccccacaggaaagaatgtttttctgtttattctttaaatgttctatgatcactttttaggctgtaaagattaagaaaactttgtccataaagaacagttatttgttcaggtgaggaaagtctaaatgtatttatccccaccgctttgcagagtgtatcatgatggtaaaatcagaacatctgtcagtagcagacaggtgattgttaaatcagctaaccccaaaggggcaatactgctggagatagggggctgcagctccagccacaaagtggaagaaaacttcaaatcagatgatagtttcatcagcaaacgttttcaaatggaagtgtttgtttcagcaaaacaaatgtttgccttttggccagtggggaccaaccaacagatgcttctgctaacatttccacaggcagactggcatcgaactcttccctctgtgagcttccctttcagccaggaactctcccgcgactccactggctgcctggtggaaacattttgtaaaagcaatcatctggttaagagagtccaaacactttaaaaactgcttgcttggccaagtcgcagtagtgggctggacattgtcttgcaggtgtttctgaagacttgttcatccccacgaggtctggtccgtgagctgtagcgctgtcctcagttaatcccagcctgtactgaggtgcatgcatcacatttcactggtatatcattgatgtctgtgtcaaatgagggcatctgtgtgaaagtgtctagcaccgggcctggggatgaagttaatatttgtcttaatttatggttatgtttatgtatgtgtcatcttttgagggtgatagcaagatttcaaagagtttggctggctcttgtgttttgcattgggattgggaccagataactgatgaacccagttagagtggtggtgtaacttagtgggaaaatggtagtggctttagagtgagtgagatctgagattgtgttgcttttctgccacctaccacaatgtgacctttagacagtggcttaccctttctcagtctgactttcctcatctgcatatagggacaaatcattctcctgccttttcaaggctgtattcttggttaagttaaatattgtatgtaaagtgcttagcccagtgcccagcacataagtgctcagtcagttattgcagtccaacacctgcccattgccttggtcttcatcactgccatgaccttttgatgttagcattgtttgctgtcacctacaggcacagaaagtgtgatcaggggacagtgcacttgagatttctcatatttataattttgcctgttctattactgtgtcactctgggtatctttctgtgtctaattatatgtaagcactaacaaatttaggacgcttataggttttggatgccgaaataatgtgacagttgtactgaaattttccttgtctgtgtttagtaaacatgctgctcacaatgagaaattatcagtactggaaatgtgatttaatggcccaatcaagggtaaagttaacatttagtatcaaagtgaatggagggtttagataagctgctcgtccactatccagtgccagccccatagcattggggttaggcaataaaataccatcgtttgacagtcaagatgagggaacacttgcctggggacctttccaagcatagggatctgtattacactaggtcctctaaggagctggctctggcaagcaagagagatgaggaggaaagggaaaaacacattctttgcatccatcccttatccaagtatataggcttcgcccagcaggggacgtattaagctatattcatggatgggatcatgaaatgccacacagtagctgaaatttgttttgtctggccctaggaaatgatgcctcccttgctgctcctaaagcgaagttgatctgggtggaattgcttgctaagctctaatgctggcttgtggttatagggatttttgttgtgcttttccagcatagtacccaattttgcaaatcatgtgaggatgcaggagatgcctaggaaaatgtatctttgtatgcttaactcattgttgataatgagatacccaatcaagtcttaagtggctgtagcctcgtggaaaactaattgctgatggatggcagcttgcacatccattttcagatgttcattttctaaattctggccttttaaaattcttgggttggtcatagccatagcattataagcctgctgggtcccaggattggctgaacatttcttcgttagacacaaatatttacggagctaatgccagaatagagaaagtcatgttaatctttccattgagcttactattcatttaaatgtctccagttatggacagacatggatcgagaccaacaaacacataaacataaaattccccatctttccctggtgccctctctctcttcttttttccttccttcctattgggacgcacctagttttgcacagtg

SEQ ID NO: 46 - DNA, 32742 bp, Homo sapiens
  source 1..32742: mol_type = other DNA
agcacgaaaggccacgcaggccgttctaaccctggcggccaagaggaggggtagcaggctctggaacctgcgggcggggacgaagacggcgcgcgacgatgtcgcaccgcggcgtgcgcggtgtcggcagtagctgcggcgcaggggcggagcgaaggctgcggcggcgtcgggtacgcgcacacgttgcatcttcttcctttcgcggggtcctccgtagttctggcacgagccaggcgtactgacaggtggaccagcggactggtggagatggcgacgctctctctgaccgtgaattcaggagaccctccgctaggtaaggggccgagaccaatgacctgtgtgggttgcatcagccagggagggtgcagggcgtggaaggtcgctgcgccccggctttgcgcagtggtggtcaccatctgggatgttggacctgcccctcgccccagaattgtacgtggaggaggctccgcacccctcgccccgtgtccccggcaggtgcatctgctcctgaagatggttttcccgggcatggagggaggcgcagtgtgagcccgggctagacaacacgagactccgcttcggatctttttctcagagggatgaactcccagtcaactcacctctccctttttcccccggagagcgagagttgctcgtggaaataagattttaaaacttaaaatccaatagtcgtcgcttctcttttagcatttttcccccaactccttttcttacctcctttcctgtcctgtccctcctctcaggagaaatcctcagttcacttgagtcaaattttccttacgttttatcgagttcagaagaaataacccagacgagcatattagcatttaggatttcaactgaggctgcatttatttttaattaaatgtggtagggtaattggggaaaacacccaggtacactgtagactgatgcggttgcttttactgcaccctgtggatgtgtagtaaatttcagagtaaacattggatctgtcaccttactgacacatcttaagttctgtttggaattattttttcgacatgaccaagattattgttggtagattgcttagaatttctgctttttcattactttgggaaattacacagaagaatttaagtagtttgccgatttttttttttcttttgagagtcagggtcttgctctatcgtccaggctggagtgcagtggcgctttcaaggctcactgcagcatcgaacttccgggctcagatgatcctcccacctcagcctccttagtagctgggactacaggcgcgtgccaccatgcctggctaattttgtgtttgtgtcttttttggaaagatggcgtttcactgtgttgcccaggcaggtctcaaactcctgggctcaagccatcctgacttggcctcccaaagtactaggattacaggcgtgagccacagtacccagcctgacctaatatttgttaatgcatatgtatgataatacacacacagtactttctaatgttgaagaagcccatacctttatatacagttgaccacgtggggctgatgaaattattcattatattctcaactttggtgatgttttaaggttgttgaacaaaaacacaacttaatagccattttaaacatttaaaagatggtaatgttttggcatattggttgcagtaatggactaaccgcacaacaaatcaatgaactctaaaaggaatgggtttgattcctgagctggaaaggcattagagtgccttcatgattgagagcaaagacatttggtttctgcagacctgagtccaatcctggctgccacttactagttgtgaaaccttgacaagttccttatttagcttctcccatagtttccttgttttaagaaagggagaataatgtcttccagataggattggttgccagagttaagtgagactatagttaaagctcctgatactgttttttttttttttttttttttttttttttttggagaccgagctcattgcaacctctgcctcccaggatcaagcaattcttgttctcagccacacgagtagttgcgcttagaggtgcgcaccaccatgcccgcctaatttttgtattttttagtagacacagcattttgccatgttggccaggctggtctcaaactcctgacctcaagcagtccgcccgccttggcctcccaaagtgccaggaccacaggtgtgagccaccatgcccagcctcctgatacattttttgttacttagaaaatcaccctgaaggtggcctgtttctgtagtgtattacagaactcagaattctgccagtattctgtgaaactcttgtcattttgaactgtatgccagttatcaaatatatcatttttctaattgctcctctccctttttaatttttgatttaattattcccagtttaattcaattacattttatctttaagtaatataattagatgaaacattttaaaataatagttgcattgctagaattttcctattttgtatgcattcatcatgttatatatttaatgttaatttcaaacttaaaataaagacctttttcccccataccacccaagagcatactgtagatatgaggcttcagtatctcagcataactccagtgtacatccccaacaaacttggaaactccaggtgatctcacacaagcacccaaatcaggaaatacacttggatacaatgcttccatctaatgcacagaccccatccttgttctatcattatttgttacaaccagaccctccatagtgttgagatcaaaatcccgtattatgctttgtttgcatctgattgtcacctctctccagtttctttcagtctggaatggtttcctagtcttcccttggctttcatagctttgacctttctgaagataacaggccacttaacttgaagaatatcctctgtttaagttgtctgatatttcctggtgtctagattcaggctctttgtttttggcaggaatagcgtagttattccttgttcttcattgcagcccatcagttggtgcatgaatttaattttcccattactgattattctaaccttaattttaatgggcagatgcattggaatcatgtaaatgttccactttgcatcagatcttcacccactagtttcagtatccattgatacttcctgcctaacttgatttttatgattttatgatgtttgcgagatagtgactttcccattctaccattccttctgtatgtattagttggcatttttctgtgaggagagctttctctttttcccatttaaaaaaatcatagcaaaaatactcaagaagttacaatttgtattattttcattttctatttaaaattattttgtttttaaaaattagttttattgaattataacttgtatacaattgttcaccaattttaagtgattgacaaatgtgtacaatgtgacaaatgtgacaagtgtgtaatctacaccacagtcatcatgtagagtatttccattacttcagaaagtcctctcacgcccctttgcagtcattcctttccctactcctagcacctaatagcgactcatcttctttttgtcacttttttgctttttctataatttcatatacattgaatcatattatatatattcttatattctcatatgtgcctaggataatacttctgaaattcatatatctttttgtctatgacagtagtttacttttgttgttgttgatgttgttttttgtttgtttgttttttgagatggagtctcaccctgtcaccaggctggagtgcagtggtgcgatcttggctcactgaaacctctgcctcccagtttcatgtgatcctcctgcctcagcctcccgagtagctgggactataggcgcatgccaccacgcccagctaattttttgtatttttagtagagacggagtttcaccatgttgtccaggatggtctcgatctcttgacctcatgatccgcccccctcagcctcccaaagtgctgggattacaggcatgagccaccacgcccggccagtagttcatttttttatttgctggataaaatttcattgtatgggtgtgctaaaattgatctcatttatttcgatgtcattaccctgatttgccagtggaagcccctccaacctggactctgtcctttctttcttttttctttttttttttttgggagatggggtttcattcttgttgctcaggctggactgcagtggtacgatcttggctcactgcaaacctccacctcccaggttcgagcaattctcctgcctcagcctcccaagtagctgggactacaggcacatgccaccacgcctggctaattttttgtattttagcagagatggggtttcaccatgttgtccaggctggtctcgaactcctgagctcaggcaatccgcctgcctcagtctcccaaagtactaggattacaggtatgagccattgcatgtggcctttttttttttttttttttggggacggagtcttgctctgccacctaggctggagtgcagtggcgtgatctcggctcactgcaacctccgcctcctaggttcaagtggtcctcctgcctcagcctcccaagtagctgggactacaggcctgtgctgccacgcccagctaatttttagtatttttagtagagactctatgtcctttcgacatatatgttctctatctttgagtactcctttgctttctaacacaataagatttttcaggtttattttgcaccttccttgccacagccctgtttccagtggaacatggtgtttataaaccagtatctgggtgctagttgtccatcttttttttcagacagaatttcactcttgttgcccaggctggagtgcaatagtgcaatcttggcttgccacaatctccgcctcccaggttcaagtgattctcctgcctcagcctcctgagtagctgggattacaggcatgtgccaccacacctggctaattttgtatttttagtggagatggggtttctccatgttggtcaggctggtctcgaactcccgacctcaggtgatccacccacctcagcctcccaaagtgctgggattataggcgtgaaccactgcgcctggcctgtctatcttaatcaaattaagggacagaggattaatgaatcaattaagtgtcaagaggccattttacactgttttagagtttgagctgtggactacatgaggcttgcattcagatcctgactgctatatattttgtcaaggacattaggctggttatttaactcctttaagcgttactttcctattctgtaaaatggggatgaaagtatctctcatttttttttttttgagacagtttcgctgtgtcattcaggcaggaacgcagtggtgcaatcagggctcactgcggccatgacttcccaggctcaagcagtcctgccacctcagccccctgggtagctgggaccacaggtgtgtaccactatgcctagctaatttttgtatttttttgtagagacggggtctcactatgttgcccaggctggtcttgaacttgtgggttcaagcagtcctcccacctcagcctcccaaagtgctgggattataggcttgagatatcatgtcctttgaatctaactctacaggttaccccaaagatgaaaaattctaactgtaaagcatttggcatagtgactaagatataatagtcactcaaatactattaacgatagcttttttctttttttttttttagttttttaaaaatccaaggtcaacatattaacaaaagcttttatataaggcactatactattttttttttttttaagacgcagttttgctcttgtcacctaggctggagtgcaatggctcaatctcggctcaccacaacctccacctcccaggttcaagcgattctcctgcctcagcctcccgagtagctggggttacaggcatgcgccaccatgaccggctaattttgtatttttagtagagacggggtttctccatgtcggtcaggctggtcttgaactcctgtcctcaggtgatccgcctgccttggcctcccaaagtgctgggattataggcatgagccaccatgcctggctggcactatactaatttctttttgtctccgaagggagaagcagattaatttcagtgtctctaactgaaagctgaacaaattcaaaaccagttggatatgctagtgaatggattctggattctgatttgttgctgctctgagacaaaagactacattttctgtctacagactactgagaaaaaagttcactccttgtaggacttaatattggtttgttgactcatcctgattgctttatgattcaagttataaatactgcattgcttttaaagataaaaaatcttttcatattatttataggagctttgctggcagtagaacacgtgaaagacgatgtcagcatttccgttgaagaagggaaagagaatattcttcatgtttctgagtaagtgttttcatctttttattttcagtactgattggctttttcttttttttagagtttttttagagacagagtctccctcttttgcccaggctggcatgatcatagctcactgtacctagaactcgtggactcaggatcctgccatcccagcctcccgagtagctaggactgcaggcacatgcctccacacctggctaattaaaaaatgttttttgtagagatggggtatcactgtgttgcccagcccagtttcgaacccctggcctcaagccatcctccggcctcagcatcccaaagcactagggttaaagacgtgagccaccacgtttggcctctgaatggcatttaaagaaatattcggcatcgccgggcgcggtggctcacacctgtaatcccggcactttgggaggctgaggcaggcggatcatgaggtcaggagatcgagaccatcctgggtaacacagtgaaaccctgtctctactaaaaatacaaaaaattatccaggtgttgtggcacatgcttgtaatcccagctacctgggaggctgaggcaggagaattgcttgaacctgggaggcggaggttgcagtaaaccgagaacgcgccactgcactccagcctgggtgacagagttagactctgtctcaaaaaaaaaaaaaaaatcagcattaaatgttgtatgcttgttttacttactaattaagtagattgtccctagaaagaagtatacttttctttattctaaaagaattgaatctagagacttaaatttttcagcaaactgattccccatgtagtctgtttaaaaggaactagaggtctagctttgagagcccatctgcaacaccagctcctgaaatgaggcagggttatttaattggactggcctactcccagaaatgagtgactggtttaatgggatcccttggcacccagctgttgattttttcctgtacaaccaccaactcagcttttaactgaaacttctagggaagtttcagacaggggaatgttgcttcagaaagcaataccccaaagactggcgctttgacatgctgagaggccttagaagctacctcagaatcagggtacctgtaaccttgtttcctttcacaacccaacatgcccacttcccccatcatatagagagggactttctagaatttcctcatctggccaagaaagcatctttccaaaagaaatgcagttgacttaagtcccctccttgtggatctcatcaaataatctggaaaggtcagtcaatcccagctcagacagacttcacctgctcttctgagggcagcttcaagatattacctaggtgactttacacgtgtaataagacagtctttgttcctgtgccgctctgtttcttatcttcctttaatgttgctccctcacctccctgcgcccacttcctggtccatttattctgatgatttactttgctcaaaagaattatctgcattccctatctttctgctcccctatgaaacagggtatgtggccaggcgcagtggctcaagcctgtaatcctagcactttgggaggccgggcgagtggattgcttgagctcagcagtttgagaccagcctgggcaacatagtaaaatcctgtctctacaaaaaaaagaggaaaaattagctgggtgtactcccagctacttgggaggctgaggcaggatgatcacctgagcccacgagacggaggttgcagtagagccaggatcgcaccactgcactccagcatggatgacagagggagaccctgtctcaaaaaaaaaaaaaaaaaagataaactgagctgggtgtggtggcttaggcctttaatcccagcactttgggaggccaaggcagacagatcacctgaggtcaggagttcgagaccagcctgaccaacatggagaaaccccatctctactaaaaatacaaaacttgccgggcatggttgtgcatgcctgtaatcccagctactcaggaggctgaggcaggagaatcgcttgaacccgggaggtggaggttgcagtgagctgagattgtgccattgcactctagcctgggcaacaatagtgaaactccatctcaaaaaaaaaaaaaaaaagataaagctgaaacactttcccctgttgccactacatacacacagtcaccccatactcataaacttctgctctctatctccccctttctcccagtgtagttgtaccataattgtcatttgattaccattctgtatttacattataatgaccgtgtaagttttatttactactgagccacatagtataattgcttttcatgtaaaactgttagttttccatggagtaattggtgtttgtttgctttgtaattttcttctgaaactttctgatttctgaacttttctatgtgacttcaggaagtttggaggaatcttcccttaggagtcagtattctcaaattttacaataatatgctttagtttgggtctatttttcatctgttctgctgggcatttggttgcctctttcattgtggaaacttggaaatcctgcttttggaaattgaaaacattttttctttgaaaaatgtttttctctctatttttggttctttatgtggatgttgggattagtcctttatttttctaagttgtcacctccattttccatctttctattttttttttttttttttttggagatggagtcttgctgtgttgcccaggctggagtacagtggcacaatccaggctcactgcaacctccgcctcccaggtttaagcgattctcctgcctcagcctcctaagtagctgggattacaggcatgtgccaccatgcctggctaatttttgtatttttagtagagatgggatttcactatgttgtccaggctggtctggaactcctgacctcaggtgatccgcccacctcggcctcccaaagtgctgggatcacaggcgtgagccaccacgcctggcctctttatttttatttttagagatggaggtctcagtatgctgtccaggctggagtgcaatggatagtcacaggtgcaattatagcacactacagcatccaactcctgggcttagcgatacacctgcttcagccccctgagtagctgggactacaggtgtgtaccaacatgcctggcccattttttttttttcctttactttctggaaagttcctcaacttctcaactttattatcccatttttctattgaggtttttaattttggctattatgtttttagtatctgagtgttctgttttttttacattctggatactctttttttagtatcttgttttatgattgcagtatttttgtttcattgctaaaaatgaatttattcttttatgaacttttattttaggttcagtggtacatgtgcaggtttgttatgtagataaacttgtgtcatggggtttgctgtacatattattttgtcacccaggtactaagccatccaatagttatttcttctgctcttctccctcctcccaacatccaccctcaagccccagtgtctgttgttcccttttttgtgttcatgtgttctcgtcgttaagctcccacttataagtgagagaatgcagtatttggttttctgttcctgtgtcagtttgctaaatataatggcctccagtgccgtccatgttgctgcaaaagacatgatctttttttttttttatggctgcatagtattctgtggtatatatgtaccacattttctttatccagtgtgtcactgatgggcatttaggtggattccatgtctttgttattgtgaatagcgctgcagtgaacatttccatgcatgtgtctttatggtagaatgaactatattcctctgagtgtatagccagtaatgggattgctgggttgaatcgtagttctgtttttagctctttgagaaaatgccatactgctttttacagtggtttgactaatttacactcccaccaacagtgtgtggttttttgttttttgttgtgaggtggagtcttgctccgctgcccaggctggagtgcagtggcacgatcttggctcactgcaacctccacttcccgggttcaagcagttctcctgcctcagcctcctgagtagctgggattataagtgcccaccaccacacccggctaatttttatatttgtagaagagacggggtttcaccatgttggccaggctggtctcaagctcctgacctcaagtgatctgtccacctcggcctcccgaagtgccgggattacaggcatgagccaccacacctggcttgtgatgggtttggatgaggtttgatctgccttcgtagcctctttattagcaatagattcttggctcctttgccttgatttattttatttatttattttttttgagacagggtctctctctgtcacccaagctgaagtacagtggtgtgatctcagctcactgtgagttcaagcgattcttgtgcctcagccttctgagtagctgggagcacaggtgcatgccactatgcctagctaatttttgtgtttttagtagagacggggttttaccatattagccaggctggtctcaaactcctgacctcaagtgatctgcccgtcttggcctcccaaagtactgggattacaggtgtgagtcaccacacttggccagccttgatttatattaaatcactgttattctcaacatcccagttatattttcatatttgcacctctgaatagacatgtaaagaacaaattagcagactgggcgtggtggctcatgcctctaatcccagcactttgggaggctgaggcaggtggatcacctgaggtcaggaactcgagaccagcctggccaacattgtgaaaccccgtctctactaaaaatacaaaaaattagcctgtcgtggtggcagccacctataatcacagctacttgggaggctgaggcaggagaattgcttgaaccctggaggcagaggttgcagtgaaccaagatcacaccattgcactccagcttgggcaacaagagtgaaactgcatctgaaacaaacaaacaattaacagatctattttttactatagtagaaaatacatggtaaatataataaagtttccatttttacatttcttcataagtctcatgacttactgatttgctagagcagcagtaatattttatctcgtgcttatattctagaaatgtgatattcacagatgtgaattctatacttcgctacttggctagagttgcaactacagctgggttatatggctctaatctgatggaacatactgaggtaagcaatgaacattttgttgtgtgtgttttgtcttatgcttctgtttttttatgggaacctcatcatttattgttggcttatgaactattctacttaaggatattaacagagtgttaattatatagaccaaggtacagaatgctcatcttgtttttttgtcacaaaaaaattctttttttgtaattcctaagtttgaacctttagtcccctaccagctgtacttttgggagcatttagtgccatcttggccttcacagattcctagcatttcatagccagatggggctgtatagatcatctcatccaactttcttactttacggataaggcagcaggcctagaaaagttaagtttgaacagggtaacacgcatagtttggatcccattttcttttctttctaagtgtatgccttgtttaattaattatttcagtagtaaattagctttatatacaatcatgtgcctcttaacaatgggatgcgttctgagaaatgtgttattaggcagtttcatcattctgtcaacatcatagagtgtacctacaaaaacctaaaggggatagcctactacccacctaggctatacagtgtagcctattccttctagactacaaacctatactggcaagttacaatactcaatacagtaggtaattgtaacacaatacgtatttgtgtatctaaacatagacaacatagataaaactataatcttatgggaccattgtcatatatgcagtctgtcattgaccgaaatgtcattatgcagtagatgacagtactgctttttagatgctgctttttttcctgtttgtattctgctctaaccttcctaaatctcataaaattcaaagtacacagaatggtttctaagtactaacttttaaatttttcaagtaaatgaatctgtttggctaggtaccatcccttcggttcattcaggttggcttatttctgccaccaattctcaaattcttattttcctgttctttcctgaagtgccccgccacactcctgtaaaaaaaaaaaaaagcagaaagcatagcaaaataaatgtggcatttatttaagttctattttagattttaggcaatcagaatttagtccacataatgataaattgtataatttgagaaaggaaaagcatagtaagagtgtactgttgctctagttaactagaatttttttatggtctttctttttataagttgaaatgttggaatgcatttcttttctgtcttttatgttgacagattgatcactggttggagttcagtgctacaaaattatcttcatgtgattcctttacttctacaattaatgaactcaatcattgcctgtctctgagaacatacttagttggaaactccttgagtttagcagatttatgtgtttgggccaccctaaaaggtatcaataattcttaataatcctctgttttaatcgtttaatattttgctggataaaaattatatatatttctgtgtgtatgcatgtatgtatatgtgtgtgtatatatatgtttagacagtaacttaggactttattacaggggaatgacctccctggctgttttattcctatccagctacgggaattccctgtgtttttctgccgtcccgtcgtctgtctcacaaccccaacttccttcttgcctttggagctgatcttattcctgataaagaagtccccatcccatttatgttagcacctctcctacttcagctattattttactccagacacttgtctctgacttgaaaaaagccattattgctcagtgagtgtgtgactgggaggttagggagtagtgggatgatgtggagttgtggtttttcttggaggtcacttccttcttctacaactagtttggaacaagtaagaatatgctttttccaacttggaaagacagttttttcaaaaacaactttcttgaggtataattgacatacagaaaatcacacttatttaaaaatgtatattttgataaattttgacatatatatgtgtgtgtatatatacatacacacacacacacagctgtggaactatggttacaatcaagataataaatatatccaccacccccaaaagttcctcatgctgctttgtaatcatccaccctcaccaggtcccaagaaaccagcatgcccagctttgcatatttttcgtcttcagttggttgtatctacggttatggaacccatggacacagagagctaactgttttagaaaacagttcagtgtatatccagatatttaacatttcattttctttagaagcacaactttaagccatctcaattacttcaattagtcacaactggaactttgcttttgaagctgcagatttattgaatagtttaaaattatctttgctcataggaaatgctgcctggcaagaacagttgaaacagaagaaagctccagttcatgtaaaacgttggtttggctttcttgaagcccagcaggccttccagtcagtaggtaccaagtgggatgtttcaacaaccaaagctcgagtggtaagcctttttttctttttttttaaaaaaaaaaacactttgggaggctgaggcgggcggatcacaaggtcaggagattgagaccatcctgaataacacggtgaaaccgcatctctgctaaaaatatacaaaaaaaaaaaaaaaattagccgggcgtgatggtgggcgcctgtagtcccagctactcgggaggctgaggcaggagaatggtgtgaacctgggaggcggagcttgcagtgagccgagatcgcgccactgcactcctgcctgggcaacagagcgagactctatctcaaaaaaaaaaagatgacatttcagtctgtctgaggccctaggtctgaaaagacaattattcctactcataaagtttattttcttttaataaatttaaaaggatcttcttgcaagaatctgacatttttaagtcttggtttcacatttaattgttcatctatataaagccctaatctttataattatatagctaaatattttgatcatccagtgtatgtcccttaggcaatccaaactccatataaataaaacctcattaattttacacctttgcaattttttctttcttctgaatctcctggtttttgaaccattgagcatcaagtcctgggattctgcagcactttttcattggttctgtaggaaaatgtgacatagtgtacagtacaaaagctccttttctctaccagagttgctccactttgatctgttttacactttaggaatgtgttgtaaagttttgatttaattaaggttttctaatgtaaaatttgaaaactactgtctacttggataaagatagcccagtccactcagttgttttggctacaaatctttactcatccttcactgtttttcacatttactcaacgagtcctgttatgacttctcatgtgtgtagatttgttttctgtccatcttcagtgctactgcactttgttgaggcctaatttttccttgcttggtttaataccataatctcataactaaacttccttttgtctcatctttctctagttcagggtatcactttagaaaacacaaatccacggtcctattatccctgaggactgactcctcattgcctaaaacttaaaagccaaacttaaaaggtcctctgtgtttttgacttaatctatttcggcttccttccctacccacccaatatgcattcctaacttttcatggacattgcactactttttcctgcctttgtgccttacctactctgttatttatttacttagaatgaataccccatatacttttttttttttttttgagacagagttttgctcgtcacccaggctggagtgcagtggcatgatctcggctcactgcagcctccgtctcccaggttcaagcgattctcctgcctcagcttcctgagtagctgggactacaggtgcacgccgccaggcccagctaatttttgcatttttagtagagatggggtttcaccatgttagccagtctggtctcaaacttctgacctcaagtgatctgccatcctcggcctcccaaagtgctgggattacaggcatgaaccaccgtgcctagcatcccatatactccatctgatacatttctacttatcttcgaggtccagcttggttcttaactgcttttaagcttttcctgataaacctaggtattgctgattaatttcaactgagtgccctaacagcaccctgaacatatctgtattactggtatttggttttatttatattcttaaccagattttgtaccctcaagtgtagggatgatgttctagtcatcatatttttcataaccagtgtgtgtagtgcctggcacatttgttgaatgagtgtgttcttagacatttaaccataagactttttgttgtgatggtggttgtgtttttcaggcacctgagaaaaagcaagatgttgggaaatttgttgagcttccaggtgcggagatgggaaaggttaccgtcagatttcctccagaggccagtgggtaagaaaatgtaactcacatttataattgaatatatttagtgggaaagctttaaaacagtgattaaatacttaaagtattaataggttaataatatagaagaacataagattttaattgtgagagttaaaattctaaacgttttaacagtttttatgttattaatagttaatgttgatttaatttgtagttttagtttgtcaacttagtaaaagagacattttagttttatcctgacagaactttaattatgtaattaacaaaatatccaaaaataagaaaccttaaatttcatttttatttttagatttttgggctttcatttaattggatttgtatttgtaccctgagcaatccttttaattagcagttgaagttataatagtattggtctttaagttattttttttccccaagtgaaggggagtcctgaaaagcctgttcctattcctttctttccattaggtttcccaaccccttcatctcttggcacccatggaaagtagtatttgaatagctcattagagaaaaagactgttctgtatggtgatcaccaggctggggctgcttcagcccttgcccaccattccccaaggctgagaaggaagtctttgtctttgcacacctgtcatcctatttgaagtatactggacaagctttataatagcgtccttccaatgatgttaatataataaaatacctcttattaaagcagttagcctcacttagaaaattaaccattaggaaaatgttctgccatgttttgtaattgaggtgattattttttccaaatttaagatttccaaatttaattttttcagattttgtattctatcaccataatgaagttctcacctttctatagtacacagtagaaactggaagatacagaaacaattttcttttagcgatgtatttaatacttcttcacaaactatttcataagcatcattaacagtaaaattgcttttagaatttcacattttgtctctgcttttctatgtttgctgattcaggaggtgaaataaagggtagatagaaggagatgaaacagaagtgatgactgtggaaaattcacagacttgatcgttaaatggttgattggtaattgactaagtggattcaggcataaataatacttaccttacatggtttaatatctatagacatcttgggttcctaccatctagtattctgctactgtgcacttggtatgagaggtcatgattgtcctgttggatagtgaccttgatcgtctaaaagccacctttttttggcagtggccatttttagctgcgccacttgaacatttgtcttttttaaatcttttcatattttgcgtcactgtcacttctgggaatagtgagttccccatgtttgtatatttacagtataatatatatttacctgttgtaaattatgtcagagactacgctcatgagacagttttggggtcaggaatataaatcagtatttagttttttttactatgcatagttttcatcatctcttcttgtactgttaaagagtttttctttaattactattttttcattttttcttttctgtgtcttaaatgaaaggccagaaggcttggcttagtcttttattcttattcttagctaacatatacatagcacctattatgtacaggtgctaccacatgctttacttatagtaacttattaatcccaacagccttctgaggaggcactgttgttatctctgttttacaaatggtttcggaaacagattcatatgttgtagtaacttgccaagctcaaacctctaccatctggctctagaatccatataattaaaaattgtactacatgtatctgttaacatatggcagaagcccaattcagcatcagttctaactcatgcagcatgattcttttgtgtgtgtgtgtgtgtgcgcgtgtgtgtgtgttttagcgattctgatatagagtcactctttaactgatgattttagttgtcttgtgacttatagtcctcttagctttcttgaggtttggaattgttagacctgcagatttagaaataacatttttgaaataatgttttgatctcatcacctttcttaaattaatttctgtattttaaagccaagcacattaactgtaaaataataggtactaattgttaatcttttcttgacaatggttataacatgttattgggtgcaacgccctcaagttaaaagtacaccacaatatttttcttcctgggaacttatggcccttcatttagttttatttttaataaatttttaattttagaatagttttagatttacacaaagttgcaaaaatagtacagaaagtttccatgtaccctgcacccagtttttcctaacattaacattttacattattatggtacatttgtcacaactaatgaactaatattaatatgttattaaactccatccttttttgggattttgttagtttttccctagtatctcttttctgatctaagatttcatctgggatatcacatacagccctttttttaaaaaatttttaattaattaattaattaattttttgtatttttagtagagacagagttccgccatgttggtcagcctggtcttgaactcgcgacctcaggtgatccgcctgccttggcctcccatagtgtcgggattacaggcatgagccactgcacccggcgtacagccctttattatatgtataaagttttgaatagccctaaatatgttgcattgtagttgtttgcattagtctttgtatataaaccctccttttttttttttttttttttgacatagcctcgcactgttgtccaggctggcgtgcagtggcgcgatcttggctcactgcaacctccatctcccaggttcaagcaattctcctgcctcatcctcccgagtagttgggattacaggcgcccaccaccacgcccagataatttttttttttttttgagatggagtcttgctctgtcgcccgggctggagtgcagtggcacgatcttggctcactgcaagctccacctcccgggttcacgccattctcctgcctcagcctcccaggtagctgggactacaggtgcctgccaccactctcggctaatttttttgtattttttttagtagagacggggtttcactgtgttagccaggatggtcttgatctcctgacctcgtgatccacctgcctcgacctcccaaagtgatgggattacagacgtgagccaccgtgcctggccaatttttgtatttttagtagagacggggtttcaccatgttggccaggctggtgttgaactcctgacctcgtgatctgcccgcctccgcctcccaaagtgctgggattacaggcatgagccactgtgcccggcccaagcccttcttaaagttgaatcattgatctgggatgctaatgacttttaaaaacttgattgatttgaaaataatgtaaattcataaacttttatgaatttttatattattttattttataaaataatataatttcataaacttttccccctcccatatggatatcaactgagatcaaacctgtgtgggaaaccaggtaactatcttaaaactgtacaactgctggccgaggcaggcgggtcacaaggtcaggagatcgagaccatcctggctaacacagtgaaaccccgtctctactaaaaatacaaaaaattagccgggcatggtggcaggcacctgtagtatcagctacttgggaggctgaggtaggagaatggtgtgaacctgagaggcagaacttgcagtgagctgagatcacgccactgcactccagcctgggcgacagagcgagagtccgtctcaaaaaaaaaacaaacaaaacaacaacaacaaaaaaaactgtaccactgctgccatcattataatttgaaactaatacaagttggtgaaagctgattaaacttccttgcttcatgccttgtcagcccaatcaactgtatttcaacatagtggtgtaacatattttcttttactcatgtacttgatagaaggagggtgttgatgtgtgatattatcaacagtgtctctgatctgtattcttccttacaattgtcagctgctcacaggaacagcagaacagtgtttttgtagattctgattcattgagtgttggtgctgatgagacctttgggattatttagttaaaattcttttatttttaatctccgtgacatgagtttacctatataacaaaacttcacatgtacccctgaacctaaaatagaagttaaaaaattaaagttaaaaaataatcttttggctgggtgcggtggctcacgcctgtaatcccagcactttgggaggccaaggcaggcggatcacgaggtcaagagatcgagaccatcctggccaacatggtgaaacctcgtttctactaaaaatacaaaaattagctgggcatggtggcgcgtgcctgtagtcccagctatttggggggctgaggcaggagaatcgcttgaacccaggaggtggaggttgcagtgagctgagaacgtgccactgcactccagcctgggcgacagagcgagattccgtctcaaaaaaaaaaaaaaaaacttttattttggcatctgagaaaaccaaagcctagagaagtaaagcggcttttactaattgtcatgtgctcttttcatttagtcatcacagtgacagtctcagaagagcttctctccagtggcataggtgggcacccagttctcagtagtagtaggtcttattaaagacaaacagtggaaggtagcgttggaaacaattttgaagcagctttactttaattaaatgatcattctttttgataaaaagaaaaaggagaatctccttaaggttgcaatgtttgtaaataccttgtcccctctgtgagattttacatttgaagttgtttcttataattgttttatatatggtatagtcttttttttttttcctgtcagggtcagattttctatcacagtactttttgttagaaaataaaatatgacttgggtaccaattagaaggacttttgtttagttctcatctcctcaaaaaggttaagtttaagtatttagttaaaacatgttaatgagtttctttgtgaaatgtttttgttttagttacttacacattgggcatgcaaaagctgctcttctgaaccagcactaccaggttaactttaaagggaaactgatcatgagatttgatgacacaaatcctgaaaaagaaaaggaagattttgagaaggtaattaaaagtgtagtgatgaccctttgccagaaaagtgaattaaagttacaggattacctaataccttcatggtatgaaaataaattttgttctcatagctgcttttttccctatctatatattccatatctgagacctaagccaagaaatgtcgagctcccataccaaaaaacttaagagttatttttcctttccccagttatagagtttacctgaatgatatgttttcctataataccaatttattaaatggtcactggaggcaggttttttggtcatataatcttaagtttatgaatgaaataaacactaagtaggtattggaaaatgtgaaggtttcctagcctcttatctttattcagaagtatggcagtgtattcaaagagagggcaaatgattgtcagttctcccagtaatgaccagcttttccaaagtaaatggaaaactccatcgtgagatcagctttctcagctggaaatttggaggctaatataatgagtatctatctgttttttcttttttgatctaatatcatgtaacttccacaaccattttcaggctaaataagactgatggtctatgttacatttgcttaaatgcagtatcaagggttgaaaatgcacgaaaaaatgcaaaagatatactgatggttattttggtttcttactacaggttatcttggaagatgttgcaatgttgcatatcaaaccagatcaatttacttatacttcggatcattttgaaactataatgaagtatgcagagaagctaattcaagaagggaaggcttatgtggatgatactcctgctgaacagatgaaagcagaacgtgagcagaggatagactctaaacatagaaaaaaccgtaagccacattgttttatattttaattgatattcttatattgtgcttctttagtagaacgtgatttcttttttgtgaaagctgctagtttttttgtttgtttgtttgttttgagaaggagtctcgctctgttgcctgggctggagtacaatggcgcgatctcggctcactgcaacctccgcctcccaggttcaagtgattcttctgcctcagcctcccaagtagctgggatgacaggcgtgcaccaccacaccttgctaatttttgtatttttagtagagacggggtttcaccatattggccaagctggtctcgaattcctgaccttgtgatctgcctgccttggcctcccaaagtgccgggattacaggcatgagccaccgtatctggcaaaagctgctagtttaaatacatttgggtatatgactcatttgtcttagaaatcttttttcttcctctatctttatgttcttgttattttattaacatcacaactgcatgtgaatatgcccttagtatctcacttattatgtgtagtcttttgcattgtattcattcaatttgaaggattccttctgcaacattttacagttttcttactttaaatacttagcctttctataatacaatgtttgatgataatgttgtcacccaagtcttccttttggcatgtgggtaaatatgaatataatatatagtacaagctcagtactaacctgtatctctgaaatatcacttgactgaagagcatatctttcttattcatggcttctctcctgaacttctaaattgggtgattttcattctgtaattatgttgtcagaacttcactataattaaacctggagtgccacatttgggaagtattagtaaattaaaatagttataatgagtcttttttattttgaaaaggttttctacattttcagaggtggctaaccaatggacttttagacctatcttgattatttgagggcaagtgtcttacatttctagtagcttccacagaaaattattgtttaacagtttgtatgcatacagggcaggtttttgctagatattgtgatatagagggagccatagccacttggaatgtagagtccttttttctggtattaaactcttttctttcctgtgtcactgttttctatcacctcttattttcttggatccaagagtatcctgcttctcattgggatgatgaaggggctttcagggagcccatgagctcagactctcaacctgagctgtgttctttagataggcacggtctgtagtgccaatgcctgtgggaccttagggccggaccaaaccattctgtcccttaggcatgaggtggcaaaataagaatgcttctgctttaaaggcagaatgttaaatttcagggagatgagaagagaaggggctggcccgttgtgccatgatgggaagggaaacactaggtgagcggagccttcaggccttgtactttttcttatgcttaattgataccacatgagtggaatgtattgatgttaccttttctaaaacgtatttgtatttgctaaatgtattgtgaaacttctttaattaaaaaatgacgcatttgctcttggtactggatactggaaatattacagtgtttttaaactaacacagggtggttataaaacaagaacatgaaaatttatatcaaattatagcactatgagaataatttgaatttaaccagattagtgaaccgtaatgtaattatcattttatagctattgagaagaatctacaaatgtgggaagaaatgaaaaaagggagccagtttggtcagtcctgttgtttgcgagcaaaaattgacatgagtagtaacaatggatgcatgagagatccaaccctttatcgctgcaaaattcaaccacatccaagaactggaaataaatacaagtaagtatatctccttcaatatgctaggtagccatctgtgcttttgttttgatcttctttaaacatggagtacaagcaaaatagtcaagaaacctggccttttgttcatccatgggttcactggctggtggccttctgtaaaggcatgtagcctttcacgggccgtttactcacctgtcaattaaggttctaccacattatttctaagatcacttccatctatgaaagtcctgagtctgcctagagttgctttttttgtattgattaggtatactgtgatgtacatctttaggtgaagatactttgcttcctgtaataaactttgagtctactttgcacaaattgattcctaaaagtaatagtattgaaaacttccagaaatatgaacaatacaggagagtaacatgtgtttagattagttttcaatgtggatttgtaggttaacgaatctttgttttaaatggaccttttccaaaaaaaaaaaccctactttataaaataaatcataaaaaatattttttaatactttgaagaagcgtactacacataaatgctgaattaaaatttctgaagagaatggtaaatgtaaatgattacttggttagctgatgtgacttactttaaactcatgggtgctgacatgtctgtccatatatagacaaatacacatgtgattatatgtgcatacatatcatttttctcaggattactccttgttttactaagcaaatcctttcaatacatttggaaaagtgactttggatacacattttcagtgtcaaataattgcaaagcataatgcagtagcatcttaatcaagttgtatcttaaaagttagaatgtataatggctgggcacagtggctcatgcctgtaatgccaacactttgggagtctgaggcaggaagctctcttgaggctaggagtttgaaaccagcgtgggaaacatagcaagaacctgtctctaccaaaaaataaattaaaaaaaaaaactagccaggtatggtggcacgcttcagtagttctagctgcttggaagactgaggcaagaagattgcttcagtccaggagttcaaggttacagtgagttgtgatcatgccacttcactccagcctgagcaacagagtgaaaccctgtctctagacaaacaaaaaggaaagcattggttgggtgtagtggctcatgcctgtaataccagcactttgggaggccttggtgggtggatcacttgaggccaggagtttgagaccagcctggccaacatagtgaaaccccatctctactttaaaacaaatacaaaaattagcggggcatggtggcgcatgcctgtaatcccatctatacctgggaggctgagaatcacttgaacccaggaggcggaggttgcactgagctgagatcgcaccggtgcactctagcctgggtaaaagagcgagactgtctccaaaaaaaaagaaagaaagcataatgcactaatatatatatatatatatatatatatatatatatatatatatatataaattcaaattgatactgcatgtaaattgtatacattatcttagtcagaaactgttttttagactatttcatcttaaatgtaattttgacctaatgattttctggtcttctgtcggttttttttttttacacagtgaatggagcactgtttttgagtgtgtttgagtacttttaagacttttagggatttacttgagtaagggattactcagaacagagtgagactccgtctcaaaaaaaaagatgttcaaaagctaaatttccttaaaattattacatgtattatttattgcttcctactatgttatacattggccattacagaaatattatgattatacaatttgccaagccaatacctaattttgtattagattgcaaatttgcttttttgtttgactgctaagttgacaactgactcattgttctcaaaggctgataatgttttgatacactttgagtattaagtcataaaaccttttggtttttaagaatctcttaacttgtaaagaattacattttaaattagtattgttgtttataatgcttaatctaagagggaaagggtaaaatgttttgtttattttattttctttttttctagtgtttatccaacatatgattttgcctgccccatagttgacagcatcgaaggtgttacacatgccctgagaacaacagaataccatgacagagatgagcagttttactggattattgaagctttaggcataagaaaaccatatatttgggaatatagtcggctaaatctcaacaacacagtgctatccaaaagaaaactcacatggtttgtcaatgaaggactagtagatggatggtatgtttaatgttacttagaattgacaagaagtaaggacatagtagatcagtgatttttaaactgcttgagagatagggaaggtgattgggaggagggggaatgggtaggcctatagaattcctgattcttatcttcttctcagccagtgcattagggcttccccttcttgttttaatgccacaaataatggagtgcccactggggatcatggaatgaaaaacacacatgagggcacatcctctgcaggtcttagcatttaatagaagaacagttttgactttctggttcttggtatatttggttactgatctctactctctgctgaggctgaggtttttctttttggctaggtcccaagaaggttaaaatacccttgaatcgaagtgaagatgtaaaagtttatcttgagctccatgaaaagggtattactgcatacttactgaggtttgcagatccctgcagaatattaatttcctacatatatttttgttttattccaaagggctttataaagtatattcatatgtgaatgacaggataccatcttttttctgattctcatggtcctatgtggaatagggaccttgaaaatgtttgataaataaaaatgtatgaatgcatgggatttccatatttgaaaatgtcaccattgtgtcttttttttcaaatgtgcttctactgtttccagtagtgcatttattttactgcagtatttgacaggtcagcagttatcctgttccttgaatttgggctcactagtattgcatactacctaattagtataactagctcttagacaaatgtttaacaagctgaatatgatttattattgattaagtatcttctactctccacatctacacattacaaaatttccttggtacttaaaatttacatatttccagggatgacccaagatttcctacggttcgtggtgtactgagaagagggatgacagttgaaggactgaaacagtttattgctgctcaggtgcgttacagtttcttttccagcttgtctgtttgaaatttcaggtacttctattactgtccctttactctttattatctctgttgttctttctattccttgtttgtgccttatgatccaagggcagattttttttttttttttaaaacaaacttttttttttttaaagtttatcactgcttataatagtgaaaaattgaaaatgtcctaaactcctaagctagatttggagaaaggcagctgaagtatttttagcagtgaattatatgacttgactgtgagcagtctgtagactgaacctttacagtgaactgttaagggtaaccaaattagtttgtatacactgagttttatatttcactagaagtaaacttgaaagtatttatcgagttttttttttttttctaaacatgcttagcatgaaataaaggcaaagttctaattaatactgcttgcccttaaaatcatgttgttattgttttttagggctcctcacgttcagtcgtgaacatggagtgggacaaaatctgggcgtttaacaaaaaggtatgtatgttaactctctgccttcttttctcatgcttaagtcccaaataatgtacaagtagaagtcattactgtgctcatggtagagaaaagtttgtgaagaatattaacattttgcagactttcaggaaaatggaatgttttccttttttaaatacacgaagagcattaattaagcctattaactattccaaataagtaacaatgattgaaacaaacaaacttggaattatggggaacagtaatatttttttccttaaattttttatgaacactctgcatttcatttttctgctttcaagctgcgagctctctgtaagaaggtattacttaatgcttttatttgccttaaacatagcttttagcatattacatgttaaaacctgagatgttatatggctttgaagcacaatcacatttatataaaagacttgcttatacaaacgcattgaaaatgcattattcctagtgttaaaaaccatgtcctctggttttcttagtgccaaggggaatattgggataactctattctaccccattcccttgtgtgctgagaggacatagaattctaaaagtatgtatttcattgagttgtattaaagtttcattaattacagttcctttgtcttactgaatccagcttttttttttttaactgtttcttaactgaaagtcaaatgaggaacattgcctattgacattgttaattactaattggaaagcagatgcttggacactataataaggcaaatcattcaaatgccatgttttaaattatggtttctgtgattgtgttctgtaaattcttatttgggattgctgcttgatggtgctgatgtcttgcctcaagatatagttgcttgtttcgcatgtgtcttgaatttgttttattttggtctttcgtgtttagtttttgatacataaaggaattgttaattggttcttgctgttgctgcagttactaataataaatatgagtagaatttgctggcaaagttaacactggtgtacttttcattaacaatacaatttttactgattttaagttttaataaagttaaacatggacacttcagatatctgaaatatattttactatagtcaaatagttctgtagggtctgttaagatgaacaacacattcctctctctatctactttcatagtctccctggagaaagcactttcatctcttctagatagttcttttggtatttattacttatatttcttttttttgagatagagtcttgctgtcgcccacggtggagtgcaatggcacagtctaggctcactgcaacctctgcctcccgggttcaagcgattctcctgcctcagcctcttgagtagctgggactacaggcatgtgccaccatgcctggctaatttttgtatttttagtagagatggggttttactgtgttcgccaggctggtctcaaacccctgaacttgtgatccgcccacctctgcctcccaaagtgctgtgattacaggcgtgagccactgtgtccggcctgttgcttatattgctgaatgaaatatatgtgttactacttttttagctatgtttagacatattagttgacttcccgtgatggaagataaataatttgaccttttactttttctcctaactttttggtttgcttgtagttgattgtcttgctttgtctctccctctcatttgcttattttttgtttttgtttttgtttttctgttaaaaaaaaaaaaaaaagccaggttctcatgcctctactcccagcagttcagaaggccaaggtaggaggatcgcctgagcctgggattttgagaccagcctagacaacatagtgataccccatctctccaaaaaaaaaaaaaaaaaaaaaattagctaggcctggtcgtgcatgcttgtagttctagctacttgggaggctgaggtgggaggatcacttgagcccaggaggtcaaggccgcagtgagtcctgatcacaccactgcaatccagcctgggtgacagggtgagactctgtctcaaaagaaaaaaaaaagaaaattaattttttttttttcctctccccacccctgcgtactctttttttcttttttctttttctttttgtagcggaatctcaccctgttacttaggctggagtgcaatggcacaatctgggctcactgcaacctccacctcccgggttcaaatgattctcctgccttagcctcccgagtagctgggattacaggcacccaccaccacacccagctaatttttgtatttttagtggagacggggttttgccatgttggccaggctggtctcgaactcccgacctcgtgatccgcccacctcagcctcccggagttctgggattacaggtgtgagccaccaagcccccctgcatacttttctgtctccacaagatgtgcaaatttcccaccaagatattcagatgccttaggtatactttcagtttcattttggagacatttgccagagccttctgtgctgctctgtaacctgatttggattcatggcccattggtttctgaagcatagctatcttcctaggtctcttcagcatcttcctagggattccctttgcttttattctgtaatggacattacagaacattgccccattcttggatcttcttttttttttttttatattaccttcttgctttcctgaaggtaatacgtcattctttggagactcagtccagctccctgacaaggggaggatgggatgaagaaaattttgaaaccttgtatctgacctgtgtttttagtctgaaatttcatgatgataggccatggtgagggtctgttttcatccgcatcattggaagaacatgtgacttccagtctagaaactcattccttcagttctgggaaattttcttgaattctctccctttccctttccctttccctttccatcttttattttctttctcttgtcttgtcttttctcttttgttttgttttatttttttctgagacggagtctcactctgtcgcccaggctggaatgcagtggcacgatctcggctcactgcaacctctgctgcctgggttcaagcaattctattgcctcagcctcctgagtagctgggattacaggcttctgccactgcacctggctaagttttgtagctttagtagaggcagggtttcatcatcttggccaagctggtcttgaactcctgacctcttgatccacccgcctcagcctcccaaagtgctgggattacaggtgtgtgccactgtgcccggctttgaattctttttctttcttctctattgtgtatttcttctcctggaactcttcttgggaagatgttgggcctcttggactggtactcttgtttcgtgttctgtcttattttccttcttgtcttttagtttatcacagatctacttaatttttatcttcccacctttctgttgaattttatttatgctactatagttccagtgtttctcttgttctctgaattttcaaaataactctctattcttgtttcatggtattaatagtagggttttctgcagagtagtgtctcttctccccaatttgtttattttggtttctttcacgttaaagatatttctcagatgtctggttagagccttggttatctgcttatgtttaatgtggggaaataaagagtgattggaagcctgaagaatgagagttgggctttcaactgagcttcactgtacaatgatctggctgggctagtttgttggagaaattccatgtcagtaattttatatcttttctcaaggattaggcagttttcccagaggggcttcattgaatcgccttcctgaagtgtgaagacctggctgccaggctttggagccaaatgggggaagactgctgagggttttataaatctactatcatacattcacttattcccattgtctctcgtgcagtaccctttcctttggctctttctggtatctgccagaatctagataccctcttattcacagagtaaacttccagtcttttgtcaaggtaggggagaggcagttgcctggttatatggagtggggaggggatgcttctatgtttttcagcttccagaattttgttgctgttatcttttttgtttttttttgagatggagtctcgctctgtcacccaggctaccgtgcagtggcgtgatctcggctcactgcaacctctgcctcctgggttcaagcaattctcctgcttcagcctcccgagtagctgggattacatgtgcctgccaccacgcccagctaatttttgtatttttagtatagacagggtttcaccatgttggccaggctggtcccgaactcctgacctcaggtgatccgcccacttcggcctaccaaagtgctgggattacaggcgtgagccactgtgcccagccttctcttcttttattatattaatccttctggatttgttcctttaaacaaaacaaaacctttcatttcttttaagttgggggttgggaaagagtgaaagttgatgagtattttcagtctgccttttttct

SEQ ID NO: 47 - DNA, 32742 bp, Homo sapiens
  source 1..32742: mol_type = other DNA
ggatcgcgaggggccgctgggaccgagtcccggacgtcgcgacgcgcagggggctgctgcggccggcggtctcgggaaaagtgaggggacggaggcgcccaagcaacgtgggtttcgggaactgtgagtatttcactttgcgtagagccccctcgggcaatgcgacccagaaccgagggcttctttccccccgccggggcctccctcccgttctccactcggaacaaacagcctgcagttcccgcagctgcagcgcgggccgcggaacatgcgccgggagcggggcccgggcgggactccggagctggtactgctccccccgcgctccggcgccgggcctcgccgtgcggcctccttcctcccttcctcccgcccggctcggccggaggcggcggcggaggggcgaggcgcggccccccttcggcggcacctcctccccgggcaggcgcgggcggagccgggcccgcctcagccagccgcggcgggagcagcgcagcgcggcgccgcgggcagcgagctccgcattcgaacctccctcgcaaagacagtctccgccccacaatgcaccgcggcgggcagcctttgaaaaagcggcgcggctcgttcaagatggcggagctcgaccagttgcctgacgagagtgagtagcacctcaaagcaccccccccttttcccgcctgctgcttgcccagcggttgcaccggccgggacggacggccgtgccctccgctgggcaggtgggctgactgccagccccactgtggtcccctagtcctcccactccggtgttgccgccgcgtcgccgcctttgttatggtgtctgtgtgttggtttctggggttgtgtgagcgccagggccggaaaccgagagcccgggagtccagcctgtgccaggcggaggcggtggctgctcccctggcgccactccggcccccagccgaggtggagggaagagcggcccctgggcgcgggggctgtcctcgccgcctgcaccactcgcccggcgccgagagacgcccgccggggttatgtaactcgcctgtcccggggccgggggagggctcgggctgggcacggggtggtccacggccccttcttcttgccccagcctctgatcttgtcctgtcacagctcctgcctctacgggcacttgtgatcttcactgtcctccccacccccccaccggtgtgtccacccctggaagtgtttccgtgtcagagggttggccccttcccctgggaccacaggtggctgtggacctttcctgagatcatccagcccggatactcagtgttcaggtagaccccgtcccgcagactttattctatatgtgtcttaagagccataaaggtacctttatgcatggatgtgaccaacacagcgtacgtgtaccctgcctgacacccaccctagggcattgcctcccctaaccatgtttactcaccctgacatctaagacatgtatgctcacttgtgttgagtaagtaaaagcaccaattccatagtttaagggcaatggaacttaattttgtaatttacaatattgcataaattatatgaaaagacaaatatgttatttaattacaaaaaaaagtcctgaatccactttcactattcagtttatacatatttgtgaaaggctcaattactattgaatcttatctatgcacaaggcaaatggacttaaaaatgaggactcaacatactaccgattccattttctttgtgaggtcatgtgttcttagtaagttataaagttaaaaattcaagttgccaagctggtgaaaagtcgtattaaaagtgtttgtgttttaaatttgatagagagcagcactaagtccccaaggaactttgtccatgatagaactgttctcttttgtgatgtccagtagggcagccaagctactagccatatgtagccatggaacatttcaaatgtggctagagtgatggaggaactgaattttgaattttatttaattttaacttgcatagtcacatgtagctagtagtcactgtattgggtagggcacagctattgaccagtcatgagctgtactgtttatttgtagaatacaattgattgtgatttattttatttatttatttattttgagatggagtttcactcattgcccaggctggggtgcaatggtactatctcggctcattgcaacctctgcctcccaggttcaagcgattctcctacctcagcctcccgaatagctggggttacaggcatgtgccaccacgcctgcctaatttttttgtatttttagtagagatgggggtttctccatgttggtcaggctggtctcgaactcccgacctcaggtgatccacccgcctcggcctcccaaagtgctgggattacaggcgtgagccaccgcagctggtcttgattgtgacttagaatgctcccaaatgagtgtggacctactaagcacagtgtacttgtcatccgaaaatgtttttcatcatccttggtatctttatcataaacatgtcttatcacctcttggatgtcacaatcactagagctactgttttggttactgtagtcattctgttgtaatgagaggcattttaagtggctttcttacaactgccattaggaatatttgcttcatatcatccagcatttattgagaatttactgtggttctttgtagggacttgggatttatattagggttcaaattccagctccactttcaaattatataacctaatcatttatattactttgtgacatctctggtgcattggtgtgtatttgtgaagcgtatgtcttgtttaggtagacttcagctttgttgaaaccagggattttctttctttctttgtcatacagtgccacaaatcaagtatacataaataatttttatggaattagtgcaaagtaacaggtattattactgaaactagagcagggtcttgaaaaggaaaagcgatttcaatttgatactggaaatagcagtatgttttttggccacatttagtcaaggaggctagctaatatattgttcaggagtcgatataacattatcaataatgaaagctaccatttattgagtatttactatgaaccagatgccatgcaaaggatattacatgtatttgctcatttaatcttcatttcagttgatgtaagtgctcacattttatataaggaaattaaggctatcttcagcccagatctttcctgagctccctttcttgatatctcttgcctgtttcacatttcttcttagatgcttcaaaggcccctcaaactgcacaggtttaaaatccacctcagtcctaccccaggacagatacttctagtgattcgaatggttccactgtgcattcagctggcagggcagaaacctagagattttctttggcacttccctctctttcttttcttttgttttttttttgagacagagtcttgctgtgtcacctaggctggagtgcagtgtgcgatctcagctcactgcagcctccgcctcccgggttcaagccattctcctgcctcggcctcctgagtagctgggtttacaggcgcccgccaccacacctggctaattcttgtatttttagtagaggcggggtttcaccatgttggctaggctggtctcaaactcctgacctcaggtgatgcacccgcctcaacctcccaaagtgctgggattacaggggtgagccaccgcgcccccagccactttcctccctttcacttcccatatttaagcctttactaagtctgtaaattttaccttctaaatatctatcaattctacccatttcttaccatcagcatagcccaaactgttaccatttcttctctttaccaattacctcagcctctcattaattcagcccccttcccacaaacacacagcgagagggatcctttcaaaacgaatgtatgtcatcctcctgttacaaaccctttagtagctataagaccctttgtggtctggctgctccctacctctcagctttatgttttaccacttgtcccctcattctatcccttggggtaaattggacctttttcattcccgatactcgccagtctccccttttctccagggtctttgcacatgctgttctctcaacctggaatgctacccccccacaccccccttactttcagttaacttctaattgtcttttagatcccattttatgcttcttcagagagccatttcccatcctccctgactaaattatgtcttctttaaatctgttttttgttttttaaagagacagggtctccctctgttgtgtagactggagtgcagaggcatgatcgtggctcactgcagccttgatcttctgggctaaggagatcctccggcatcagtctccccagtagctgggaccgcaggcatgtaccaccatgcccaactaaggttttttttttttttttttttttttttcttttttttgtagagacgaggtctccctatgttgctcaggctggtctcaaactcctggcctcaagcgatgctcctgccttagccttccaaagtgctgagattacaggcttcagccaccatgcagggcctatctttatttttttttaaagatggagtcttgctctgtcacccaggctggagtgcagcggtgcagtctttgctcactgcaacctccgcctctagagttcaagcaattctcctgccttagcctcctgagtagctgtgattacagatgtgtgccaccaagcccggctaacttttgtatttttagtagaacctggctggtctcgaactcctgccctcaagtcatttagccccccaaagtgctgggattacaggtgtgagccactgtgccaggccaggcccatattctttaaatctttttgtattactatgtaacttcctagtggcagctattacagttgcagttttgtatttgtttatgtgattggttagtagccccatcagagcaggtactgtcttaattgcattcccagttccatgcataacacctggcttacctctgccctttcataccattcttccctatgcaagcacagtcacccctcctcccttcttaggacttaacctgtttcttctgcccagactcattgctttgatttcctgctctctcacagctagttttttagatgttacctcctcagagaaaccgtctgtactcaaaagtaaggtagctagtacttagagtaattcccccgtccccaccaatatcaccctgtttatttcctttatcatgagctataattattatgtacgtgttttatatatatatgtctctttccactagagtttaagcttcctgtgaggagaggctttgtttgtcttgttctttggggtaaccctcgcccctaacagtgcttatggtaggcattcaataaaatttttttttccacatcagatgggtcatgtgctgacttttcacaaagtttgagagagacacatctcacacatgagtatgaaaacccaatcatcatgcttatgaactaagaagggtagaatctttggattaatgaacacctcgttagagcaagattctaatttaatcagattcgcctgactgaaaaatccatgttcttaacctattattttttgattgctcaaaataatactaacagcattatatcaaaattaactgtgtaatatatgcattgttctatgcacttttacatgtattaactcatttaatcctcattttacacatgaagaaacaatagcacagagaggcaaagtaacttgcttaaggtagcatgcaagaaagtgtcaggaccaagattcaaacatagctagtctcaatctagaacctgttttcttaaccactatgctatcctgcatctagaaaaaggaaagaaggaccggttgcggtggctcacgcctataatcccagcactttgggaggccgagccgggtggtcacctgaggtcaggagttcgagaccagcctggccaacatggcgaaaccctgtctctactaaaaatacaaaaattagctgcgtatggtggcatgcacctgtaatcctagctacctggaaggctgaggtggggagaatttcttgaacccgggaggtggaggttgcagtgagctgagattgcgccaccgcactccaacctgggtgacagagtgagactccatttcaaaaaaagaaaaagaaaaaagaaaacgaaaaagaaaaaaaaggttaaaggtgattggtcagaatccccaagatatggttcctgccttcgtggagcaggagtggatattcttatggcctatatacctcttccttcagatctctgcttaagcatcacctttcatagaagctcatcatgaacaccttatatacaaatagttttccttccctccatccccaccctgcgtattcttcttcttctgctttattttttccagagtgcttatcattactcgatagctgtttttgtttgcctcccatcactagaatgtacattccatgagagcagggactttgactattttgcttgctgttgtattcccattgcctagagcaggtagggactggcatgccatcagtactctacatattcagtgagtgaatggttactactttttctcaaatgcactgcatatcttttggtacacagatgtgtgtattgtctactattgctgctttacagttgtgtttcattgtttgagactttttagcaagattttatgtcattcacccccatgactttactgccttttgtcattaagcttcatttgccatgcagaagcttttatggtgtcctgttaactattcttcacatctgggcaagagagtagagtgaaagtaagtgtctttaatgctaataggtgtctgtttcacaagtctcttacacagacctgtggaggaaaaagtcagttgaggtttagtgatcagagatgcatagtgtttaaggatctgagatgaagtgtttcataactgccatactttatctgttgcttctcattttaagtctgttatccatttatatgagatgtaaatcatagctgcttttgttaaatagcaaggaggattaatccgtcctctctgatttttgttcctagttcatgttcttttttatttaatcccctgagatcatccttaattattatttttcagatgacttggactttgcaatgtatacatccaattctgagatttttaaatttagtgctttctcactctcaaaaagcttctttctctattggtttgttttttttttttttttggacatggagtctcactctgtcacccaggctggatggagtgcagtggcgcaatctttgctcactgcaagctctgccttgtgggctcacgccattctcccacctcagcctcccgagtagctgggactacaggtgctcgccaccacacccagttaattttttgtgtttttagtagagacgggttttcaccgtgttagccaagatggtcttgatctcctgaccttgtgatccgcccacctcggcctcccaaagtgctgggattacaggcgtgagccaccgcacccggcctctctattgatttttctactttccctacccatagatcctataattcattcacaccagaacctgtagcctgatgtttctcaaagtgggttacctgcaacagaatcccctgttgtttattaataatatagattcagtctagattttgcatgtatgaggagcttccttgttattctaatgtcttttttatttttttgaggcagagtcgtactctgtctgtcaggctgaagtgcagtggcacggtcacagctcactgccgcctcaacctcccaggctccagcaggcctctcacatcagccccctgagtagctgacactttaggcacgtgcccccatacccagtgaattaaaaacatttttttagagacaggatctccttatgttgcccaggctggtctcagactcctggcctcaagctagccttcccaccttggccttccaaagcactgggattacaggtgtcagccatcatacctggcctctaatgtacactggagtttgttttatccagtggacccctccaactttattctagcccctcttggccattctgtattcccttttccagcttagatcttgaagtatcacatatacctgcattctagactttcaagggacttattgcttgctctgacagtccctgaatcatttccattgcctgtttttttccactccattactacatcagtctttgcctcaatggatgtcggttccctttctcttttcttccagcaccacagcacgcctggatgaggatccaaaattacctctgtccccactcttcctctttcttctgtttcttcactttcttctcctggaatggtctccagttctcacaacttcagcaagactctcatatgtctctctccagttctttctttatctgagttctggtttatagtttgaattgtctgccagatatttcgaattgcacattccaccatctcttcaaactcaacattactaaaactaaatggatcacttttacccccaaaccaaggtctttttctctcactttggttatgaaataattattgatttgttttatttttaattgcaggctcttcagcaaaagcccttgtcagtttaaaaggtaagaagtatagcatttttaggtataccatagctaaaagtctaatttgttaaattaatctggatatagtgtttccattttccttctaagttatgattcattgtagcttttcagtattggttttcactgataaccttaaattaatatgcttttataggagaattgatcctcagttgttagaaattatttttaaaaatttctaaaattattgattaaaaacctttctaattaaacattccataaatatttagattaaaagcatttgttaaacgactgtgctgacctatatgttagcataattgtttgtttgtttgtttttgagacagtctctctctgttgcccaggctggagtacaacggtgcaatcttggctcactgcaacctctgcgtcccaggctcaagcgattctcctgcctcagccccctgagtagctgggattacaggcatgtgccaccatgcctggctaatttttgtaatttcagtagagacgggatttcaccatgttggccaggctggcctcaaactcctggcctcaagtgatctgcccaccttggcctcccaaagtgctgggattacaggcgtgagccactgtgcccagcagattttttgtttatttattttttgagacagggtctcgctttgtcacacaggctagagtgtggtgatgtgattacagttcactgtagcctcgacctcctgggctcaagtgatcctcttgcctcagcttcccatgtagctgggaccacaggcacatgctaccatgcccagctaatttctttattttttgtagagaggaggcctcactttgttgcccaggctggtctcgaactcctgggctcaagggatcctgctgcctcagctttgcaaagtgctgagattacaggcatgagccaccacacctggcccgtaatagcttatttttaagagtcttgctttcactgggcacggtggctcacgcctgtaatcccggcactttgggaggctgaggcaggcggaccacttgagctcaggagttcgtgattagcctggctaacaaggtgaaaccccatctctactaaaaatacaaaattatccgggagtggtggcaggtgcctataatcccagctacttgagaggctgaggcaggagaattgtttgaacctgggaggcagagattgccgtaagccaagatcgcgccaccacactccagtctgggagtctgggtgacagagtaagactctgtctcaaattccaaaaaaaaaaaaaaagaatcttgctttctaagtaataatgtcttgaaataaaaataaaagaataatagtacttttctcattctaagaaaaagtttgacatgttccttggtctcactatttcttttggcaggtacattagactaacctttttaacatagtttctttaaaattttacctcttgattaagattctggtaggtcaataaatttggaaccaagctaaatattctcaaagtacttttagtctttaaagctactatattgtgctttggattggtgatttaccaaattaaatccttctagcttgagaagacaatttgtcttccagaacaccccagtttgtttgtcttttgtgattcttaaaaattattccattattctttttctcccaatattaaactcatttctctcccccctgccttttttttttttttttttgagactgagtctcggtttgtcgcccaggctggagtgcagtggcacaatatcttggctcactgcaacctctgcctcctgggtcaagtgattcttgtgcctcagcctcctgagtagctgggactgcaggcatgcatcaccacacctggctaatttttgtatttttaatagagatgggttttcatcatgttggccaggctggtcttgaactcctgacctcaggtgatcctcccactttggcctcccaatgtgctgggattacagatgtgagccactgcacccggcactcattcatcttgataaatcatttatataagtaacgtacatttcttatggaaaaaatgagaaaatgctgatgagccactagaagaaaataaaaataaccagcttgtatattcatcccagttttctatgcctctatataaacatcttttttacaaaaattaaacttacccctctttattttcacaatatgtctaatcattataatatgtgtaaatcataatatgtctattcgatagaattcttttctgcttgtgtacaactctgaagacatttctctgaattaaggaaaacagaaataaccacgctgatttactttttctttttttgtgaggggacagagacttgccatgttgcccagactgaagtgcagtggtgctatctcggcttgcttcgaccctggctcgctttgaccctggcttgcttcgaccttcgcctcccaggttccagcaattctctgcctcagcctcctgaatagctgggactacaggtgcgtgccaccatgcccagctaatttttgtattttttgtagaggtggcgtttcaccatgttgggcaggttggtctcgaactcatggcctcaaatgatccacccacctcggcctcccaaagtcctggaattataggcatgagccattgcacctggcctaatttcctttttatatatcaagtgattcacatattaaagcagaaaacatttagaaatgtgctctaaatacaggctggcctggtggctcatgcctgtaatctcaacactttgagacactgaggcgggtagatcacctgaagtcaggagtttgagaccagcctggccaacatggagaaaccctgtctctactaaaaatacaaaaattagctaggcgtggtggcacacacctgtaatcccactactggggaggctgaggcaggagaaccactttaacctgggaggcagaggttgcagtgagccaagattgtgccactgcactccagcctgggcgatggagcaagtactctgtctcacacacaaagaaaaagtaaaaaagaaatgtgctctaaattcaaggttagaaaaggctttttccatttttgattcccctgctttcagaattgtaccaaaagttatgagatagttcttggcaagttggaatggagaaattattaaaaatccaaaaacaaagaaaaagaagcacatgtttcagtatggacatttaatactttcaagatgcattgctttatcaaattatttagagagtttgacagaaaaatacggaagagctttttcatttataataatctaaaattattatagtcagtatattttttccatattaaatattttagatatatggctgttatgaaaaaaacagtattcatggtatgaaatcctttgaactaagccaaaattccattagtattaactatttattacagaaggaagcttatctaacacgtggaatgaaaagtacagttctttacagaaaacacctgtttggaaaggcaggaatacaagctctgctgtggaaatggtaaggagtgagtttttcttacattttagaataattctagctaagttgtctgtattattgtcatgtgtaaattcttgcagcacagtaaaaaatttacaagtttttttcccaacctcaagtgtcattaagcactgtttgatcttatttaggtaaattaatctgtacccagtgataatctggtcatcagtaagcatttgttcagtaattgtgtaatagtttctttaaataggaaaaacaaaaactacaacttatacttttattagatacgcaaaaaattttacatggctttggtacctgcaaaaatatatatatgtggtaaggtattaaaatcttgtatagacaaaaagaaaaaaaaagaaatcattgtgtagctcaaaggtaagtgcatttagaggtgggaagtagagatgagcatataattgacatgactaacagttttaggaactctctttctctcctgccctgccaggtagccaggaggttttaagggtctgtcatgaaacagtcctggagttgggatagacagcagcagtcacagtagcctgggcagctgaccacagtgaatgtgaggggctttcctcactgtgtcaattccatcatcttcattcccttcctcttctctgcttgtggtcagggaaggggggcagtgtagaatggaattcctgtcagggctatagagtatcaagactctgagtgggtttaatttctttttgtttttctttttttgagacgaggtctcgctctgtcgcccaggctggtcaggaactcccaggctcaagcgatcctgcccgctcagcctccctagtagctgggactacaggtgtgtgccaccacgcccagctaataaaaaattttttttttgtagagatggggtctccttgtgttgcccaggctggtttccagctcctgggctcaagtgatcctcctgcctcggccttccaaagtgctgggattataggcatgagccactgtgcccagccagagtgggtttaatttcaagggttcatagacccgagtggatgttgcccatatgttgttagccgcctgcacctgtttctcttccaaatagccatgaggggtgggagaaggctttgaaaaggatgtaggtcttatcgggatattatttctttttctctctattaatgaaacctctgaacctagggtgaactgtaaaatctttactattacagacccttaagtgtatgatgtacttttggtacttaaacaacttttttagttctatgggtaattatcaggtatctatcatatgtatcttttatttacaagtgaaaattcggttaacaatttttgacagcagatagagtataatagtatacacatttaggcttactcttctagagtgatttagaacctttggcccagcccagccctatgcagcagacatatcatgtcacacacccaattggtattaacccaagcaacaacataatttgaactggaatttccggaacttattttcctatcatcactgtccaaggctgccagtgtactaaggagacttggggttccagttttactttattcatcagctaggtatttcattcataagcaccttgtataaatacatcttactgctttctaaatctgagattatttatatttggctttgtgtgctttgtgttgcccatactttatccttccatactgctgataatccagagttagctcagttttccaagtatagaattgtattttggaacaaaaatgggagggttcggctttttcattaaatgaaaacatttctatcatagcctttcagaaattcaaaacgaagtcgacttttttctgatgaagatgataggcaaataaatacaaggtcacctaaaagaaaccagagggttgcaatggttccacaggtatgtgtgtgctaaaattttgtttcattggaaaggaagtaagcaaatgctcagcctaataaagtttatatttctgttacattttgagtaacaagttcttttctttaaattcgtacggctgctctggtcctgttttagttacctagaaaatgttatttttttgatcaactttaaaacaggatagaaagccagtcattagtcctacaaatgcacacttttaagcatggagatagtggaagaatttggcaacatggcatcaatttgtaggtttgcacagatataagagggaaaaaatgttttacttgatcaccaagagaagtacattgaagacttcctttatccaagagaggaaaaaaatatatatatatatgtttatttatatatatatattttgagacggagtctcactctgtcgcccaggctggagtacagtggcgtgatctcggcttactgctacttttgcctcccgggttcaaatgattctcctgcctcagcctcccgagtacctgggattacaggatcacaccaccacgcccagctgatttttatattttagtagagacggggtttcaccatgttggccaggctggtcttgaactcctgacctcaagtgatctacccgcctcggcctcccaaagtgctgggattacagtcgtgagccactgcaccctgctgagaggaaaatatttagcatgaaatcgtatctccttatttatttttggcatttaaaaactcatagtgggctgggcatggtggctcatgactataatcacagcactttggaaagccaaggtgagtgcatcacttgaggccaggagttcgagatcagcctggccaacatggcgaaaccctgtctctactaaacatacaaaaaaactagctagcatagtggcacacgcctgtaatctcagctacttgagaggctgaggcatgagaatcgtttgaacccaggaggctgaggttgcagtgagccgagatcatgccactgcactccagcctgggcaacagagcaagactctgtctcaaaaaaaaaaaaagtagacatgtaaaaattaaaggaatgaaaattagatagggaaatattaactttaagggtaatgtaatttttgtcttattcaatttataacttctgatataatcattccctatttctctttcattattttccaaagccttataaaacaagattttctagtataatggatggtagaggtgatattctcaaccaagaatttagcattaggtttttttttttttgttttttttttttgagacagagttttgctcttgttgcccaggtggagtgcagtggtgtgatctcagctcactgcaatctccagctccttggttcaagtgattctcctgccttagcctcccgagtagctgggattacaggcatgtgcctggctaattttgtatttttagtagagatggggtttctgcatgttagtcaggccgatcttgaactcctgacctcaggtgatctgcccacctcagcctcccaaagtgctgggattacaggcgtgagccactgcgcccagccaggttttttttttttttttttggactgcattggcacgatcttggctcactgcaatctctgcctcccatactgaagtgattcttgtccctcagcctcccaagtagctgggactataggcacgcaccaccacacctggctaatttttgtattttcagtagagacagggttttgccacattggccaggctggtctcaaactcctgacctcaagcgatccactcacctcagcctcctaaactgctgggattacaggtgtgagccaccacacctgacccaaggacttagcattaaataaattaaaagcatgaccagcaatctaccctaccaataaaaactcttaaatgccttatgataattttaaacaggaaaatatgttcatgttctgtagaatgaacaaaaatgtatcttgaacttcaaaaaaaaaagttgtcaaggacaagtgcacataagcatctaataatttgattttgtaatcccagcactttgggaggccaaggcaggatcacttgatgtcaggagtttgagacgagtctggccaacatggcaaaatgccatctctacagtaaatacaaaaattagttgggcgtggtggcacacgcctgtaatcccagctacttacttgaacctgggaggcagaggttgcagtgagccgagatcacagctgtacactccagcaagggtgacagaacaagagtctgtctcaaaaaataaattaaaataaatttaaaaataataatagtttgatcttgttgaaactaaaatgcagtgtgcatttcttggctaagttagctgttgtatacaaggttgaatgaacaagaaatagttaaataacaattttgttagctagactttggaatagctatgttactaggataatctagatgattcacaaacatacagaaaactgatctttatgactgtgacactgtcctgtcgcaactctatccactgccttccttcctgagcacatcactccttctggactattttacagagccctttttagcaatacagagaattctgagcaatacagaacaaatataatgtaggataaacatgatatgagacttcttcaagtatgtgaaaagtttttatatcctctgagttttctctttactagttgtagaatctctagtgctttccatcttcatttacctgacatggcttgttcccttaccctccttagtcatatcttctaaatctctcgtattttgtctgtatgtttatttaaagaacaccacccagagctgaaaaattatgaaaactaacttttactgattacttatgtgttgagtcctgttctaagcacttcataggtattactttgatttaatcttcaacaactcctatgagataggttactgttacattatttcccattttgtagatgagaaaacagacacagataagtatcttgcccaagaactcaaagctaggaagtaaaggctagtaacagtcaggcagcctgtctccagagtcctactttaaaaagaaaaaaaaccagctttgttgagatagactttacatatacaaatcatatatttaaagcatttagtttggctgggcagtggctcattttgagaggccaaggtgggaggatcgcttgagctcaggagtttgagaccagcttgggcaacagagtgagaccctgtctctacaaaaaaaattttttttaaaaattagccaggcatggtggtgggcacctgtggtaccagctctttgggaggccaaagtaggatcacttcagcccaggagattgaggctgtagtgagctatgatcagaccactacagtccagcctgggcaatagaacagagaccctgtcagttttaataatttatgtttctggtctggtgcagtggtgcccgcctgtagcactttgggaggctaaggcaggtggatggcttaagctcaggagttccagactggcctgggcaacatggtgaaatcccgtctctaccaaaaatacaaaaattagctgggtgtggtgcacacgcctgtagtcccagcttctcaggaggctgagacaggagaatcacttgaatctgggaggtggaagctgcagtgagccgaaattgcgccactacactccagcctgggtgacagagtgagaccctatctcaatcagtcaatagaagattccctctaacaatttgaatctattttcccatacccaacaggcgggtccttaatatagttttatattcgatgagctgctaataccctatataccctatttaaaaatctgggtcaataatgtagtagaaagaaataacactttttgtgataagaatattttatagtaatttggttatttatgctaaacatctcctcacttataaattttttcttttttcttctttttacatttaatttttttttttctcctgagaatggtcactgagggaaaacaaagaaaaacaaagttatttttctaaatgcagtgtggtatcctgaattggtttctggaacagaaaaaggatgttggtgaaaaaactggtaaaatccaaataaagcctgtagtttagttaatagtattgcactagttttgacaaatataccaaagttactataagatattgatgttagggaaagccaggtgaagggcatgtgggaatatgtactatctttgcaacttgcctgtaaatctacaacttttccaaaatacaaagtttataataaaaattttaaaattttgaccctaacttaccattccaatatgtacttccctcatacagtggcagccactataattagtttgattatccttatgaaaccttttaaatatacttttaatgtattcatagaaaatatttaatattgttaaatgtatatatattttttctttttctaaatgtatgtattctaaaaattacatttgtagtatcattttcatggtattgtgccatgtgtcattctgtaattttttcactgtctttttttgagatctggccatgttgattgattgagataatcggattcagtgtttcatttctttttactattgaatagtattcaattttatatcattatttataaattctcccatttgggagcatttaaattgttcgtaaatttttactttgacaaataatgctgcagtgaacatcctgagcatgtttgtataaatttgcaagtttttttctaggacagatgcctaagatgtggaattgctggatcgtaaattatgtacatttaaagtttttaaagcagtaccaaatactctccgaataaattgaactgggaccatgcacagtggctcacacctgtaatagcagcactttgggaggccgaggtgggcagatcacctgaggtcaggagttcaagaccagcctggccaacatggcaaaaccccatctctactaaaaatagaaaaattagccaggtgtggcggcacgtgcctgtagtcccagctactcgggaggctgaggcatgagaataggttgaacctgggaggcgaaggctgcagtgagccgcgatcgtgtcagtatgctgcagcctaggtgacagagcaagacgctgtgttaaaaaatttttttaaaaaaaggaaagaaattgtactggtttatatatattagagttcctattttccaaatgcctccaactcagtacagaaccaaccatctagatttttgctaatctgatatatagaaatagccttggccgggtgcggtggcttacgcctgtaatcccagcactttgggaggccgaggtgggcggatcacgaggtcaggagatcaagaccaccctggctaacacggtgaaaccccgtctctacaaaaaatacaaaaaattagccgggcgtggtggcgggcgcctgtagtcccagctactcgggaggctgagacaggagaatggcgtgaacccgggaggtggagcttgcagtgagccgagatcgtgccactgcactccagcctgggcaacagagcgagactccatctcaaaaaaaagaaaaaaaaaaaaaaaagaaatagcctctcacttgttttagttggcattttatataagagcaaagttgagacacttttcatatgtttaaaaattatttctttccttttctgtaaactgtttatgcctttttcccatttttctattggattgtgggtcattgtgttactagtttataagaattttgtatatattaaaaatattggccctttggatgtttataatggctgtaattttttttagagtttatagtttgtcttttgatttgtttctgtattttttaacatatgggattttaaaatattttaaggatcaaatgtaactttgttaccttttaatgacttcttgagtttgtcatgctcagaaagaccttttctacactaaaatttatcattttagaattctctcatatttcatttttttggtttgaaccttcagtacatctggaatttattttgcagtaagggatgaagtaaaattgcaacctagctttcccacccccccccacccccccccccggaggactacttagttgtcctagtaacatttattgggtaatccatctttttaaacattgatttaaaatgctgccttcatcaaagctaaattcgtataagtatttgggattactttcaggctttctatctctacatctagcatatctctatatgtgctagtatcaaattattttggctgggcatggcagctcatacctgtaatcctagctctttgggaggctgaggcaggaagatcgcttgagcccaggagtttgggaccaacctggtaacatagcgagagcccgtctccacaaaaaatgcatgaattagcccagtgtggtggcacatgcctgcagtcccagctacttgggaggttcaggtgggaggatggcttgagcccaggaggtcaaggctgtagtgagcaatgtttgcaccactgcacttcagcctaagtgacagagagagagaccctgtctcaaaagaacaaacaaaaccaaaacacacacacacacacacacacaaaattggtttaacatgactttatactgtgttttaatgcctggtaagatattatcacatattctttttttgagatttttttccttttctttctttttttttgacatggagtctcactctgtcgcccaggctggagtgcagtggtgtgatctctgctcactgcaacctccgcctcccaggttcaagctagtcttctgcctcagcctcctgagtagctggcactacaggcacagccaccacgcccggctaatttttgtatttttagtagagatggggtttcactatattggcctggctgtctggagctcctgaccttgtgatccgcccatctcggtctcccaaagtgctgggattacaggcgtgagccactgcgcccagcataagattttttcctaaatatttttgtgcatttatttttccatgtagactttagaatcaacttgactaggaaaaaaaaatcctgttggcattttgactgggattggactaatattataatttatgggaaatgatatatataggtaacattgagactacctaagaactgattgtagttccacttagttcatagtatttcacagtagacttaatttttttccatatcagtcttgcatgtttcgtaagtatattcctacatatttaatttttttgtttatgtccatttttgtgctgttataaacaggatataaactcttatggcctgtccagttattatttacatatagtgatttttttgaatcatggtttttgtatatcaactttgtatttacccatttcattaaattttcttactgtttttaattgttacagttgattttcttgagttttcacctacaaggaaatggtagttttatcttctttctaaattttattcttcttacctgattggccaattccttcaaaacagtgttatgaaatagtggtggtagttgaaatctttgtcatactaggttagtggtggtagttgaaatatttgtcgttctcatcgtcttttaatattacgatactggtttttgggttggagtggggagaaatgttttattaggttaaaaaagtatccatctaagctgggcgctgtggctcacaccagtaatcccagcactttgggaggctgaggcaggcagattacctgaggtcaggagtttgagaccagcctggccaacatggtgaaaccccatctctactaaaaatacaaaaattagctgggtgtggtggcgtgcgcctgtagtcccagctacttgggaggttgagacaagagagtagcttgaacccgggaggcagaggttgcagtgagccgagattgtgccactgcattccagcctgggcaacagagcaagactgtcaaaaaaaaaaaaggcaataatcaaaaataatcggagtgtttaaaacagcaacaaaattccatgttgaatatcagtgaatcagtgaacctttttaagtacttaaacataatttaccttttgcaaatttattcagggttataaatgttcatttttacttaatggagccataaattaatctcttttttttattgtatagaaatttacagcaacaatgtcaacaccagataagaaagcttcacagaagattggttttcgattacgtaatctgctcaagcttcctaaagcacataaatggtgtatatacgagtggttctattcaaatatagataagtatgtatcatggcttatattatgaatattacttgaatcagaaatttaagtttttcaagtgttttaagctacaacattttctataggtctactttgatcttatttttctctaaattcatttttctgttccacattccagttggatctattctatttgtcatagttttcttccctgttatcctttttggggaagaaaactgtacatttttgtgaagaattgattacggtataatttctgtgttagaattcttaaagactatggagtagagataccttaaaacaccattatttgcagtgaatgagattcattttataattgagatgttaagtgctggtataatcatagagaaaccattactaatggtaaaaatggcttaagatttttaagagggtagtctttctagtttggatgtggtacttaagcacgctaggtatacacatatgcttaagtatgacgtagtatgagatttggctgaaatacaattattcaacaatggaatttactgaggaaaagttcttatttataatccttcctcatatgccagtcattgctgcttgctctgctggatatttatattttcttcccttctctgttttctataccaattgcctactctggagcttgtgaatctcatgaatgttcatatttgagcccaaggcatttatgtatcattgccaacactggttcctggtttcccagactcatgaatagaattgttttatttttgtccataggcttaagagagttttcagggtgtctcagtgtaatctgagttcttctgggatcccccaagctaatctaaccctctggagtcctccagtgtcccaagactggtttaattccaaagaggactccttggtgatggtattcctttgggacaaagatactttgtagctaacttggtttatcttcacctgatacaaggccagggccacgatagcctcccaaaggatatacctgtataagagattgaacaaaaatcagtgtctcttggaatcacaacacaaataatatttcctgagcaacttttacacgacattagatgtttcacaaatgccaaggatttagttttagcactttgaatttgtgccagtttatatatatatatggggtagaagtgaaagtttagcattttgtgattttatgtgttttaagaaagtaacacattgtatgtaaccattaaaatactatatctgttttacagaccactttttgaaggtgataatgacttctgtgtatgtctaaaggaatcttttcctaatttgaaaacaagaaagttaacaagagtagaatggggaaaaattcggcggcttatgggaaaaccacggaggtaaaaataatgtttttgtttttgtttaaaataaaatcaagccagtagcagtgcatgtacttataatcccagttacttggaaggctaagatggggtatttgcttaaggccaggggttcagggctgtagtatgctgtgattacacctgtgaatagtcactgcactctagcctgggcaacacagtgagaccattcctctaaaaaagaattaaaaaataaaatcaataaataatagttgttagtatcattagtacattgatttttttaatctttaaaatgactagtaccaaaacataacttttcagaataattgattatatgttaaatatatcctgttaaccaactttaatgtaggtgctgtttatacgtatgcatcttataattaaatgcacaatttcatttttgttaggatcacaggttttcaacgtaattttttagttttacattatctatgtccctctgtgttccaaaaaatatttaagaatgtcctaaaaagtatttaaggatgctgtaaagttctgtgtacatttttgttatcttttgtgaaatcctttataatctcaggagccttcccagaagtgcctattttattttatataaaagtagaaaacaaattaatctatctaatatgttacttcctgagaattgctcttcatgtgaaatgattttttcttttccagtgttatcctggtaacacattggaaaaccttatattacttttgagtgaaaattggaaatatgttagaagaataattagatcattagttctcacattatgtctatctgcctggtaaaaagtatgtgcaagactttttcattttaaatggtgggaaagttcaaggaaggtctgtaaatataaagtgatttggacaaatagaaatggaatttagatttaatgatttctttagatggtgatgaaatacagagagaacttttaattaaactgtcatcaagatgaccttgatgatgatgtttttaatatttcttataataacaaaattaaaatttgatatgttatttagtgtgtttcatactcataatttatggcctttggtaattacagtagccatttggtgactttttgctatcattttgcgtgtttgagcaaattgagttacactgtttctaattattgtccatcagagtgggatattggtcactatttactgttttgtcatagttctgtagtttgagtgtcataatatttctcgttaattgatcttctattctcttaccataacattatttaatcttatagtcctttaattcatcaaggttaattaatagttgaagtcttttttcaataaaatgtgtagtttttctttctttgaggaagtccaggtataatacaaattattgatacaataaaccttaaaatatcttaattttaaaaatcaattggtgaaactccatccacttggaagataaaaaggaagaaacaaaggaagataaactaccaggaaagaacctaagaggaaatatgcaagatacatatgaagaaacattaagacatacaggatcttggaaaagaagactcaacatcctaaattagtctataagttaaaatcagtcccaataaaaatattaacaggccttttttgttgttttgttgagacagagtcttgctctgtcacccaggctggagtgcagtggcgtgatctcggcttactgcagcctctgccttctgggttcaagtgattctcctgcctcagcctcctgagtagctgggattataggtgctcgccaccatgcccagctaatttttgtatttttagtagagacaaggttttgccatgttggccaggctggttttgaactcctgacctcaggtgatccacccacctcagcctcccaaagtgctaggattacaggtgtgagccactacacctggcctctttttttaattagatgagttaattctaaaattcacatataagaggggagaaatcaagcaggaaaattctgaaaaagcaaagtaatgaagagagattccactttaaagagcactttaaaatagattataaagtgatcataattaaagcagagtggtagtggtgcataaatagaaaaatgaatgaaaaagaaaagaaaatccagatacagtcacagatgtctctgggagtttagtataatagttgcaatggttgactctcaagtacatggtgaagaagagggtggattgtttgtttaatggaaaccgagactactgtttagtagtctatagaaaaaaacaagttgttctcatgccttacaactaggaaatatttgaaaaggattgaagatttaaatatttttttaaatgaaagaataaaaccacaagaggaaaacataagagagttttacttaatcttgaattggaaaaggcctttctctctctctctcttttttttttgagatgggagtcttgctctgtcacccaggctgacgtgtggttgcacaatctcggctcactgcaacctctgcctcctaagctcctacctcagcctcctgagtagagtagctgggactacaggcgcccgccaccatgcctggctaacttttgtatttttagtagagacggggtttcaccatgttggtcagactggtctcaaacatctgacctcaggcaatccgcctgccccggcctcccagagtgctgagattatgggtatgagctaccatgcctggcctggaaaagcaggcttcaaacctaggagccataaaagaaaacattaataaatttggctatacaaaaataagaacgttttacatggccaaaaacaaaagcctgtaaacagagttgaaagatagtacagaaatatccatcacatcttattacagagagctaattccctactatataaagaactcctatcaataagaaaatgtcaggtaacgcataataaaaatgattataagtagatgattcaggctgggtgtggtggctcacacctgtaatcccagcactttgggaggctcaggcaggaagatcacttgagctcaggaactcaagaccagcctgggcaccatggtgagaccccatctccaccaaaaaaaaaaaaaaaaaaaaaaaaaaattcaaaaattacccaggcatgctactcaggaggctgaggtgggagtatcgcttgagctctggatgttgaggctgcagtgagccatgctcacgccactgcactcaagcctgggcaacagaacaagaccctgcctcaaaaataagtaaataaaataaacttagccagttgggtgacacatgactgtgatcctagctactcacaagaccaaggtgggaggatcacttgaacccaggacttgagactgcagtgagctgtgattgcccccttgcactccagcgtgggcaacaaagggagaccctgtctgtttaaaagcaagaacaacaacaggtaattgataggaaaggaaaaagaaatggctcttgtaaacatgaaaaaaattccattttactcataatgggaaatgcaaaatcaaagtttgctgagatacagttttttttgttttttgttttttgttttttgagacagagtctcactctgttgcccaggctggggtgcagtggcacgatcttggctcactgcaacctctgcctcccaggttcaagtgattctcctgcctcaggctcctgagtagctgggattacaggcgcctgccaccacgcctggctaatttttgtatttttagtagagacggagtttcaccctgttggccaggctggtcttgaactcctgacctcaggtgatctgcccgcctcggcctcccaaagtgctgggatcacaggcgtgagccaccgcgcccggccgagatactgcttttaactatcagatgggcagagttcataaaggttttaatgtgttgggttagtaatggcatggttagtcactcatacatattactggtgagagactaattttatataatctctgtggaggacaatttggtaatatctataaaatttacaaatttccattgccttgatgtagcactttcaagaatgtacaacacagagctacttgcacacagatgaaattacatgtacaaaggtatttattgcagtattgtttgtagtagtaaaagattggcaacagcctaaaagtccataaatgggggaatgattatagtatggcactccatataatagaaaaccctgaaaccatttaacataaaacaaaaacagaagatggtttctatgtactaatatggaaatgattgctatgctgtgtcaagaaaagaaagcaaaatacacaacagtgcatactgtagctatttgagaaaaatagaggaacatatgcattttttgattgtatatgtctaaggtgtcaacaaaggatctgtaagaaaagtataatggctgggcgccggtggttaacactataatcccagcactttgggaggccagggcaggtgaatcatgaggtcaggagttcgagagcagcctggccaatatggtgaaaccccgtctctactaaaaacacaaaaattagctgggcgtggtggcacatacctgtagtcccagctactcagggggctgaggcaggagaattgcttgagcctgggtagtggaggttgcagtgagccgagatcacaccactgcactccagcctgggcaacagagcgagactccaaatcaaaaaaaaaaaaagaaaaagaaaaaaaaattgtcaactatagggaaatagtatgggtcctgggttcttatgtcaagaagactttttttggtatattttttaaattgatatataatagttgtacatattttgggagtacatgtgtacagtgtgtaatgatcaaatcagggtaattgggatatccattacctcaaacatttttctttgtgttgggaacattataatttttctcttctaattatgtggaaatagtcaataaaaaacaaagtaaaaacaaaaaatagtcaataaattattaactataattttcctaccgtactgtcaaatactagaacttattccttctatctcactatatttttgtaccccttagctaatctatctcactatatttttgtaccccttagctaacttatcttcatcctcccctcccttttcccttcccagcctctggtaaccaccattctattaataatttctacctccatgagatccacatttttagtttccatgtatgaatgagaacatcttatacttgtttttctgtgcctggcttattacacttagcataatgacttccaatatcatctatgttgctgcaaatgacaggatttcattatattttgtggctgaataagattccattgtgcatatataccatattttaaaattccattcatctgttgatggacgcttagggtgattccatatcttggctattgtaaatagtgctacaataaacatgggagtacagatatctctttgatatactgatttcctttttttgaatatacacctaaccatgggattgctggatttttagttttttgaggaacctccatactaatttccataatggttatataccaggaagatttctaaaagatgttgtttacaccagaagcaagtctggttttttttgtttatgtgtttgtttttgagatggagtctcgctctgttgccaggctggagtgcagtggtgtgatttcggctcactgcaatctctgtctcccaggttcaagcgactctcctgcctcagcctctcaagtagctgggattacaggcacacactgccacgcctagctaatttttgtgtttttggtagagatgggtttcaccatattggccaggatggtctcgatctcctgacctcatgatccgcccacctcggcctcccaaagtgctgggattacaggtgtgagccactgcgcccggccgcaagtctgtttttatagtactacttagcttactagtaactcattatcctttgctttatcttctcatattcttcccatatatactgcttgaatcaatattcaacaagttcagaaatcatacaaaaaaatcattattatcagctaagctctttctgtgtatttccagtccttattcatcattgcttacaacaattcactttatacagtgctggtctttatatccttttttctcattgtttttatttagtttttgagacaaatgacaatagagctcataatgtacctttgaaagtgaaagccataacatggcatgaaagtgatgtttaaatactttgcttcatcctgggatttgaaaacggaaggaagataggctctagaaataagagggaattcagcatttatacttttaaggcaaaaattatgattaaaagtttacatagtaggaagtctcatctttaactgctatattggtgtgtttactgggtcacagagaaaatatcatgttcttttgggtagaatattgaaatggaacttggtccctatgagatctagattccaggcacaatttcatcaaaggatggtgaaaaaattattttgctttgtaggaaggaataacctgcaaaatctttgagtcttggaaggtcctgttttttaaaaaatgaaaggtaatttactgtgaaaagaaacagttcctttttctttccttccttttttttttttttttttcagactgggtcttgctctgttgcccaggctggagtggtgcaatctcggctcactacaacttctgtctcccaggctcaaacaatcctcccgcctcagcctcccgactagctgggactacaggctcattccgccacacccagcttttttttttttttttttttgtatttttggcagaaatgaggtttcaccatgttgcccaggctggtctcaaactcctgagctcaggcagtccatccgcctcagcctcccaaagtgctgagattacaagtatgagccactttgcccagctcttttttttgggtgggtggggaacagtctccctctgttgtgcaggctggagtgcagtggtacaatcacagcttagctcattgcagcctcaacttcctgggctcaaatgatcctccggcctcagcctcccaagtagctggatgcacaccattatgcctagctaatttttttatttttagcagaaacaaagtctcactatgttgcccaggctggtctcagactcctgggctcaagcaattcttccacctcggactacaaagtgccaggattaaaacatgagccaccatgcttggccaaaaagaaacaatttttttttcccccaagacggagtctcgctctgttgcccaggctggagcgcagtggcacgatcttggctcactgcaagctcagcctcccgggttcacgccattctcctgcctcagcctcccaagtaccagggactacaggcacccgccgccatgccctgctaattttttgtggtttttttgtttgtttgtttgttttttggttttttttttttttttagtagagacggggtttcaccatgttagccaggatggtctggatttcctgacctcgatatctacccgcctcggcctcccaaagtgctgggattacaggcgtgagccaccgcgcccggcctttcttttttttttttgagacggagttttactctgtcacccaggctggagtgaagtggctcaatcttggcccactgcagcctctgccctctgggttcaagcgattcccctgcctcagcctcctgagtagctgggattataggcgcctgccaccacgcctgtctaatttttgcatttttagtacagacgggattttgccatgttggccaggttagtctcgaactcctgacctcaggtcatccacccgccgtggcctcccatactgctaggattacaggcatgagccaccacgcccggccagaaacaatctaagaacctatttttgaatacagtatacttaatgagaagaaaaaaaggagtggtgagatgaatagattttaaggtttttttgtttttgtttttgttttttttaagatggagtctcactcttgtcgcccaggctggagtgcagtggcgcaatctcagctcactgcaacctccgcctcccagattcaagcgattctcctgcctcagccccctgagtagctgggattacaggcgcctgccaccacgcctggctaatttttgtagttttagtagagacgtggtttggccatgttggccaggctggtctctaactcctgacctcaattgatctgtccgcctcagcctcccaaagtgctgggataacaggcgtgagccaccacgtccggctgattttaagtttttaatctcagcacttgagtccaggaggtggagcccagaatcgcttgagccggagatggaggttgcagtgagccaagattgtgccactgcactccagcctggatgacagagccagactctatctcaaaaaaagaaaaaaaaaagattttaagtttttatatggggtagttatcagtttgtatgttttttataatttattctagatgttcttctgcattttttgaggaagagagatcagcattaaaacagaaacggcagaaaataaggctcttacaacaaaggaaagttgcagatgtttcacaattcaaagatctcccagatgaaattcctttgcctctggttattggaacgaaagttacaggtaagtgaaaacaagctaattactcttttgacttgtaatttttaatcaaggtaatcttttttgtttctttggttcttattttatttcatttttaattaccaagaaatatttacaatagacatcgttaaccctcaccctatccctatccctcaactctctctgagcctggttgatgctcagggatggagtaggggttctgtagtacacatcacttgatattttttttccttagtgactttgatttttcactagaatgtgtttacacgtacacatgggacaaaattctgaaggtgtaaataacccagataatctctattcgagaaatggcttttaaatttagaaagcttaaactgtagctctgtgcaatttactatagaagttactctttcttcatgcatgaaatctattttttaaagtaattgggaaaaagtgtattggttcaaagtaacatctactacaatataaactaaagccaactgctacaaagatgaaatttaataatctattggagtaagtatagctatgtattattttaaagttttttttttttttttttttctttttgagactgagtctccctctgtcacctaggctggagtgcacctaggctggatcttggctcactgtggcctcgacctcccgggctcaagcaatcctcctgcctcagtttcccaaagtgcgggattacaggcatgaatcaccacacctggccgtaaattttttttatttttaattattctatattttccttctacattgtttgttttc

SEQ ID NO: 48 - DNA, 32742 bp, Homo sapiens
  source 1..32742: mol_type = other DNA
aggattcagagctaagtctccgggctcctttcacatctgcaggagcagccagcctgggaccgcgcggcgcggggcgcgctctcgcctctcctgcaccctcagccggcgcgcttctcttatgggcgtctgctgcagtctggctgcggtcgaactgaaagcggcggcgggagaccaaacttagaccccgctgtggactagagaactcagagaaggcagagggagagggagagagagagagagaagggacccgaggaggaggcttccatcacgtcattgcaggtacgcagcttgtcacgactaacgtgacacagacacggtttctgatttctaccttcaccaggcacttagaatgaattgacgttgtttgttccgtggctggtcaggaccgaaagccctgagtggacgtctcgccggtttcaccccgggtaattcaagctgttggcgtgtgtctgggggccacaaggtttattcacctattgaattatgcgtgggtgtaacataaggaccttcaaacttgaccgtgatcgctctttctttctcttttaaataacgtcaataccaatatgttgtcatcccaccaataaatacctcttggtgaccgccattctaatcatgactatagcgaggcaaacaccatccaattgttagaaagcgggctacgaacctctcccacctacctaccaggttaatatcctccctacaggaataggaaccacagcggacttcggcagagttttgattttttaaagcatatggccaaggtgcacccgcctcatgagggaaatatcactattatcactacgctgtggttgaaggagaagagagaagggaggtagttattttttaacgtgattgtcagtgatccttcctgtgtacctgacttatttctacattgtcttacgagtttaaaaatgcatttgtattctgcacgccaggcacgttcagttccaggatctcacatattactacattaaaaagtcatgaattggaactatctagtagatgtgatagttgtaagaaaatattgatgtttgattttattttatttgatcctaaaactcataaacttctatttcttttttttttttattttgaggtgtgggttttgttaaaaaaatctatttcctgagattttatcatgtttgatttgaaattttaaagatagttatataactccccaccccttgatgacttgtgattaaattagcattgcttaatgagttcagtctttcctgggaaaagccagaggggactgcaagaagtcagttaaaaaattggtcttgctttgcagtcttcaagggctggctggtattcatgtggctctgaatccctatgaaaagcgctttttctgcagtggaacagattgggactccagtacagccagagaatggctctgcagcaggtgcaggggcaatcaaataccttacctttcgtctaaacagcactcttcccagtggagtcttagtcgatcatatccaaaccattcactgataattcgcaatcgactcaccattcagccgtgcttagctttcaaggtagcctttgtcccaagacatgtgcccgaccaaggaagataagaaagttataagaaaggtatttgtgttgtatatcacagtggagaatttatatcgacctttttttgtttgtttgttttttgtttcttatcagatgaacatgttctttctgtcattaaaggaaatgcatgcttagctctaccatagagtcaggaaaacttcatagtttttgcccatcgactgatctgaatgatttaactgggtgctttttgaaatcgtgtcaaagtatagacatggcaagtgaatattatatttgggagaaggcattttaactttatagataaattttttttccttttacatcagaaagaaactgtaaagaactgatctgtgcaaataaatataagttaatcgacccaactacattctattggtaaagagttgttttgtatgattgtgagcatttgtcaatcttttataaataaaatagctgcaataagttgggacctatttctgtcttatctttctaactctaaagcaatgttgggtgtgttggtagcaactttgtgagtgtgagacggattatattcactttgtatagactaggagacactgatggcttttcaaagataaatataaacaatgctgtgattattcattgttttttgctatcattcttcaccgagagaggtaatcaacagttcattctctatgaatcttagtagagccagccagagctttacataccctcgagttataagtttggtaaagtttaaacaaggtacatgcctttaaatctctttaaagtaaacatctctttttctaatgcaaaggaatggtattagactctcagttcttattgatatggagaggattggcctgtctgggtcaagggcagacactgagagactgcagaggcacaggcactcaacagattagttcagccacttttgtacttcagtgttgctacagcaattgcccctgtgcaacgtgccaggttgcaggcatgttctcagtatcagggtccttcaaatatctacggacaaaaaagaattatttcaaccagggaaaacgtgcccagcactcggcttaaatgggtcacacaagacattgttttgaaggacaaggtgttcaattaaaaattagacctatggtgccatcttcttcttggattagctgcttcttgatagttcttttgtttctaataatattaggtataataggcctaataatgtctagaattaattttgatcacatgtcaggctaaaatgtggtcctcagactcaacactgaccaatgacttgagcagatttcccatcaccaccacttccagttggaaagatgtctttaagtggccagcacattgatgggacccagacggtgttggcgcactgatttgtagaacagagtcccagagccacatggatgttaaggggatggaacgtgagcgggtggaagcacaagggtataaagtgacatgatataaagattgacatgcttcagtataaatcctggagccaaaggaaaatgaaaatgaatgtatttcctctaattaccttcagatatagatttttgattagcttcaagtatacatttttgatgagacatcctgaatattttaaataaactctcttgtgttcttaggtatatcccacacaggtgtggggggaaaataaatgcatttgatgtactgtaacactcctgtctatacaggccaggagagggcagcatgcaaactctgaaaaagtgatttgatacctccccctgaccatgaggaagactccggtcgccaaatggctaaaaaatctccctccaacttgaagtgccctcttccctttggagagccaactctagagtcttagtaaaggcacaccatccagaagggtttgtttctattttggcctccagaattggtgctacctggcaaaatcagaaaagcagcagcatatttcacagtgaactcaatttccctttcttttaattagctttaccctttgagcctattcaagcaggggaacacttgaccagctcctatgaaatgctaagttgacttcgtctagaacaaacattgtctgcattaaaaatattattcaacctggctctataggtgtgactgtaaaggctgagaggaagctaatcttatcatctatggaaaactagctgcttctctctgcttttatgcaattataacacgaaccctggataatgcattgtattttctaattatggtagctacgttttgggaaagttgatggatgtgtgacattgtacttagagttaataaaaatccagcagctctgtaatgagatttctctgcctttgctaggaatttaaatctcatcagcatttcaaacgatctttacttttctcttattgataatgtttaaaaattaagattgttctaacatttgttgaatgcataccatgtgccagattagagtagacacatctcacagattatttaattcagtcttcaccacagtctcaggagtttatcttctgcaagttttactgagaatttcttgtaaccgtaacatctgatagctgagaacatattccttcagtcagtcagtcctacaggcatgcattcaacagatatctattgagtctctttgtataattataagataataacaattaatcatcaacagtatggttgcttttactagtatagtcctttacattatattttcacatacattcttgtgtttaattcctgtatttcacatacattcttgtgtttatttcacacattcttgcatttaattcctgccagttattcacatatgcaaaaacaataacagcaaacatcttctatagcactagcccatcattaaatgattgaatttacatatatgatttcaatcatgatggaatattgattgatttagtttcagatccacaggagtggatttgatcagatgtttatcatccatctaatagacgaaaaacagatgaaaaatattcaccctcaggcccactacttgagagcaacatagatctgtgtaaactttaacttctctgctaagagcgtgctcagtgtctggaggcaccatcccctggcctgcagagaccacctttcatggttccttatgaaaacttggagcaatgcagaaatatgtgtcttcaaacatacgtatttaagacttcaacttgaccaatggtatggaaaatacacttacaatgtcatttctatgaactcagagaatgtaaactttgaaggaaacaggcaaaaagcatcactttctgtcagagggtctaatagtattaagactttttttgacctagaagagagttatctagtaattatgaaaaaaaaaatttaacctaagaaactcaggagacctgggtttgcacctgtttccatttttcacatccttggggaaagtctacactctctcttgagtttactctttacaatgagaaggcggaagtggctcactgggcttcattccagctgtaaacatcaattctacgtgcttccctctgagaaatggctgacagttgttagttaaagaatgattatttgctaaacattttataggtatcatctaatccttacaaaaatcttagctagtagtgttattatcctcatttacagatgacattactaagacttagagctttcaaaaagtgacacagtcaagcatgctgtagaatcatttcaatctggcagggctcagtggctcacgcctgtaatcccagcattttgggaggccgaggtgggtggatcacttgaggtcaggagtttgagaccagcctggccaacatggtgaaatcccgtctctactaaaaatacaaaattagccgggcatggtggtgcacgcctgtaatcccagctacttgggaggctgtggcaggagaatggcttgaacctgggaggtggaggttgcagtgagctgagatcgcgccactgcactccagcctgggcaacaggagcgaaactccacctcaaaaaaaaaaaaaaaaaagaactgtttcaatcttaactcttccacacttcctctagtatgttgtgccttcattcacttacaagtactgaaaagatactatgtgcataaagcagtgttcaagattatagggcataatagtgaagaagacagttaaggtaccttaaagagctcaatactagtaggaaagaccaggaataacctaatgattacagtggtgtttgttgggtattataaccaggatcctccgaaaatctatggcattgttttggccttactaacaaagccatttgacaacacaagtcttttcattgtaatagctcaaattttttctttacatcatttcagatattttttccactggagtttaatatggttttagtcttccttgtataattatttttgtaacatgtttacatctttcactaactttcaagctcccctgagggcagaggctatttcttgttcttctttttatttctcagcacaaaactgatgcttaaggaactatttctgatctgaatctattgagatccagctgcagctaatttagagctaggatcagagactgctgcttatctgctgaaagacacagtcttcaaaaaattctaaacacacacatctaccataggctaaacaaatgacaaacccagtcttttgtcctgggaactttttgttttttttctttttgtcttgtgttatttatcccttatgctacagactcctaaatgtttaaaatgatcatttcagtgagaaaataaaaatgtcatgaaaaatcaattaattttttaaaaatttacgacttagacattaaaatactaaatcaacaattttgataggttttgtttttccaagtagaagaaaatttatttatttattattagagaatgccaaggtgttcctgtaaatttatctgtcattcccctgggatggcctgttcataacaacctggaatgcacgctgactttctgggctcattgcttccccttggaaattaacaaattcttgctcaagcagaagaaaatgataagattactgaaaattctggaaacgctgtgatttttggattagaagatttaatttaggagatgcaggagagtttttaaggggactaatttgttctatgtggttttcagaggttagatttttaaaaaatctctataaggatactttttaccttggtgattttttatttgtttgtttgtttgttttttgagacaaggtctcattctgctgcccaggctggagtgcagtggtgcagtggcatgatctcgactcactgcagcctcaacctctcacgttcaagtgatccccccacctcagcctccgaagtagctgagactagaggcatgtgccaccatgcctggctaatttttcaatttttttggagatgtttggaatgcttgttccttggtgccataaagaaatagcacttgaacataaatttaatatatttagtaaggccatttttacttccgtagaaagggtacactcgccagcagttttgccacgagagtacactgaacaaaggaaacagggtcatttataacctgacgcatccatcctactgctgtgtctggtttccattggctggaacgggacctcacattctgtatttgtcccgattggctagcaacttagaactttttaaaagaggcaaaggtagaggagaacaaaggaaggaggaagtaacttgtggaatgctgagaaaggtaaaaacacttttaaataaggaagaggaacaggctatgacctaatgcttgcttggaccagtataagcatgccagggcaaatatttaggagcacaggtctgaataaattttgcttctaagagaagttactatttattcctaattagatggggaggaaagtctttgaagaggaacctctacttttactttttacaaagagatgggtctcaccatgtttgccaagctggtcccgaactcgggggctcaagcgagcctcctgccttggcctcacaaagtgctgggattataggcgggagccaccatgcccagcctactttggtgttctataagaattgaggggaatctgtgacatttgatagaaaaaaaaattgcttcttgacttccacttacctgtaactgaaatatcacattctctttagttacgaatgtaacaaaccacagtaacatcagtggaatcacagctttgtcaccaatagaaatcagaattactttcatgttacagttgataccagagtctcaaaatatcacttacacttacctagtacttaaaactacttgaaaattatggaagtgatcatacctgcttttagatctcattatttagtcccttataaacaggaccagacaattgtatatcatacattttatacacacacacacacacacacacacacacatacgtatagttatataaagctgatctaattgggatatttgtcccctccacatcacatgttgaaatgtgacccccaatactggaggtagggcctggtgggaggtgttttcatcctgggggtagatcccgcattaatggcttggtgccctccccacggtaatgagtgggttctccctcagtgcattcattcacttgaaagctcgttctttaaagagagcccggcacctcccttccttctctcctgctccctctcttactgtgtgacacccctgcctccccttaacccctcgccgtgagtggaagcctgttaaggccctcattagaagccaagcagaagatgccagcaccatgtttcttgtacatctgcagagctgtgagtcaaataaacctcttttccttataaattacccagcctccttggatattccatgatagcagtgcaaatggactaacacaatagcatatatatatatataaaatacatatataacacaatagcatatataaaatacatatataataacacaataacatatatgtgtgtgtgtatgtatatgtatgtatatatagcttgccttgtaatagtatatactttttgaatttaaaaacattattctgagaaggaatcattaaggttcatcagactttaaggcagtccatggggaagaacaggtaaaaaatcccacacagtagggcagtaaatttgatgtcaacctttctaacaccttcagctgtcttaaatgggatgggtagccatgtgagccaatgaagtttgtgctggagggggagatggatgggagatggatgggagatggatgggagatggatgggagatggatgggagaggagccatgcctcagatatggagttgggccttgatggtaaaacccaacactgaggctctttaggctcaagagaaagagaagaggagatgtgtatctcttccgtttacttgaatttgctctagtttgagtcaaatggcttctataaagagggaagagtccctgagtgtatacctcatgccacttctctttgtatttgaaactggatggtctcaagcaccagtaattacttgttggatgagtgaattgaatggctcaaggccgcagttgatgatcaggtgtggctggtgccctggagtcacagcctatctgcatgagttcccattgatagctccgcaccgcaccgcattcaccgccttggaattctctctattttatttttttttgagacgagtctcgctctgtcgcagctctgtcacccaggctggagtgcaatggtgcgatctcagctcactgcaagctccacctcccgggttcacgccattctcctgcctcagcctcccgagtagctgggactacaggcgcccgccaccacacccggctagtattttgtatttttagtagagaaggggtttcaccatgttagccaggatggtctcgatctcctgacctcgtgatccgcctgcctcggcctcccaaagtgctggattttttttgagatcagtctcgctctgtcaccaggctggagtgcagtggcgggatctcagatcactgcaaactctgcctcctgggttcaagcaattctcctgcctaagcctcccaagtacctgggattacaggctctgtcaccatgcccggctaattttttatttttattagagacgcggtttcaccatgttggccaggatggtcttgatctcttgacctcgtgatcctcctgcctcggcctcccaaagtgctgggattacaggctggaattctcttttcatgctcttttctcttctgctacgatgtgagctctttaaggaattataactatttttatcttatatgttacagagaatcacaatgcttagtgtttggtgaataaatgaataaatgtccctgtagaggtcactattgttacagaaccaatggccccatttaaaaaaaaataaattaaggaaaaaacatataagaaagaatacttctgactttactcagctgaagtatcatgggatggagtgataatgttaaattctggcccactaagtacccaaataaaaacctcagaaaagaattctgttaatgataagacaagcaacctctcttcctgttcagcttagtggaagtgttgacagaaaatagcttttaggggcctgggcaagctctgaaaatttctagggaggcaaagtgttttatttggtacctaagctgagaacttctctgtattaaaggatgccaagatattcctacaagtgtatccttcatatccataaggttatggaactagttttggaaggtattgcttttgctgaaaggaaaagtaggcaggggggcaagagaggatttattgagcacttactatatgttccaggtattttaacacacaatatcctttttttttttttttttttgagatggattctcactctgtcgcccaggctggagtgcaatggtgcaatctcggccttggctcgctgcaacctccgcctcccgggttcaagcgattctcctgcctcagcctccagagtagctgggattacaggcatgtgccaccatgcctggctaatttttgtatttttagcagagacggggtttcgccatgttggccaggctggtctcgaactcctgacctcaggagagatgcccgcctcggcctctcaaagtgctgggattacaggtgtgagccaccgtgccgggcctaacacacaatatcttaataagcttttgtaacatctttttgaggtaaatgctgttgtccacatcttaccaacaaagaactgaagctcactgaggtgcagtaaatttcctaactttacacagcctcttcacagaggctaaataagcattcagactgagggcttaagaagctttttcccttaataactttggctctatgtcctcacattatcttaggcttcaaactggagacacaggcataagactccatgtaggttatgttgggtgggtagtcaaacagagggatgtgtaccattggtttggagcatgaattttgaagtcaaataaacctggctttgttcctatctgtgtggaactatcactttgtatcagtaatcctcatctgaagttgtatagcgctgtcttacgaattatgtgagataatgcttttcatacaggcataaaaactcaattattattgttactgtaactattattattttgcaggcttttgatattagtgaattggggctgagaagcaaaggtcttcagaatgtttctgtgaaggttgctggaagaacagtttattactattactactttggaattgaggcttcaaatctaattttgtgaactgagataaacaaattgaaatatttgggcctgaattttatctttgaaatggaaataataattatttggaggaagagctaatcaagcactctaaacaaaaccattgattcattcaacaattatttatggaaccagagctagaaatagcaggagatcaaaagacggaccactttttcaaggagctaatagttcatggggaaggagagacatgcatgtcagcaataaaaacacagccaggcacggtggctcacgcctgtaatcccagcattttgggaggccgaggcaggtggatctcctgaggtcaggagttcgagaccagactggccaacatggtgaagccccgtctctattaaaaatacaaatcttagccgtgtgcggtggtgggcgcctgtaatcccagctactcaggaggctgaggtaggagaattgcttgagcctgggaggtggaggttgtagtgagccgagaccgtgccattgcactccagcctaggtgacaagagcaaaactccatctcaaaaaagaaaagaaaaaagaaaagaaaacaataaaaacacaaggtaaaaaccggatagaactggtaaagacatggacacataggtaccttgagtgttggattagtgaactgttatttcaaaggaagatgatctgagtgctcctgtaaaggtctgggaaatttacactgtgccacttttcacgattttttttctgctttctccactccatgatacatgttggatgtttgatgccttccaaatcaagagtttccaagataaaaggaaaacacgtaatctcgttttacacataaggaagcgatagcccaaaaagttgtgtgttttaagactgcaaactaccttgttgtcaaattagcactcgaacccaggtttcctcattcccagtctacccttctttctactacaccatactcccttttgagcctccaccattaggctgaccctaaaccaacggtacatgaagtgttgcaagatagattacacaaaggtccaaggtacagctgcaggatatgtgccagactgggggagaaatcattttgctttgggggcaatagaaggatttcatataaatgcaacaaagtttgttgttgttgtttcatttggattattttccctagtgctcactgtggtactaaattatcccggagcttggatgctccaaggccgaggtccactgaaacagtcctaatcatttctagaagcccagtgatgccttcagctggtgtgatggataaagcagcagctctggccagtgactacccttcccaggttttcaagtgttgtggtacattttgacttatcaaagtaatagctatgactcttcttctcttctttctggaccaaaagatcagtcttctctgcgaaggttttttcccttccccaaacttgcgtttcctctattccaaataccccatttggactggtttatttggtcatgcttagactttcaaccaacaaatgcagcctctggaccggattcagggaaagaaatgagtgtgtccatccagagcttttccccttctgtttgtcagaggaaagtcactccctggaggaaaacatcctgttcttctttagccagatcatattggcacaacacttcctctgctcaccccatcccttttttatgtctggaaccacacatgcacagaaccaggcagccacctgggatgatagacttcccaataaatagtagacacagccctcacttactgttgttgtattttttttttttttttgagacagagtctcactctgttgccccggctgaagtggagtggcatgatcttggctcactggaacctccacctcctggattcaagcaattctcctgcctcagcctcccaagtagctgggactacaggcgtgcaccaccacaccaggctaattttgtgtttttagtagatatcgggtttcgccatgttagccaggctggcctcaaactcctgacctcgagtcatctgcctgcctcggtctcccaaaatgctgagattacaggcatgagccaccacacccgaccacttactctttattgaatgaatcagtggatggatggatggatggatggatgggtgggtaagtgaatggataaagtgcagccactcttctccgtggtattttgagagcactatgaaagtcagtagccagatggactatgcactatggggcaagtattattctttggagagacaagcagacatttgactccagaagagaaagcagcacagtgcagggcatagatcaagcagagtatgcctaaggcagaaaagccatattccatggctactcacttattcttgccatcctactccacttcagttcacatgccactgactttgagtaattaggccagggaagataaaaaaaactaactcctaataccaagttctttttatccaaatttggagcaaaactcctgagctctattcttggggttgaatgagacagcactgctgatgactgatgtctgaaaaggcaccatatggatttgtacaaagggaagaaaataatcctcagttgtaaaaatatctttggtcttcataagggtgatatgtacccacatgtttctgtcaggtggttttgctataaatgattactcttggactaatagaaaaatttccttttatagtgattgtacattttcccagattatcagtgtagcatgcaaaatcccacaacttcagacatttaaaagatcaaaggcagagaggccattggggtcttttgactcaccacacaccagaacaatagtttggctaccaaaagtccctttaacgacaacaagaaagtgtgctttcataattaccaagctgcaccgtgaaaaccagtatgcattcctaattcttgcattaaatattcctgttgtttcttgatggcagtaaaattcaaattgtctccatatgattaaaacgttggccaattgaggttcggagctgtttagtcgatattaactgcagtggtgttgaactgattttctgtttcagatgacagccaaaactatcaaataaatccaaaaatatttattagggtggcttctgaatatatagagtgtagtttatgacactctcagtaatctcactgaaggaagggaaaatatattttccatctgtgtaaacccctcagtagctggcagagggtagttgcttagaaaatgtttcgggggtgcatgaaaagatgagcaacttgggcatggagatttgaaagtaaggctctgttaatttaaaaaatctaacaaagacacagataatgctaacaaatcagccatccgcttagaactttagtcctatttcatcagagttctgatttgtgtgtattcaacaaacatttattgagtttctacaatgtgccaagcattgggaatataaaaaagcataagacctagtccttgcctctcagcagctcccaggtcactaggagaaacaaacatgtaaacaaacagccacattcaatattaaaggtgacctttgagtaaaatgaggcgggagcaaggcggaaagggacgtttgaaacactggttttgctcagcagggactgtggagcacgtatcgtactagaagagattatgtgcttgttattctcagcagttcccagctctcacatcactttcttagcagtttagttttgttgtcgtgacagcatagcagctctgctgtgaaagtttcttcctagctcctggaactacaaggacaggcatacagtttgtggcatctaaataccccgctgatttgcttgcttgtagctcaggagtgccctttggcaatctgtgctctgagagccctggctcctgagctctgttgcacacccgagacagcggtctcattcctggctttcttctaaaggatcgtaaccacggtcattaaaatggattcttggaatccaagcaagacacattcaggtgtagttctttggaaaaatatgatcctaggaagggaatgcgccacagtagagtagtaatactccgtttctggtttcctatctggcactggctgaatttcagttcatgagaaagaaggacagagcaggccagtagtttccagcttttatttacttgtgcactggccagaatgcaggacggagaaagtgactatcaaaaggtcaggtcctttttttctctctgcccgaagtatgcacaaggagataaccaaatgtttgtttttctatcagagcgtaagtttgggtacatctacgtgactaacggcagctgaattgaaatcctgtgtcaaagacttacctggaatgctctaaactgctctcaacagcctgagatggcattagaaatagattgagtcaccttgtgtgtttttttttttttgacagagttttttcttgttgcccaggctggagtgcaatggcacaatctcagctcaccgcaacctctgcctcctgggttcaagcaattctcctgcctcagcctcctgagtagctgggattacagttgtgtgtcactatgaccggctaatttttgtatttttagtagagatggggtttcaccatgttggttaggctggtctcaaactcctgatctcaggtgatccacctgcctcagcctcccaaagtgctgggattacaggagtgaactaccgtgcccggcaagccaccttgttttatagggtgattgcatacaccaatgaatgacctttggtccatagtcattaggacagaaaagttgagtaattcctctatagtttcgcatttccttaacttttcctgtgggaaaatataatggatatcttaaacactgactaagacctacataacacttattatatgtgatgattgattagacttaggattctaagttatatttaagcaagtaggatcttcatctcccaaattaattcaagaatgttcatgatgcaataataataatgacaacaaaaataatgcctaccgatcattcagcctacacaatagcagaacacttatttggagtattctactataataactgatattatagtcgtcacaacttatttaggatttgttatatgccaagcactcaggtaaatcttccagtgcatttaagccttaacaacagtcctgtgacaattgcattgttatcctcgttctccagaaaccagatcatcaagtcactcccccttgaggaaaaggtaggccctttttctgtctgcctctaaaacacttcctcttaaccttcatgctagactaagacctggacacattattaggtgttttataaacacagtctcatttaattctcaagacaagccaggtattattattatcctttttcatacaaatgaaagtccagagctccagtgccaaaagcaaggagccagaattcagacccaactcggcctgactccaaagcccaggctttctgtccactcaatatgccgcctccagatggcttccagggcattatcctcattcctgaattgccttcccagtgacttttcttccccctgaaattcccttattagggaataacaccttccattccataatttggaatataactggaaaagcaaaatcctgctgggatatttgaagattgacccaaagagctctgggttgccaagggctgcccaggaggagggggtgcaggaaagggtgcatggggaggggatgaagtataaccccaagagagcaaaagaacttaagaaaaggagccctgggaggtaatgaagaaagcacatacttcactttctttttgagactgagtctcactctgtggccaggctggagtgcagtggcgcaatcttggctcactgcaacctccacctcctgggttcaagtgattctcctgcctcagcctcccaaatagctgggactacaggtgcacaccaccatgcccagctaacctttgtatttgtaggagatccaccctcctcggcctcccgaagtgctgggattacaggcatgagccaccacgcccggccatacttcactttttttatatgggctaactcagtgggtattagattgccttgtttatatgtattatacagtcgtgtgccacataatgacattttggtcaagacaaactgcatatatgatatggtcccataagattataatggagctgaaaaattcctatcacacaaatgtttatcactgtgtttatttctttatactattcagtacagtaacgtcctgaacaggttggtagcctctgagcagcaggctataccatataggcaaggtgttttgtgtaagtatgctctatgatgctcgtacaaggatgaaatctctaaaaacacatttttagaatgtgtcccctgtcgttaagtgacacatgactgaatatatatatacatatatataaatattcatgtataaatatatatatttgactctgaacttagtttttgctttgaatttcactgtagtatcccctgaagatactatttataagaagatctatgccaaagaacatatacaaactcaacttggtttttcttgggtctttctcttaaatcttcttttggattactaaattctcaaatgttctacccatgtaaggttatcccactactccaaatggttgagtttctcagtccagttttcctgtcttcttaggttcaacccaatattctttcctggtttatttccgggaaaagagcaaataaagaatgaaccaatttttatccttttacccttttatcaattccatgcagtgactgaatgctccccacaatgcctgccacgtgtggcatgaatattgcatagtgaggaacttaatttatgggaatcaagctgatgaaaactctcaaaaccaggatgaggccgggagcagtggctcacaccacgcctctaatcccaacactttgggaggccaaggcaggaggatcacttgagcccagtagttcaagaccagcctgggaaacttggcaagacccgatctctacaaaaaatcaaaaaattagcaggatgtagtgttgtgtgcctgtggtcccagctacttgaaaggccgcagcaggaggattacttgagcccaggagttcaaggctgcagtgagttatgatcatgccattgcactctagcctaggaaacagagtgagaccctgtctcaaaacaaacaaacaaacaaattaagatgaccattaaataaatcacccaaactggactacttttcaaattgaaagagggtgcgattaacactgggatagcaagcagaaggtaggccattgcagagcaaagaaacggcaaggagaaagagtgaagtctggccactaaggtcgtgtcagcccttttaggtaacatagtccttgtcatttaatagacactgagaacaatcacgcctattcatttacaaacactaggaaagtactatgcaccaggactaggctaggccctgtgaaggattccgccatgaagctcagagtctactgcaacacacaaaggtgacttacatgagtaacagtaatggtactaaccaacttttattgagaactttccatatgacacatacgttgctgattaccttttgttcacgatctcatttaatcttcacctaatcttgtaaactaggtagactcattgtgctgggttttaaaatctggatactgagactcagagaggtaagttatatgttggtcttccactggtctcccaactcataactggtggaaacagaattcaggactcagtgtgtggaatctgaaggcctgagctcatagctccatgctttgctgcttctctgcacaggacactaagataaatgtcatggtagagataggagccaagtgacaatggactgcaaagcagcctcttcccccttcctgtcatgcatggggagcacaagagaagggaaagctttacaaaggagatgacatttgagatgggccttaaagactacctagactttattttattttattttatttttttcttttcttgagatggagtttcactcttgttgcccaggctggattgcaatggcatgatcttggctcactgcaacctctgcctcctgggtttgagcaattctcctgcctcagcctcccgagtagctaggattacaggcgcccactaccatgccggctaattttttttttttttttgtagttttaatagagacggggtttcaccatgttgatcaggctggtctcgaacttctgtcctcaggtgatccgcctgccttggcttcccaacctgctgggattacaagcttgagccaccgtgcccggccaagattacctagactttcatcagggagcagagaggcaaagtggagacattccagggcaagtccaagcctcacaggccagtgcatgcggcaggggagcagttttctcctctgtaacaccaatgtgtaaggggcagtgatggacctgtgtattgaaggctgcctgtctctgcgatggcgagcaggaaagggccccaacttgacaacattcttgaggcacataaatacataatcacgtgcagagttgtttggtccctaggaagtggtttctatcacatgtcaggattgtagactctgtgttaaacatccagtcaaggaatctgtcaagaaagacttcagcaaaccttatttgtcagaggatatcaaatgttggagtactatctaagtgaattctgaagataactaaaaaggaccattttaatggcttttttttaacacttaaatattttttggtgcaaatattttcaaaaactattatttatttccccaaattacccaaaaggccactgttatgatggtatctcgttgtgtccactggcacaataaaaagttataagtcagtctctttgcatataaacttatcttacaaatgaattgtgtcttacaagtctgattgcatttcactctaaaaatcatgagatgtgctaattagtaatatttcactcaccttctagatgaaattaaattttagaagtagtctcaagcaaatttacctgcctgtctacattgactcttttgttaaatgtatttttggttccaatgccaagatggagtgtctctcagctgtagccacagcctttagaattcttctacttgtagcctggagaggaggctccatcacagacttttatatccttggaaccagactgtaaaattttatagtcaattgtagaaccgtggtctgaaaaacctattcaaacctttcaaatacaaacttcatcctacagtagaattaagagccatttattttctatcaaaagcatcataaacagctccataccttgtagcaaatcaggaaaccagattgccagggaaggtactgggcctactaactcagctgctggagctgtttcaaaagctcctggatgacctccaaaggccccttccacttcaaaaaactccctcacttttcagcaagtcgtgacttatgaccaggtcttgggcaacccaatccgtgatcatctgtgaaagagcaatccatttccagatcattaggaaaattaccaagcctagcacttagttgaaataaaggccagaaaagttgaaggtgggagatgtgggcaagaaggaataaatgtaccaagaggaaattccgccaaaacgtgagcgtcgactaacatgagtgaggaaggaataccaaagacgtaagctcttctgtacacatgggcctcctcaacaccagcccccttcatcaaatgctgaataattttcttaggtatatctctaagctacgtaacctcttttcagttttctaacaacattaattccacttcattcaatatgttccttcaacaagcgtttattgagtcccttgtacgtgttagtcgctctgtcaggctctgggactaccctggaggatcataactgtatgattcatgccttcatggagccaatgacagtggtagagagtggaaagtaaacaaggaaataataaataattgtgttagttgtaggcagaaaacagcacgagtgcttcttttgatggggtggacagggaaatttcctttgaggaaataaatgtcagttaaggagaagacagttaagaagtcatttctggctgggcatggtggctcacgcctgtaatcccagcacttcgggaggccaaggagggcagatcatgaggtcaggcatttgagaccagcctggccaacctggtgaaaccccttctctactaaaaatacaaaaattagccgggcatggaggcgcgtgcctgtaatcccactcaggaggctgagacaggagaatcacttgaacccaggaggtggagcttgcagtgagccgagatcgccccactgcactccagcctgggcaacagagggagactccgcctcaaaaaaagaaaagaaaaaagaaaaaaaaaaaggtcatgagacttggggaagaacaagcacaaaattctcaaacaaggccgggtgcagtggctcacacctgtaatcccagcactttgggaggccgaggtgcatatatcacctgaggtcaggagttagttggtcacctgcccaacatggtgaaactctgtctctactaaaaatacaaaattagctgggcatggtggcacatgcctgtaatcccagctactcagaaggctgaggcaggagaatcgcttgaacccaggaggcagaggttgcagtgagccaggatcgccccattacattccagcttggaccataagaacgaaactctatctcaaaaaaaaaaaaaaagaaagaaaaagaaaaagtaaaaaaatcctcaaacccataaagagcaggaccagatattttctaggaacttctagaggacacttgtgctcagaacttagtgtgcaaatgacagtggaacaatttgaggtgcaaaaactggcaagctatcgagatactacagggccacagccaaggtaaagagctctgatgttagtgtatgtgaatgttattctacattaaaagaatggctgaacacaacacaatgaatagcatctaataataaaagaagtgcatcttcagataaatgttcttaaaatacagctgtagttatgacattttcctgctcacagataactgttcaaagcaaaaggaaactcccaggcactgaggaaagggtccttctccatctcactgtacacacatctcttccacctcccaccatgtgtcctgggagccaaccacccctccacttgaacacgtactgcatttttctaggctcatgctggtcctttctcctccttccccactccaacatccgcctgttgaaattctacccatccgtccagacccagcttaaaggccacctgttccagcaagccttccctttctgtctctgccagaatttttctttccttcctctgtcctcccaaaggactttgcacttctcttaaagtgcttaccacactctgccttgaactatacctattacccacatcaccttccctcctgagtacaacctgctcaagttcagctaggtggcaatgatcagtttatgatcgcataggatcattgttcctacgggatcatgaacaatgggatctcccatgagatcaggagatcccattgttctcataggaacaaggcacccttaggtaccaaagaaagtagaagagatactgggaaaggaacataaggcaatgaaaggtgaagagtaggatgaggaaagaaaattgttaaaatttaatttaatgtctttccttttcttttcttttttttcttttttttttctttttttctgagatggagtttcgcttttgttgcccaggctggagtgcaatggcacgatctcagctcaacacaacctctgcctcccgggttcaagcggttcttctccctcagacccccgagtagctgggattacaggcatgagccgccacgcccggctaattttgtatttttagtagagacagggtttctccatgttggtcaggctggtctttaactcttgacctcaggtcatctgcccgcctcggcctcccaaagtgctgggattacaggcgtgagccaccatgctcggcctaatttaatgtcattttaaaattaaattaaagagatagggtcttgctctgtcgctcaggctggtgtgcagtggtgtgatcacggttcaccatggcctcgccctccagggtgcaagcaatcctctcacctcagcctctcaagtagctggaaccacaggtgcttgccatacagcccagctaatttttaattttaattttaatttttatagggatgtgggtctcattatgttgcccaggctggtcttgaactcttggtctcaggagatcctcctgccttagccacccaaagttctggggttgtaggtttgagccatccagcccagccggaaacaaacttactaaataagtaactatgctttgaaaatgcttcaaagactgtattttaagctttaggcttcctaaacttaattcaagcagcatattcatcccaagtcaacttcacttttgacatattagtgtcattttgtagaggtacagttgtctggtcaacaaacataggttccggttcaggctctacttataattagctgcgtgaccttgcacgaaaaagctcttagagactaaaaagctctacagtttttctatgtgaaaaataaagatgaccttagctggcctgctttcctgtgaatgtctaaaatgttacggtgacaaggcgtaagaagagttgccaccatatgatgactggatgaagtccccaatacctctgcagcaatagacacaggccacaacctccgaagctctgctgtcgaactgactataactaacaggtgtctgagttcgggtattcccagaagcaaacgctgagtcaaggattcaagtgcaagcaatgtagtgagaagtgccaggaacaagggtaggtgttggaagaaatgaccagggaagcgaagatagtcaataaaaggtgcattctaagccagtcatctcaatgggcaaatggctgttagtgcaatgggaaaacactgaaaaacagtgcaaaacactgaaaaacagtacaaaacacacacctcagaatcgtcccttctgggaggtaacaaaaaccaagatatttgtactccacatctgccattcattggttaaggagtgcccctgtgaggacgtgaactcccaggcacttccagctccctgtgcctgcaggcaccgtgggttccatgtgccgtttcacagcagttttccatcaaagagcaaggtgctggcccttgacagccaggctggagggcacagaaatggtaagggactggagggaatagggcagagttcagaaaacatctgccctaacaggcctacaaatcaggccaaagagaataatactacctcagtggattcagaatctagcataggtagggtgttctttcacaataaaaacacagaattaagcattgtgtagtctatctgcatggctaagagtgccattcattatagtatatttcaacctaatcaatgcataaattatatctacacaatgtaacataatgcagctaataagaatagtatattaaagctatttacatgaaaaaatgctcataaaagtgaaaacggctggtatggtagctcacacctataatcctagcactttgggaggctgaggcaggtggatcacttgagcccaggagttcaagaccagcctgggcaacatggcaaaattctgtctctactaaaaatacaaaaattagccagtcacagtggcttatgcttgtagcctcagctacgtgggaggctgaggcatgagaaccacttgaacctgcgagggtgaggttgcagtaagccgagatcacactactgccctccagcctgggtgacagagcaagactctgtccccacccccccaaaaaaaagaaaaaagaaaaaaagaaagaaaagaaagtgaaaatgcaagttacatatttttttaaaagcatgtctatataaatacgcctaaaaatctgggagtacatatttatatagacagtgtgtgttttaacaggggttatctttgagtggtaggcttcttagtgattttaattttctgctgatctatattttctcatttttctctaattgatctatatgatttacaaagacttaacttcagaataggaaaaaataatcagacccaagagcaggatcgatcaaataaagccttcgagagggtaaagtcaatttgatccagaaatgtctataatgtatgttatatatatttccaagaattctctcctgattgctttggtgacacgtatattaagttctttcctcactctgctgcagtctctcgtttttccagtttaattcactttcagtagaaaagtagaactgactagaacccctgataggcatctttaaacatgcagtttctttgccaaagtcaccttaagtagaggttgggtaaaaaactgaaatcaacacttttgaacttcattctttaagataaactctttttcaactctctttgaaggaagtaaccgaggtaccagggtgacacctgattgaccactattctgtattctctgtgtacaaacatcatgggtacatgcagtttggttatttgcagatttctgttggggttgggagcctggttcatgtgtctctcctcggctcttcttccagggtccacttccttccttacataccagcatcaggaactggttctcttctctgctaataagcttagtcctggacaagcttctgcacttggagtattcactaagcacagaagcagcaggaacaagagggagaactattcctttaaggtcactcagtgagaagtctctctaaagatctatttgttcttcacagagaaaggagtcagcatccatttctgctaagtagtgatcaggagaaagtcaaattagattaattacctggaataaaaatggacttgtacttttgctagtaatggatttctagtccagggagctttacaagtattaatagcatactagttcttggcagatgacagtcattagtgagaaagtaactctatcctccggagatgatttagctttgtcactatgtagtaatctttgtcttaatcttatgttgaggcagagaaaaatttttcttaaatttgcttgtgaagcataatagtttctagagtaagtcacagaaagggcttttctgctctgtgtgtgagttttgtctttttttttttttctatcgtgggttctgaattaaatatagtaagattcttttaataattctttattttgagggcccaagtgggaaaattgttctgagaaagaactcatcagatgcaactcatcagatgcaagttctttttaaatgcacaagcttcctttcccttcatactcttaactcagtgttctttaaaccaaggattggccttcctgggccaagtaggttaccatcatgtctccactgtgaccttttgaggggccctccacctggttggaactttctttctctttttttttttttttttttttttttttgagatggagtctctctctgtcacctaggctgtaatacagtggcatgacctcggctcactgaaacctccgcctcccaggttcaagcgattctcctgcctcagcctcctgagtagctgggattacaggcgcccgccaccacgcctggctaatttttgtgtgtatagtagagatggggtttcaccgtgttggccaagctggtctcgaactccagacctcaagtgatcctcccaccttgtcctcccaaagtgctaagattacaggggtgagccaccgtgcccagtcagaactttatttctttaatcccgagactgcagtctgtgttaagtacatccccgtcagagaaattagggtatttaatctatttaatgccagattttaacccttggtcacagctgagttgcagatgaccataacagtcacaggtggcagtcctcacagggccctatggtggcaaggtcctaagagggggtgtctcctttaaactgcaccctcgggaccttccttccttccttcacactagtcttggccctgacatgtgcttatgctcacaaagcacttttacctacattgcctaaattgattctcactacaaacttaggaaatcaagtgaatacaaggatccctccccaccagttgataaggagcctgaattttcaaggtaaaggtcttgcaacaggactgggaccaagagcttcatttttaatgtcatcttctctctagtaaactactttttttccccctcaaatggaagggaaactacaaaaaaggcaaaggatggacagaaaggatggcagcaccgtcatccctcagcttctgtcagggattgtttctaggtcctctgtggataccaaaatcagaggatgctcacatccctaatagaaaatggtgttgtattttcatgtaacctgtgagcttcctctcacatactttaaataaactctaggatacttataatactaatacaatgtaaatgctatgtaaatagttgttatactgcattgctttttatttctttattttgagacagggtatcactctgtcacccaagctagagggctatggtgaaatcatggctcactgcagccttatcctcctgggctcaagcaatcctccttctccagcctcccaagtagctagggctaggaccacaggtgcacgccactatgcccagctaattttttttattttttaatttttaatttttattttcattcttcttttttttttttttttttgagatggagtctcgctctgtcacccaggctggagtccagtggcttgatctcagctcactgcaacctccacctcctgggttaaaacaattcttctgcctcagcctcccctgtagctgggattacaggcacccaccagcatgcctggctaatttttgtgtttttagtggagacagggttttatcatgttggtcaggctggtctcaaactcctgacctcaggtgatccacctgcctcagcctcccaaagggctgggattacaggcatgagccactgcgcccggccattttaaaaaattttttgtagagatggggtcttactgtgttgcccaggcttattgttttcatttgtattattttcattgttgtagtcattgctttctttttttttctccaaatatttttgatctgagtttggttgaatccattgatgcagaaatctaggatatggaggcccaactgtaaagataaaccctacagttcttatcacttattcttgttccttgtgtggggaggggacagcaacctctctaaaggattcaactagcagaggctaatttcagaagtagataaaacacagaataaaatagagatgaaggctgggcgcggtggctcatgcctgtaatcccagcactttgggaggccgaggtgggcagatcacgaggtcaagagattgagaccatcctggccaacaaggtgaaaccccatctctactaaaaatacaaaaaagttagctgggcatggtggcgcatgcctgtagtcccagctactcaggaggctgaggcaggagaatggcttgaacctgggaggtggaggttgcaatgagctgagatagcgtcactgcactccagcctggcgacagagtgagattccgtctaaaaaaaaaaaaaagatagagatgagtaagatgaagggagaaagtgggagaaagggaagagaagaacgtgatttagaaactagaatttatgtagagcatatttggtcatcagagcaaattatagaagacaagtccagctggctgaatgcaacactgccttgaaaaaaggcactgacatcgtgtacatttggtgctattccatgaatggaaattttctagtagcaaagttaattatataagtaaattggccatttgtcattagctatctgtcacatctttatatttttcctaaataacgtctgcatgtttatgtggttggataatttagatgtctccttgggctgagcatttttttgcccttttttttcctccatgagattaacatatatatgccacataagcaacattttctgcaagtaaggattatttcgaaagtgtcacattccagaaactgtactttcagatgatgattcgatgtagttacagattacaaggcactgtgcagacagatacaggaaatgatttttttaggactcacccaggcaaaacggaatcctaaaatgccataaaagaagattgtcattaccatcaaaataagaagatgtggtaaaaaggagaaagaaaatacaagaggttttagtcaagcaaatctaaaatgaaaaaagtaaaatcagccatggaatccagaaatagttttctgagaagtaaattttcctatactttgtttgtcttttggaatctaatagctacgtactttaaaaaaattttgttccttggatcaaagaggagaaaaatatacaacaaatttctctttttttttttttgagacagagttttgctcttctagcccaggctggagtgcaattgtgtgatcttggcttactgcaacccctgcctcctgggttgaagcgattttcctgcctcagcctcccaagtagctgagattacaggtgcacgtcaccacgcacagctaatttttggtatttttagtagagatggggtttcaccatgttggacaggctggtcttgaactcctgacctccggtgatccacctgtctcggcctcccaaagtgctgagattataggcgtgagccaccaggccaggtcaacaaatttcttaataaaattttattcaggtcagaaaataagaattcaatatcttaaactctttttttgtgtgtgtgtgtgatggagtttcactcttgttgcccaggctggagtgcaatggcacgatcttggctcactgcaacctccacctcctgtgttcaagtgattctcctgcctcagcctcccgaatagttgggtttacaggcatgtgccaccacctcagctaattgttgtatttttagtagagacggggtttcaccatgttggccaggatggtcttgatctcttgaccttgtgatccacccgccttggcctcccaaagtgctgggattacaggcatgagccatcgagcccggccatcctaaactcttctaatgaattatagcagtggttctcaaagtgtggttccctggcaggctacaccagcatcacctgaacacttgttggaaagtcacctttcagctgccaccccagacttcctgaatcagacactctgaaggtggggcccagcaatcgtgcattaatgaggcttcaggagatcatgaagtttgagaaccactgtattacagaattgccttgcaggctctaaatagaaaccaatgaagagtttactaaactgttacttgtatgactttattttggagaaccaccaaaatcaaattctgtgtacctattagtgtattctgtaatcaacatttctttaaatttaaaaggcagaaatatctgtatgaaaaattttattttagaactcatattcagaaaacagctgtttaaatatataaattgacaggcatagaaaagcttaattccaagtgaacagaaagttcaattcttagataaaacatttcatactaaaattcttttgctgaattctaaagcaacacaattcagaaaaataattacttttgatagaaattatttattgatttgtataaattaatttaactaaaagttactcattttgattttaatgactttgttataaaattataaaaccccatctaaatatttagataggtgttattttaacttaaaatgttcaaacttaataatagctacaatctatgagcgtttaccacatatcaggccctgctaaccttcataacaaccatataagatgagtaccagtagttgattttggcagatggtaactgagacagagagtttaattaatgactaagaatcgcacagctacttgaatggcagagctgggtgacaaacttaggctgtttcttgagtttatgctcttttttttttttttttgagatggatttttgctgttgtcacccaggctggagtgcagtggcacaatcttggctcactgcaacctccacctcacccatttgagcgattctcttgcctcagcctcccaagtagctgggactacaggcatgcaccactacgcctggctaatttttgtatttttagtagagacacggtttcaccacgttgtccaggctggtgctgaacttttgacctcaggtgatctacccgcctcagcctcccaaagtgctgggattacaggtgtgagccactggcgcggctgagtttatgctcttaactaacaagctacaccctccattattacattattcttaaacacaaatgttcatattaaataggcaatatattggatatctaggctgggcatggtgatgcatgcctgtaatcccagcacctggggagtccaaggcaggaggactgcttgaggtgaggagtttaagatcagcctgggcaaaatagtgagacaccatctcttcaaaaaatttaaaatataattgggtgtggtggcccacctgtagtcttggctactcgagaggctgaggcaggaggattgcttgagcccaggagttccaagttacagtgagctatgattgtgccactgcagttcaacctgggtgacaaagtgagacgctgtcaggaaggaaggaaggatatattggatatgtttcaactaaatgttgcacagaaggtaacgtctaccagcagtaattaacaaattaggcaagtgtctccataaactttttgttaaagcaagtcatcaattatttaaacaagaacatatatcttgataaggcatgtcagcaaatgaaaatattagttgattattggtatgaagagaaaagcttatgaaaattcaaaccatttttattgtaaactggttaagaacagaaatttaacagaaacctaacagttattcatgttacattttgtgtacatactactgtgaaatacttcaggattaacatgcacctttaaaaatttgtatttaaatttcttatttaaatagaaatgaggtcttcctatgtggtccaggctggtctcgaactcctgggctcaagcaatctgcctgccttgacctcccaaagtgctgggattacagacatgagccaccacacccagccagacatgcactttttatcatgttttagagttgctccaatttcagcatccagaagcggagtctaaatttctacaggtgttctggttttagatttgtgtgcatatcacagatgacaaacgcatatgtatgtctgacaccagccactccactttaatatctgctccctcacactgccccatgcaaggggatgcccaaggtagaaacagaatcataagcaaagttacttatgtatctttcaccaggcatgtcttccatcttttaatttttctgccactcctcatgtccttctctcccccagaaatgccctgttgttttagctttaccagttgaaatccatcacacttcaaagcccaaatgctacgccttcaagctctgatgaacctttcttgatgaccccagacagaaaccgttggcactccctgagcattttgtccaatcccatgacattcatattatagttactcatgtagagagatgttcacacccttatgagactgcaaattcctgagagaagtgaacgaaacacctttgctttcccatacctcctatcacagcgtattgcacatgaaaataagaatgcttgctctgttgttatggtttacaaagtgccttcactaaaactctcactctatcctcacctctaccctgtgacgtaggaatgattattatctcattgtaatagatgaaga

SEQ ID NO: 49 - DNA, 32742 bp, Homo sapiens
  source 1..32742: mol_type = other DNA
aattgaaaggtcagcctttcgcgcgctgtgtaggcaagttacccgtgttctgcgttgccggccgtgggtgctctggccacagtgagttaggggcgtcggagcgggtttctccaaccgcaatcggctccgctcaaggggaggaggagagtcccttctcggaaggtgagaggagcgggctgtgcggaggctaatgggtgggttcccttgggggtcgacctgcgcgtcacctccgaccctcctctcgggattcgggtcttccaggaagggaaggagagggtctggcgtgatcttcccaacccaacagcggagcccttagcctgagtggagtatgtgttttgttccgaggggacgtctggcaaccagaggtctgcagttcagtgaacggagggagataagagagcagacgattccgggctggagcaggcgccagggttgccagacttacctcatttttccgcagaagctggcagtccaggttttacatgcaatctctccacctttaaatgttgacaagtacattttcccataatattttgcaggcctaaggaaacgtgtcgtctggaatgggcttgggggccacgcctgcacatctccgcgagacagagggataaagtgaagatggtgctgttattgttacctcgagtgccacatgcgacctctgagatatgtacacagtcattcttactatcgcactcagccattcttactacgctaaagaagaaataattattcgaggatatttgcctggcccagaagaaacttatgtaaatttcatgaactattatatccgttttcctcggagtgagagaaaactctttttagatatcatctgagaggtaagagactgtttttctgaaactgtggcttgaggaccacctgcatccagattaactgctttgtttaaaattcattcacagcagaactagtgaatcccagtcactgagtggagttgagagtctaagaacctctgaaatttgagaactgctggaccagagcctttagagctctgataaggtgtcaacagggtaaagctgcctcctgatcctgtactttctttcttcctttccttccaaacttaacgtttgataggagagatttgtattatgaaatgctaagcaactgctcagtgcccattactgactttttattgtagagtggggggaggtcgtttcatcagaaagggttgtgacagttccagaatctctgtatagaaagggcttagggggctgcaaccggaatggaagggggtggaaagttaaagcatttgtcttgaagctgtatttgcatagcagacgcagtttcacagttctttagggtagctttcagagaggctgatggagttgcccctgggcgccaccactgtttattaccagaatgttcgtgcttagaataatgcgttctaatagcagtgaatttcagtcctaaaaaagtacaggatcatttctgtaattctttttgaatttttcctttgttttttaattgaaatacttaccttcctacaaactgttttgagtttctactcctatttgaatttgcacgttgacccttatgattaatgccctttgtagaggcaatgcgatgccatcgcatgcatggttttgtttgtgcctggctccttgaagcatgtgtcaggagtgaaagtgcaaaagcactttggaaagactaaacaaacaataagcaacagtcaagtggcattagaggtagtattagtgattaatgtaaattctaccctatggaaattgtttgatagggaggagcccagctaaaatattaaagagcagtgattcttgaatatctgaacaatttctggccgggcgcggtggctcacgcctgtaatcccagcactttgggaggccgaggcgggcggatcacgagttcaggagatcgagaccatcctggctaacatggtgaaaccccgtctctactaaaaatacaaaaaattagccgggcgcggtggcgggcgcctgtagtcccagctactgggaaggctgaggcaggagaatggcgtgaacccgggaggcggagcttgcagtgagccgatataggccactgcagtccctcctgggcgaaagagcgagactccgtctcaaaaaaaaaaaaaaacaacaaaccaatttctgcattggactccaagctttctcttcatttgtctaagatgttttaataaatgtatttttctttaaatattactgttctccctgtctcttttcatatcaggtagttaatttggcaccatggggatacagggattgctacaatttatcaaagaagcttcagaacccatccatgtgaggaagtataaagggcaggtagtagctgtggatacatattgctggcttcacaaaggagctattgcttgtgctgaaaaactagccaaaggtgaacctactgataggtaagtctggaccttatgttaattctttgacaattaagaatgagacctacagtgcctttttttctcccccagaaacggattgttttcactcaatgccagaacttatcaggaagtaaaagttgtatgttttagaatattcccaaatcagggatgacttccttctgtgataataggcctagttttctttctttataataagccagagtatcaagacactgatggacaaagactattaatatctcctttattctttttttttttttttttttttttagatggaatctctagctcaggctggagtgcagtggcacaatcttggctcactgcaacctccgcctcccaggttcaagcaattctcctgtctcagcctcccaagtagctgggattacaggtgcacaccaccatacccggctaatttttgtatatttattagagacagggtttcaccatgttggccaggcaggtctcaaactcctcaagtgatccgcctgctttggcctcccaaagtgctgagattacaggcgtgagccaccatgcctggcccaattcttaacctaagataaattttttaacaaatgctttgaaaatccgtgatgatttctgactcccacattcttgggtacagaaaacatactgctaatcctggttagcaaaaaaacaaatgtgttgtaaaattcattataatttcatatttgctttctcctgaattttgctttatgatcagcaggtcccaatcattgttccataccaatgcaagttcactgtcactgatctacaacacatagaaaaaataaggataacaatgtagtgagtctttcatcaagatgacatatttaaaaggtcatcttttttttctttattttagctgctaagtttgcgttatgcaaaaagattaaagattgttttcccattcctgtttttgagctaaaatgtccttttctttataaaatgatagaagttgtaaatgcagttgtttttgtcacaatacctaatgtaatacctgacccttgattggatcctggatttggaaaaaatagtagcagtggtgtcctggagccaattcatatgagctctttatacaccatgtcttctcagctcagcattcatttgagttcaagtaggtagctcatctgccattgagaaatatttatctcagggaaatcaggcacctcttcccgcagaactggttgttaaacatttaccaggacaccactgaatataagaaacattgttgagacaagtgtaccaattataatataaactgagtattagataatattatgttactattaaattacttagctgtgatatggtgtcgttggaagaatccagtgtttattgtactattctttcaacttttcaatagatttgaaattttttaacataaaatgggggggaaagaccagatttgaaaccaaagatgtcagaattagaagggatatcaaagctctttaattcacagataaggaaaccaaggcttggagggtcaagtagttcaccagacatcacatggctcgtaagtatccaaggcaggatttgaatccaagtctagtaagttagagttccaattcctatgaaaacatctgcttaaaataacaaaataaaaaaccttctctttccatagttttctcatctggcctaaaatagagcagaagtattaccttaagaaaggtgaagcactgaatgtttttctttttttccataggtatgtaggattttgtatgaaatttgtaaatatgttactatctcatgggatcaagcctattctcgtatttgatggatgtactttaccttctaaaaaggaagtagagagatctagaagagagtaagttaattctctacttaatctctaacttcattgcactaaggtcagacactgtagtctatatgataccaatttttaaaattttaagccaggctcagtggcttgcacctgttgtcctaggtactcgggaggttgaggcaagaggatcacttgagcccaggagttcagcaccttagtaccctatgatcatcgctgtgaagagccactgtactccagcctgggcaacatagtgagaccccgtcactaacaattttatctttattttttgacagtctcactctgtcgcccagtctagagtgcagtggtataatcttggctcgctggaaactccacctcccggattcaagcaattcttgtgcctcagcctcccgagtagctgggactacaggcacgtgccaccacacccggctaatttttgtgtttttagtagagatggggttttgccctgttggccaggctggtctcaaactcctggcctcaagtgatctgcccgcctcagcctcctaaagtgctggaattacaggcatgagccactgtgcctggcctaaaaaaaaattaataaataaaattttaatttgttgaggcttattttatagcctagtatgtgaacagatttccttaaatgttatgtatctgctacattatcacttttgtttaaaagtatcttcgttactacattttctttgacaaaaagaattgctgtggaaaagcctaatggtaatcttgtgtgtgtgtgtgtgcatataatcattctaagtcacttgttctttttgccttagaagcctaaagcatctgggttaatgttctcaagggcctggtgtgtactttctaatgagtcaaaaacttttttcagttctaggaaagcttcttgaattacagttctgttacagtttcttgagtcagcctcttaaatgttttatatttaaaaaatgttcttcccttgcagaagacgacaagccaatcttcttaagggaaagcaacttcttcgtgaggggaaagtctcggaagctcgagagtgtttcacccggtctatcaatatcacacatgccatggcccacaaagtaattaaagtaagacaaaggggcagatgggcaagttcaccaaagctagttacaacttgtttattgatgggagaggaagaaaatcaagggtggaaaattgttctaggcctaacctcaagtaaagggcagatgtcagaaggagaagggaacagcatcactagatagagaagacttcagcaatttccaaggagaaatcctaaggcataagtaaggctctctcttttaagtcatgttattccatagcaatggaaggaacagggccaggcacggtggctcacaccagtaatcccagcagtttgggacgctgaggcaggagggtcatttgagctcaggaatttgagaccatcccgggtaacataatgagaccctgtctctattaaaacttaaaaaaatgaagagatggaaggaacaaattcctggaggcatcggtctcacccaactctcctacagtcttcaacacttactgtaaccggcactcttgaatgacagatctgtgatgtagcttcgttgccccaggcaccctacagacttctgttccctttcacctcctccttgcagcagcttctttccttattcctgtaaatcttagtgtcaaggtgcccacattcccagccctcactttcccctttttagagcctgcttggttaaggtgttgtggtttttttgttcgtttgtttgttttgaggcggagtttcactcttgttgcccaggctggagtgcaatggcacgatgtgggctcactgcaacctctgcctcccgggttaaagcgattctcctgcctcagcctcccaagtagctgggattacaggcatgtgccaccacgcccggctacttttgtatttttagtagagatggggtttctccatattggtcacgctgggctcgaactcccaatctcaggtgatctgcccaccttggcctcccaaagtgctcggattacaggtgtgagccaccgtacctggcctgttaaaggtatgatggtaaaggtgaagtcagctttttctagcttacagttctgtcatccagttcctgagctaaaataggcgctacacttctgattttggctttgtcatttgagtctctggctcttttctgtatgggtcaagctagaaggaaacgatgcgatgcaggacagagcgtgaagtataaagaaatgtgtgctctgtgtagtcaggagaagagaggctgcattgtgtgcggaagtagaggagaaaccctgattggacacaaatagtggtgtaaaagtgtgtccagaattggtgggttcttggcctcactgacttcaagaatgaagccgcagaccctcgcggtgagtgttacagctcttaaggtggcgtgtctggagtttattccttctgatgttaggatgtgttcggagtttcttccttctggtgggttcatggtctcgctggctcagaagtgaagctgcagacctttgcggtgagtgttacagctcttaaggcagcgcgtctggagttgttcgttcctccctgggggctcgcggtcttgctggctttaggagtgaagctgcagacctttgcggtgagtgttacagctcataaaagcagcgtggacccaaagagtgagcagtagcaagatgtattgcaaagagcgaaagaacaaagcttccatggtgtggaaggggacctaagtgggttgccactgctggctggggcagccagcttttattctcttatctggccccacccacatcctgctgattggtagaaccgagtggtctgttttgacagggtgctgattggtgcgtttacaatccctgagctggacacaaagattctccactgtccccatcagattagttagatacagtgtctacacaaaggttctccaaggccccaccagagcagctagatacagagtgtctattggtgcattcacaaaccctgagctagacacagggtgctgattggtgtgtttacaaaccttgagctagatacagagtgccgattggtgtatttacaatccctgagctagacgtaaagattctccaaggccccaccagactcaggagcccagctggcttcacccagtggatcccgcacggggctgcaggtgaagctgcctgtcagtcctgcgccgtctgcccgcactcctcagcccttgggtggtggatgagactgggcgccgtggagcagggggtggtgctcgttggggaggctcgggcggcacaggagcccacggagggggtgggaggctcaggcatggcgggctgcagtcccgagtcctgccccgcaggaaggcagctaaggccccgcgagaaatagagcgcagcgccggtgggccggcactgctgggggacccagtacatcctccgcagccgctggcccgggtgctaagccctcattgcctggggccgacagggccggccggctgctctgagtgcggggccgccaagcccacgcccacccggaactccagctggcccgcaagcaccgcgcgcagccccagttctcgctggcgcctctccctccacacctccctgtaagctgagggagtgggctccggccttggccagcccagaaaggggctcccacagagcagcggtgggctgaagggctcaagtgccgccaaagtgggagcccaggcagaggaggcgccgagagcgagggagggctatgagtactgccagcacgctgtcacttctcaaaaggatgagagtaggactattgctggaccaaaaaaggaaaaaaaatgagaaaaatagcaaattgttaccaaaattgatagcagcaggatcttgatacctctttcctctttttttctttttttctttttttttttttaacttcccaaagcctgtcttcaggccttgggaaccattttcccatagtttagaacatggaagttccagttccagctgcctagattttgacacagcggctatgataggggctgtttttcttggcaagtttattttaaaagtattttctcataatgcattggtttaaatatagtgctatagcctataatatatatgtaagatacattattagaggagagttatgtatgtgtgtatatatacgtgtgtgtgtatatgtatacacacatatacctacgtatatattttccccccaagacattgctggatatggtctataattttatcaatactgtgtcagtacattgactttcgtagcttgacaggacaacctgttatttttatggggaagatatattcaaaactccaaacaaatgtatattttcggaacatagccattcttaagatggaagttttctataatttaaaataagtgggccaggcacaatggctgaacgcttacaatgccaacactttgggaagctgaagcgagtggatcacttgagtccaggagtttgagaccagcctagacaacatggcaaaaccttgtctctacaaaaaatacaaaaaaattagttgggcatggtggcatgcacctgtagtcccacctactcgggaggctgaggtgggaagatcacctgagcccatagcccaggaggtcgaagctgcagtgtgccctgccggctggcaccactgccactccagcctgggtgacagagccagaccctgtctccaaaaaataaaatgattacttttgtaacttgtaggattcttttttcctctggctgtgtagcagtatttcttttctccaaattttataagttgattttttaaaaatgtcttaatggctatataattagttcaacatatactaaaacttacagtagaaaaactctacttcaaaggaaatgatttctcaaagtaatattagcatgtgcctgctgaggctagtaataaagtgggtttgaaacaggaagttgtttagtactttccagatgccgtgctagagattcactgtgattctctcttctaggctgcccggtctcagggggtagattgcctcgtggctccctatgaagctgatgcgcagttggcctatcttaacaaagcgggaattgtgcaagccataattacagaggactcggatctcctagcttttggctgtaaaaaggtactcacctctgactactatatattacttttctatgtagatagtagtgtaaatcaaggagctgaaatttttcctgtccaggaaattatgataatttataatatttataaaatttataatatttataaaatattacaaggtaaattattgtatttaatagatatttgcaactgacatctatttttataatgttaataattatttaaaatgaaaagaagggttttgctgcttgatgtttgtgtaatgtggatactttttcaaagtaagcccttaaggttggaggggtttgttattgttttatgcagattctttagtagaatgtggacgtaccagttttattttttaataatgacaacatatgctttatatttcttgattaggttaggtatactaacttatgtactaaagggttgccatgcagttatttagaattatgtataaaactatttcatggaaaactttatttaggggagaattaagatacaaaactacaggatgttctcatttttgttaatgcctatatttatgactagaagggtctctatcaaaaggttaatactaggttacagtgataaatgagggaatagggatgacttgttttcttcctgaatttctatattttccaaattttctacaataaacatgaattgcttcaataataaggaaaaagattacttaaaaggtacaagtgacagagaaagagaaaatgtttttcgtatgcattactgtttgattatcatgacaaccctgtaacacaagtaggaaataaagagatgcaaaaagagcttgctttataccagaattgtgacagttgagtcctagctgtatagccttgtctagtcatatcctatgcttcagcatactttatttgtaaacttagtaatcatcagcctgtctatctatgtctcctgtctttcagtgttatggtgaagaacaagaaagatttcttaaaattattgcagtggattagataatgacaaaagtggcccttctaggtattaacaatttcccttccttttgaaggtaattttaaagatggaccagtttggaaatggacttgaaattgatcaagctcggctaggaatgtgcagacagcttggggatgtattcacggaagagaagtttcgttacatgtgtattctttcaggttgtgactacctgtcatcactgcgtgggattggattagcaaaggcatgcaaagtcctaagactagccaataatccagatatagtaaaggtaagagtgatttgctaagtgtcatattcaatttctgaagcatttccttaataaaataataaatcataatatggatttaaatattctgttatgcgaataacctatattatattattaaaaggagcaaatgactgaggcactagaactttgccttagcaactaacatatattgggaaaatcatgttttctgcaattggcaaaaaagtagtgatttttaaaacaaagactagtataaagaggctcaaggagaaaatattctagggtaaaattaaactcggagtcttttgacttctgtgctataactctatagtagtggttctcaaactgtttggtcgcaggatccctttacactcctcaagctcctttatggtaatattttttgtttatgtaggcgatagctattgatatttactgaattaaaaattaaaacaaaaatttaaatgtttatcaattcacttaaactttataataaactcattacatgttagcataaatagcatgcttttatgaaaaataatcattttttaaaacaaaaattatgagagagaggaatcatacatttatgcaaatctctttaatgtggcctaatagaagacagctgtgttcgtatacaagttgaacatccctaatccaaaaatctgaaatgttcaaaaatccaaaactttttgagtcccggcaggcaagtgaaaaattccacacctgatctcatgtgaagagtacacaaaataattaaaaatactgtataaaattaccttcagtctatgtgtgtaaggcttatatgaaacataaattgagttttttttcttcttcaccctcttgctgtcagtgtgtggaaacgtaaatggattttatgtttagacttgggccccatccctaagttatctcataacgtgtatatgcaaatattccaaaatctgaaaaaattcaaaatctgaaacacttctggtgccaagcattttggataatgtgtacccaacctgtatctgctgccttattaagcctcatttgataccatgtatcatatatcatctggaaaattctgagactctggacattgctactttgtagtttgtcttaaaaaataaacatcaaagaagctcattttcccccttggatattctctaaacccttaacagtttgcagagcagaaatttcatttttctatttccaggagtataaggcctgagtcctcaggactaagagtgatgtcatgtaatggaaagatctctaggttggaagatagtgtcccaggtgggaataggaccacgtgccttaactagcctgtgactccaggatccgtttggttctctgggccttccctttttcatctatgaatttactatgcaatgtttaggatcctttccagctttaagcatccatgactctcacagaaatcagaatgtcaacttggtttaaaaatatgatctagaaatatttgcatttttttaattctcagattttggatgttctttttttttcctttcttgataaaaaggactttgaagatgaatggataatgtatctcaaagttacacctagaagcacaaacttgatgtactatataactgtatttttttatccttcaaattagtaatagaaaaaccaaagaaaatactagttatgagacttagaattttaagtgatgtaacatggttgtgttagctggtagaattttttaatgtagatgaaagcagttaatgtttcaatccctctttatgaatgtaaatcaatcagccttgaggataatatgttccctgttctttagttgcagataaaatatttttgcatgcattgttaggttatcaagaaaattggacattatctcaagatgaatatcacggtaccagaggattacatcaacgggtttattcgggccaacaataccttcctctatcagctagtttttgatcccatcaaaaggaaacttattcctctgaacgcctatgaagatgatgttgatcctgaaacactaagctacgctgggcagtatcctttctgaaacagaatggtagaatttgtgcatttttcttcaatatttttatggtgatttttttgtgaggcatttagtaaaaagcttgcacattattttttgctctcttttttatagtgaaatctgtatattgttcatttaaattaccatgctagtgaaaattgagaacaactttttgtttataaacccgaggctcatccactatgcatcctgattacttagattgactgacagtagcatgcacagggtccgtcacttacggtacacattccaaaggtggctcttgagaggacctcctcgtggcaagcaagctcgacttatcaggaagagcattctgggcatttgagtgcatcaggagaggatgcccttcccatagccactggccatgtacatgcaggctgatgcagagccctgagtcacttaggtggtggctaggactttcccctctgtttcccttaaaggcagggagtcagtgatggcctgggccctcgtcagaagacaccaactcctgcagagacagatagagactagcaaactgtgtctgctttcagtaatgctgatgtataaagtaaggagactccatttaagtcataaacctatggattttcgtgacaatagaaaacatttttccatcttagtataatatcatttggttggttgttaataaatacatttttccttaatcttgctaatctagatatgttgatgattccatagctcttcaaatagcacttggaaataaagatataaatacttttgaacagatcgatgactacaatccagacactgctatggtaacgttttgatgaccaccctatgaaaacacgttttagttatgtcccgagctgtgattaaaggcaaatcttcatacactaagcttcttttaagcgtttctatatccaggctctgtgcagaatgtacattaaaaacaacttgatcctagagaaattacatgtattagagcataggtatattggttaattttttaaaattaagaagtgactgttatttattatcaaacccttatccttgagcatttcatttgaatataccaagcatttgatgcctttttttctcatctcactccgttcggcttctgtggcatttggcatcattgaagacccaagcctaggaatgctacgggagttaaagctgttttttcactcatgcacaatttaacaaatatttaatgcacgcccctgctgtttctttaaacaatttgctgttttcttttatttttcttttttgagacagagtttcattcttgttgcccaggctggagtgcaatggtgcgatctcagctcaccacaacctccgcctcccaggttcgagcaattctcctgcctcagcctcctgggtagctaggattacaggcatgcaccaccacgcccggctaattttgtatttttagtagagacaggatttctgcatgttggccaggctggtctggaactcccaacctcgggtgatctgcccacctcggcctcccaaagcgctgggattacaggcgtgagccaccactcctagccgcgatttgctgttttcttctgcttcttcagtattgtatgtattccttaagatactgtctcccatcattgtctttctctttgtatttctgtttatcctctgttctcttttctgtttacatttcttccttaggtaagtccttagggctttaatcccatttacgtaaagaactcacatctccatctttactccagtctctcgcctgtgcaccaaccacagaattctcactgtctcttgcgtctctgatttcctgtagcctccaagtctatttataggcaaaactaaactcttcatgtttttaatcaacttttaatcacatttctcttttatttcctacttagcacttattactgtataacatgcttctattcttttctgattctttccaatagaatgtggtcttcataaaggcagaacttggtgatcctcactgctgtatgatatttactatgtttatatgttgagtgaatgagtgttagccacaggtctcttttgttctcacactggaaaacttggaaataaactttggcttccatttcgttgctacatcctcttgcctctttgagttgtccttctggttaacattttcttcttttcccaagcttccagtttaattcttgctcactaatttattcctttactaaacatttatcaagcactgaaacaatgtaattaggttagctagggttctggaatataaagaaaaataagaaatacaggaaaagtaagatccttgcctgtcaaatgcccattgcctaaataggaaggagaagggattctatagaaagaaatgcggtaagtgctacgctaaagaggtattccaggctctgtggaaataaaaagcatgtccctcactccacctaagagaatgcttcctaataataatggcaaacattttctgagcatttgctactttccaggtgctcttttaagcaccttagacatagtaagtcatttactcttcagaaagcctctgaagtcagcaccattctcattttacagatgaggaaacaattagaggacacttaagtaacttttccagctgaccattttcgtaaataggggagctgtgattccaagccaagttctctactgtctgctgaaagagaaactgatgtgtatcctcagtttgcaaggattagtagagtttttcaagatgggtgattccaggctaaaaaaaaaaaaaacaaaaaaagcgtatgtagaaaaaagtgatatattaagggaactcttagattgttcattatggatgggctaagaatatcttagtgtttaccatgtaaaggaaccagatcttgagaaaaaaagaagtgagcctggaaaagatgaccactaacaaactggtgatccattcagcatggaaaagtaaccattactgtaagctgaaataagccaagcctaccaagagagcacaaatctataacgaccctaaaaatgaactttatcagcttcagtgatgtaaaccttacactcaggttgctattcccctattttctaaccttgctccatgtaatacggtagccactagccatgtgtggctatttaaatttgttaaaattaaatacaattgctattttacttccttagttatagtagccagctttcaagtgcttagtggttagtggctaacatagtggacagcacagagcttttctatcagtgcaggaaattctgctgaattctttacttctactatcatatttttatatctagggactctttaattgtacttttttttgaagatttagatgtcatctcttatctttctcagaatatgataattttttgaacgttttcttccgctctctgtaactgctgtgtacctttttcctgtgttgatattttctccctcatggtggtaacttctggccagtcatatttgaaggggccccgaaaagctcatggggaacattgtgtgaatgagtggggcttatgatgttggacttcattcttggatgatgtggttggtaacacattggatttgatttgtgaattctccaatgttggaatgttctctgcacagttacatttttccaaaaagagatgtctgcttagggtatctaaactttggctgtctgtattttgaaagcaggatagggaaagtgagttggggcaggccaggaaagggtagcatggttccttgccattcaatatttagccttttgtttcatctctgttttcagacaaatgaatctatcttcagaaatgcctgctatgtctgttactctttgtgggtttcaaaagttcaattgttctggttctgaaggcaggtagatgtttgttgactgtatagtcaggttggagatggggacacagggtcaaataattctctctttcgttagtcattcccccaccaggggcttctgtaattccaagactttaattcttgagcctttctccaggtttctgtaggtggaattggcttctctttgatattctcttctgcagacaaagtcttttaatttcttccatctatgttctatcttcaccgtggtttagaagtcacagattatctcctaatttttttgcaggttaattttgtgtttcttattgttttgaggaatgattatggaaagaaggagactgaaaagtgctatctttacacagctgaactattgacagtatttatcatttctttctttctttttttttttttttaaatttgagacagggtctctttctctgtcctccaggctggagtgcagtggcaccatcagagctcctgggctcaagcgatcttcagtaactggcatcaagcctcttgagtagctggaactacaggcacatgccaccatgcctggctaattttgtgtgtgtggggggggggtctcactatgttgcccaggctagtcttgaactcctggcctgaagcagtcattctgccttggcctccaaaacttctgaggttacacatgtggagccaccacacctggccacagcattatatatatatatatatattttttgacttgaatatctctttttttttttttttgaacagaatctctctctcttgcccaggctggcacgcggtggcatgattttagctcactgcaacgtctgcctccgagtttcaagtggttctcctgcctcaggctcccaactagctggaattacatgcatgtgccaccacgcccggctgatttttgtattttagtagagatggggtttcatcatattggtcaggctggtctcaaactcctgacctcaggtgatccacctgcctcagcctcccaaagtgctgggattacaggtgtgagccaccatgcctggcctataatttcattaagaatgattcttaagcttttcctttgtctcagaaactcaaaaatagttgacagtgttgagtatgtcccattaccaattgtaatgttatggaatgctaagatggccatccttcatcagctcaaattcctgtcagaattttgtccttctcatagagaaatttctataggaaccataattgtacaccaaatgagttatttttatttatctaaaatttatttagtctggttttctacttgtctatttctctttcttatttagtaaaaccatcagtgggatctaatgccatgagccatactgataaagctatctttttatattcgttccctcaattaaattaccttccttattaattctcaaagggtattctgaataatgtcaccggttttatttatttttatttttgtcctttctttaagtgaaaggctttgattagattctgagttcatgtgggatttttgtcaggtgggattgtaatgattttttttgtgtctttgctaattttttccctttggctgtccttctctgttagaatatcattgacatcctcttagcagatcattgtcttccaaaatttgtagtaattgtgaataacttatattagcattaaaagtgattgctttccttttttgtttgtttgtttttgagacggagtctccctcggctcactgcaacctctgcctcctgggttcaagtgattctcctgcctcaacctcccaagtagctgggattacaggcacacgccaccacacctggctaatttttgtacttttagtagtggcagggtttcaccatgttggcaaggctggtctcgagctcctgacctcaagtgatccgcctgcctcagcctcccaaattgctgggattataggcgtgagccaccgtgcctggctgctttccatttaaaagacaccgttttcctgaccacatttcttcagttgtggtcttatttcttgcaccatttgtattacgaagatttttatttatttatttatttatttacttttaatcttttttttctacagctgctagcaactcttgattttttttttttttttttttagaaatgagctaacaaagttgcttgactctcatcagaagaaaaacaggcctaggaatataagacacatttaatggaaaagtataggaccagcaaagtaggaaatgttattcaaggacagctgtttcatcaacagctattgtttttaagggtaacttaagatgtttatttataatttatgttgatacagaaggaaataaattgattattttctttctgcaaataatctttttccttttccttttctagcctgcccattcaagaagtcatagttgggatgacaaaacatgtcaaaagtcagctaatgttagcagcatttggcataggaattactctcccagaccagagtcgggtactgtttcagatgccccacaattgaaggaaaatccaagtactgtgggagtggaacgagtgattagtactaaagggttaaatctcccaaggaaatcatccattgtgaaaagaccaagaagtggtacgtatttcagttttgcaaaatgctggtgaatattggtcatatttaaagaaatcattgcccaacgcaaagtcgcgaagattttctcctgttttctcctagaagttttatagttgtattagtccattttcaccctgctgataaacacatacctgagactgggcaatttacaaaagaaagaggtttaatggacgcacagttccatgtagctggggaggcctcacaattatggtggaaggtgaaaggcacttctcacatggtagcaaacgagaagaatgagagccaagtgaaagggttttcccttataaaaccatcagatctcatgagacttattcactactataagaacagtatgggggaaacggccaccatgattcagttatctcccaccaggtccctcccacaacacataggaattatgggagatacaattcaagatgagatttgggtggggacacagccaaacattatcattagttttagctcttacattttacagttttagcctgtgagccattttgagttagtttttttaatacgatgtgatgtaaggattatggcttttttttttaatcttgtatatatggctgtccaattgttccagcaccctttgttaaaaagttttcctttccccatttaattgccttggcacagctgtttaaaatcagctgaccacatatatgtggatctttttctgaactctgttattctataccattgctctccttacttatctttacatcagacacattcttgattactgtggctttatagaaaatcttgaagcggggcagtgtaagtctcaagttagttttcttttgaaaagttgttttggctattctgtgtttttcacgtttccatgtacattttagaatttagctttttaatttctaaaaaaaaaaaggtcaggcatggtggtttgcacctacaactgcaacgttttgggaggccaaggcaggtggattgcttgagcctaggagttcaagaccaggcttggcaacacactgagaccctgtctccacaaaaaaaatttttaaggccgggtgcggtggctcacacctataatcccagcactttgggaggccgaggcaggcagatcacttgaggtcaggtgctccagaccagcctggccaacatggcaaaaccccatctctattaaaaatacaaaaaattagccaggcatggtggcacacatttgtaatcccagctacttgtgaggctgagacaggggaatcacttgaacctggaaggcagaggttgcagtgagcggagatcacgcagtgcactccagcctgggcgccagagaaagaatccatctcaaaaaaaaaaaaaaaaaaaaaaaattaagaaagctgtcagctggttattctccaaagctgcagcttctctgctcaaagggtcttactagttcagaatacattatcgtaaaacaaaaaataaatacaaaagaaattttttaaacattagtcaaatgtggtgacgtgtgtctgtagtcccatctattcaggaggctgaggtgggaggatcgctcgagcctcagagttggaggctgcagtgagccatggccacatcactgcgccccagcctgagtgacagaacaataccctgtctcaaataaaaagtaaaaagtctattgagagttagttaaatccatacatcaatttggagaaagtggacattttaacaatactgagttttctgattcattcatttaagtctttaatgctttgtagctttcattgtacagatcttaacatatctgttgtcaaattatctttatatttcgatttttgatgctgctgtaaatagtattttcagttttgttttctagttgttcattgatggtatatagaaataccattgatttttgtacattaatcatatatttgcaaccttgctcacgtcacgtattagttctagtatctcttttgtggactatgtaggattttctatataaatgactgtgtcacctatgaataaagacaatcttgcttctccttttccagtttaaataccttttatttctttttcttagtataagaatctaagcttgttttcttttgaactgcctgatttcaagattatactgcctgacttcaagatttcctatgagccacagtgtgtgatgtaacagtgtatctgatgtaaagataggtaaggagagcaatggtgcagaataatagagttcagaaaaagatccacatatatgtggtcagctgattttgaacagatgtgccaagacaattaaatggggaaggaaactagaatctgtagtacaatattgaacagaagtgctgagaggaatatactaggtattggggaaacgtgggaattttttcaccatagaggatgtttaaaatgaaaagaatgattataattgcttccttctctcttaacttccttccctcagacatctacatcggtgaatgaaatagcaacaataaaaataaaacaaagacttgcaaattttagttcatgcttttatttttcaaatttaagcatagattatacatattcggccgaaatatcctgattccttatgaacctaaatgattttcatgataattatctctgaacctttgtttcttcatatgaaataaaaggtttttgtgtatgttatataagataatatatacttgttatataagaagtacagtgtacattcatcttccttccttccttccctccctccctccttccttccttccttccctccctccctccttccttccttccttccttccctccctccctccctccttccttccttccttttttgagactgtgtcactgtgtcacccaggctggagggcagtggcgtgttcttggctcactgcagcctccatctcctgggtttgaggaattctctgcctcagcctcccgagtagctgggatacaggcgtccactaccacacctggctaatttttgtatttttagtagagacggggtttcaccatgttggccaggctggtcttgaactcctgacctcgtgatccacccgtctgggcctcccaaagtgctgggaatacaggtgtgagccactgcgcctggcctgtacatgttctttcattttcttctgctacaatcaagacacgctgtccattttatgtagctagctcactgtcagcaagtttgcgagttctttatgtcagactaagtctacttttctataactacaacttatcaataggttttgtcccctttctatacacacaaacacaaaaacaaaacaaaagaactagagtaagtttaattcctatttcatgtaccagcccttcagatgatttaaagatagccattgtgacactcctaaatttctcttccaggctattatgttccttggccattcaggttgtgctctggatgtaatataggtttttaagaattgtctagttgttacagtgagtatgattattgaaatgtgatctgcttaccacagaagaaatatttagaattgtggcactgtttcagtcctgtgcttttattattgcaaactaagattgcattcacattcttgcaatctggcattttgctggaatttgctgagttgataattgatatttgccagttgctgttaagccaggtatagttacattttaaacttaaatgtgggttaactcattcctcttacaataatcttaattcattttagttcattgttctgcctgttaatttttttgttcgaatctttgtattttctaataaatgcatattatgtatgtcatctggaaattgatgagtcttaaagttttggttacagtacgtttgcttatataatgtttaactgaatcagagcaagtacagaaatctggagtatatgagacagacttccttttgactaacagttgccagtagtagtcttttaggcctgcgcaattgctgcaaatccccataactaatatacagtagatatggctttgcattgttggctaggatgatatgagagacactcaaatgtcttgccaaattctagatatgcttaatttatggagtccccaaataactatgctaataaccttattgagaaaaaaaaaatgaggttaatctggtgtggcttctgaaagccttgttggggaccctggaacacttgtttttcttcttctgcaaggactcacaattccctgcataataaacagatttaacttttgctggggatcaacatctaatttgctgatacagctttttaaaaatctgtgccttttaaaaatttgagacatctcgtttctggtattttggtaaccccaacctatcttaccaacttcacaaagattatagtagtgtgcacttacacctctgtggagaaggagctgttcagactcagaattagtcaaagtaattcaaagaaccttagtgctgtctctatgtacttacctgtctcagattttaaacttttgttattatttagtcttatgatttattttaataccacagaatacatttgacacacagcaatcttcttgggcctcatagtgaagtaataacgatcagagctacagcacaaattacttacgactatatgacattcacaatatacatcaaaacccagaacacataaaccatgtgtatcaatagctgctggttttattggaacattttaacgattgatcattaaccatatatttacatataaattttcctggagatttttttatattcaaaattagacccttagtataatgaatacatcgccacacaggattgattgtgctctgaaattttgatttgggtaattttaacatgaaattgtataaacaactgatattaaatcttaaactaatgtgtgaaattataaaatagacctaagggagtttttttgaatcatccttatccttatgttttcttttctgaggcatagttttttttttttttttttaaagtccttatttttaggacaatgggatataaactgaagttaaggccaaatctctaagtacaggtgaaacaaagatttacagataattttgtttttatttagcagagctgtcagaagatgacctgttgagtcagtattctctttcatttacgaagaagaccaagaaaaatagctctgaaggcaataaatcattgagcttttctgaagtgtttgtgcctgacctggtaaatggacctactaacaaaaagagtgtaagcactccacctaggacgagaaataaatttgcaacatttttacaaaggaaaaatgaagaaagtggtgcagttgtggttccagggaccagaagcaggtatagttatgtctccagaatgttgattgtctgttgtattatgtactctgttggtatttattttgtctttttttagaattaatttatttattatactttaagttctggggtacatgtgcagaacgtgcagttttgttacatgggtatacatgtgccatggtgatttgctgcacccatcaacccgtcacctccattaggtatttctcctaatgttatccctcccctagccccctaccctgccacaggccggggtgtgtgatgttcccctccttgtgtccatgtactctcattgttcaactcccatttatgagcgagaacatgtggtgtttggttttctgttcgtgtattagtttgctgagaatgatggtttccagcctcatccatgtccctgcaaaggacatgaactcatcgttttttatgactgcatagtattacatggtgtatatgtgccacattttctatacccagcctatcattgatgggcatttgggttggttccaagtctttgctattgtgaatagtgctgcaataaacatacgtatgcatgtgtctttatagtagaatgatttataatcctttgggtatatacccagtaatgggattgctgggtcaaatggtatttctggttctagatccttgaggagtcgccacactgtcttccacaatggttgaattaattcacactcccaccaacagtgtaaaagcattcctatttctccacatcctctccagcatctgttgtttcctgactttttaatgattgccattctaactgacgtgagatggtaactcattgtgggtttttttttttatactttaagttctagggtacatgtgtacaacgtgcaggtttgtcacatatgtatacatgtgccatgttggtgtgctgcacccattaactcatcatttaacattaggtatatctcctaatgctatccctcctccctccccccaattgtggttttgatttgcatttctctaatggccagtgatgatgagccttgaataaacattgagtctagagggaagcaggtgtagaacctgccttaatctgattactgtcttatcatgtattgtcttagttctgacataaacccctttaacttctagtactttcgtaatctctccgtacagaatcagaataaaagaggattgtagcccctattattaattttgctttacagaaattgtttttttggggagttcccttccccctcttttttttctacttttttgttttctttgagggcttcatacaattttgcaaagtattttcagaaatatattctaatgtagatgactgtggagctgtaatattaattgagaacctgatgccatgctaggtgctatagttcaaaaatgagaaagacagtttttgtttttcagaagcttgtagtccagttggaaaaataaatacataaaaatctttccatacagtatggtgagtacagagataaaggcatgaatacggtgttttgagggcgttcaaggggcatctaatgctggggcaatggttggaaagggtaagaaggaagggatgagtgttgggtgtccctgcctaggtttaaatgacaggtgaagcaggcaaagaccggcaccaagtaccttcccagtacagtcagacagcttgaggaaaggtgtaaagatggggggcagcatggggctcaggacaactccttgctgtctgtcagtgctgtgatgacctctgtcagaattcaagctggggaaagatgggtggtgaggggagcagaaataggcaggagaccattcactgaaggcttgtatgccaacgtgggaacttttagtcttctttagaggcgatagaaacattgagagggtcgccgggcacgatggctcatgcctataatcccagcactttgggaggccaagtgggtggatcacctgaggtcaggagtttgagactagcctggatgaaatggggaaaccccgtccttcctaaaagtacaaaacctagctggacatggtggtgtgcacctgtagtcccagctacttgggaggctgagacacgagaattgcttgaacccgggaggaggttgcagtgaaccatcatgccactgcagtccagccagggtgagacagtgcaagactccgcctccaggaaaaatagaaaagaaaagaaactttgagagggttttaatcaggggaggtggtgtatgatttgatctctgttttagatcaaccattctgagcgccctgtgaagagtgggctgaagagggccacagatggggcacaaggaccagttgggctgttgccatagtccctgggagcaatcatgagattgtgaagagtcagtttaatttgtggattaggaatttagaacctggagtcaggcttcctggaatcttgttgtgttcattgtgagatgtgtgacttgacaagttaacttctggatacttcagttctctccttttaaaaattgggactaacaattataacagccttagggccgatgaaaggattaaatgagttactatcagtaatgcacctaaagcagtgccttatagatagatgataaacatacagtaagtaactcgtattatgttgactttagatggtggtgccacaacatgaaaaaggaaatgtaagtgtcagaagtgatctaggcatgatagagtaacactaagagagaaaagttaccagctcctgtattccactagaagacttcgaatgaatagtctttgtttttcaagttttttatttttttatttttatttttacttgagacagaattccactcttgttgcccaggctggagtacagtggcgccatctcggctcactgccacctccgcctcccgggttcaagtgattctcctgcctcagcctcccgagtagctgggactacaggcacccgccaccatgcccagctaatttttatgtttttagaagaaatggggtttcaccattttggccaggctggtgtcgaactcctgacctcaagtggtccatacaccttgtcctcccaaagtgctgggattacaggcgtgagtcaccacactctgccctgtttttcaagtttaataaatcaggcagcagtcagctttgtctaaccatgatgatgggagaagagcatgaaagaatgaaccactggtagtttcttagtctcacctcgggtgatgtttcaaacccttctcccatggagtcttctcaaggaaacagttgcaatacaatatgattaaatgatagttttgattcgtcttttgctagtcacccttgttaaaggtgcttgttaacagtggaatgatgaaaaattggccacaaaactggaacagtgttctagataatatacactgattgggccggccgtggtggttcatgcctttaatcccagcactttgggaggccaaggcggtcggatcatgaggtcaggagatcgagaccatcctggctaacatggtgaaaccccatctctactaaaagtacaaaaaattagccgggcgtggtggcgggcgctagtagtcccagctgtttgggaggctgaggcaggagaatcgcttgaacccgggaggcggaggttgcagtgagccaagatcacgccactgcactccagcctgggtgacaaagcgagacttcgtctcaaaaaaagaaaaaaatacactgattaaaaagttctagaaagttgacttctctcacttggaacagtttttctagcttggttttgtttttccgctggggtgagagtagagtgtccctgtgctgctgcttcatgttgagctcttctttggagacaacaaatgagaatgtttgtgtgtctctacagggctcgcctatttagtcattatagaagcttaaggaagtcttcaagtttgagactgtacatcgctgctttatgtagtttagatgtttcactagtaacttgttcagagggtgcattaagagatacctagagaaataatttgttttctctgtcagctttctgtgagaaataattatcaggagtaagtcagtctttgatgtgtcattttatggcttacattatacagcaacatctgataatgactagacagggtataggctcacacctataatctcagcactctgggaggccgaggagggtggatcacctgaggtcaggagtttgagaccagcctggccaacatagtgaaaccccgtctctactaagtattcaaaaattagctgggcgtagtggcagatgcctgtaatcccagcttctcggggggccgagggaggagaatagcttgaacccaggaggaggaggttgcagagagttgagatcgcacccctgcactccagcctgggtgacagagcgagactccatctcaaaaaaaatttctttttaaattaactggatattattaaattagttttcaaagttaattttcaaggtaattttacatgtttttctatttctcacaacaatattatgagatacataggattgctgctatcttctctatttgaggttaagagattgaggctctgagaggttaagcattctcaaagttgtacagttagtactggtgataggaagattcctagtcacagttgatataatggattggaagcggcatacaatccaataggcctggatttgaattctcactctgtcatctttttagttgagtcgtctttcacacactgttcacctccctgagcctatttgtttataaaaaatggatgattatatacataaggctgttgtgaaggtaaatagaaactgcgtgtcaagcacctgccataatgcctagtcattaatatatgtgcaagcattcattaccactcctctccttttaattgaatgcaactaaaaggagatactaaacatgtaaaacgttgtcaccaatttgcctgcattttggaagcctgttttaagtcttaattatttttattatgtaggtagttatcacagaaacgtgccagttttatctttcgagatctggaaatacaagtcaattaagtaacagtatgggccagttgggaggaagtagccatgaactgggaagggttctgagttttacttctgtttgttgctagccaagtaattttataaccctgggcattgtcactatctcttctcttgcctgtgaaatgatatgtaggagaatacttgggcatcataggaattgccgttgatttaaaaatgaatttgccgtcctatctaggagctcatgttttctgcttactgaaaagcctagtaagagcttttcttccacgtactgcttcctgccccctccccatacaactaatctagggatttggtgaaaggatagaaaggatttttactctctagcatttagtaaatattctgttcattatcttggatttgaactaatgcctattaaggaggtaaattctctttaagttttttatttatctgatcatgtataataggatatttgttaaacctaaaaactctctttgcctcctcaataatgatactgatctttcattttcattggaatttttttttaaagctgctatactgaataagtaatacctctttagtaatatggaatttatgattgatttgaaagaaagtcttaacctgtatatttaaaagagtatagaagtttatagggtatataacaagctggtagattagtatactactgcaagttcctagatgatataatgctaggaacaaagctaagatgaagggtaaatagctaatttctttaattttgcttcctacaaaatatgagagaatagttgtcaattgtccttttggttgcatatttctatatcttttcatgcgtttgaccatgttttagccccatcctaggtactgtggaagatacaaagacatgggaagtacctgccctcacagagtttatcttctatttgagagtttaaaagtttagggaaagaacacctatatgatgattaggtataaataaagtacagaagttccaaatacatgtgtatatagaagactgcttttagaaagtcctctctaggccgggcgctgtggctcacgcctgtaatcccaacactttgtgaggccaaggcgggcggatcacctgagatcaggagtttgagaccagcctgaccaacatggagaaaccccgtctctactaaaaatacaaaattagccagcatggtggcgcatgcctgtaatcccacctactcaggaggctgaggcaggagaattgcttgaacccggggggcggaggttgcagtgagccaagatcccgccactgcactccagcctggtgacagagagagactctgtctcaaaaaaaaaaaaaagaaggaaaatcctgtctaaaaattcatcgtataaatagaattctaaatgtgtgaatgttggcataatcaaaatttgaattttgactaaaatttaagattttttatgcctttatgaaattatatatttatgagacttttttcaaaaagaaactgattattccattttgaatcttgacaccccttgagaaaactctaaaatactcatacttacttattgtttctattgctttttttattaggtttttttgcagttcagattctactgactgtgtatcaaacaaagtgagcatccagcctctggatgaaactgctgtcacagataaagagaacaatctgcatgaatcagagtatggagaccaagaaggcaagagactggttgacacagatgtagcacgtaattcaagtgatgacattccgaataatcatattccaggtgatcatattccagacaaggcaacagtgtttacagatgaagagtcctactcttttgagagcagcaaatttacaaggaccatttcaccacccactttgggaacactaagaagttgttttagttggtctggaggtcttggagatttttcaagaacgccgagcccctctccaagcacagcattgcagcagttccgaagaaagagcgattcccccacctctttgcctgagaataatatgtctgatgtgtcgcagttaaagagcgaggagtccagtgacgatgagtctcatcccttacgagaagaggcatgttcttcacagtcccaggaaagtggagaattctcactgcagagttcaaatgcatcaaagctttctcagtgctctagtaaggactctgattcagaggtaagtcaaatcctgaaggctttgttttcaaatttatatgtaagaaaaaatagattgttgctcaaactgaggaaatttttcctacatgtgaatgacgagctatattattttttcattctaaactctactgtgcagaaagttcacattttattcatttgaaggacttctctgtatctttcacattttaaactgcaatacatttaaattaactctgtatatttcctgaatcactgtatgttcgattggtgagtatctcaaggggtgccacagttaaaaccgaggcagagtgataatctgtgaaatgaaaaattattatcaatttactgtttaaatccttaatatgctcttgaattcagataacatttaagaccttgtaaggggccaggtgcgatggctcatgcctgtaatcccagcactttgggaggccgaggcgagcggatcacttgaggtcaggagtttgagaccagcctggccagcatggtgaaaccctgtctctcctaaaaatacaaaaatcttaggcaggcatggtggtgggcacctgtgatcccagctattcgggaggctgaggcagggtaattatttgaacctgggaggcggaggttgcagtgagccgagattgagccactgtactccagcctgggggacagagcaagactgtctcaaaaaaaaaaaaagaaaaaaaaagagaccttataaggaaataaccctgttaatgcaatggtattcatcttaagttttagtacttcagaaatatattttcatttactcttcttattccttctaaatttctccttatgacaaaacaaaacagtaacacaggtgtgcatactggtctagaagactgtctgtttctcttcctatgaacgtctttatctcgtctttttcatttctgcttcatactgcatcttctcttactgccacttgggtaccacggcagtggctatcttgaacatctttcataaaaacatcactgtcaatttgtgaggatattaagtctgctgagctcctttggggttatcttttttatatttccagcatgcatcttactatttcatttactttggaagcgtttagccatgttttcctgagaagccttatcagttcacactgtaggctggtagaactccacattttgtcttctgggctaacctttttttatgtactaatggttatagaaatgtgaatcctcctcccctagccatgccccactgaaaataaacgaactgaacaaaactaggaataattcattaagtcctctctcttgctgccagatgtagtaaactcctactagaatagttaattctcaaagaatctgatgctgacagttgacatgaaaatcatataatctttctttgatggagaaaatgtttcagaaagctgtgaaacattggggcatcattttgaatatcagtttttatcctatagttcagaagaaaatgcttcaatatttgagccttctgtcggtagttcactgtgaaaaacaacaaccatagattctgtgttgagttcattgaccatatttgaggttgaagtcttcttaggaccttccttgtgatcttcaggaagtgatttagcccagagtcaccaata

SEQ ID NO: 50 - DNA, 19669 bp, Homo sapiens
  source 1..19669: mol_type = other DNA
ggaggggcgcgctggggagcttcggcgcatgcgcgctgaggcctgcctgaccgaccttcagcagggctgtggctaccatgttctctcgcgcgggtgtcgctgggctgtcggcctggaccttgcagccgcaatggtatggcagcttgcgggaagatcggcaggaccgcaagggatggaagagcttgggcacggggcagggaggaggagatgggcgcgggggcagatgtggggtcgcagggcctagctgggcccctggcccgtcggaggcgccgggtagcgggggctgcaggaagcggctctgaggtcgggcaaggtgtgcgcagggccgggctccggcggagcaaggtcccgcccggttccctgaggtcggagggccacctgggacctcgggactgcggcctgagtccaaattgacgtctgggcggtcttgagttccctcagctaatcagcacttcctgagcttccacttccactgcaagccaggcccccagtctcagggcctgcaaggtgacgggagcctgagcaatagcccaggggaaggttaagtcgtgctttttgtccttgacgccctttgaaaccctgtagtgctggacagagtgaccctttaagattcgatcgagtcagagagcgcggccgtcgagcacctcccgtgttgcagacgctttgctgggtgctgcaacagcaaaggcgaacatcctagatgcctctgagggtggttttggtgcagaagggaccgtacagatctgtctgagggcggggaagggaaggacacctagcactaccttgaaaccacttgctgaaaccgtaaccctgcaaggtcatgaaattgcccccaggtcctgggggaggagttcggtgggcttttaagtggcatttgttaactgacatgcaactaaagggtgccacgagcctcgagaattttaaacattagttccgggtagggggacctgggctgggggaagtgcatattagaaggcccgggaatgggcaggtaaaagttggtttgtgggtggtgctgttcagttttgaagcttgacggaatctggaagaattccagacacgctgctaaggggattctaggctgtgtcgtagcaattccctgctcttaacagtgtggaggatttctaaggcgctacagtgctaaactagattttcgtatcctaatttatatgaagggaccataaagcattagttgaaataaataggtttttcattaagcaaataactgatagtaatatacgagattttcagaatgatatctgatgtgaattagccacataaaatttttggtggcttggccttggaagtcagatttttttttctctaatatggaaaaagaacattcatgggaattaaaaggtcactgtagttgaattctcagttgtatagattgtcccacttgttaaccactcagcagacattagctgagtgcttccactccacccggtggtacttggaaagtgcccaaatgtgatggtgagcaaatagataaggtctcagtcagtttcctgggacagtgcctggcatgcagtggtgctctgcgaacatcagctctcctggccttaccttcttgccacgcattaatgttatctgtcagtatttttacaaccttagtttctaagttgatctttaaaaaagtggaaatagtttctgaaacaaagacaatattttacaaaaaattttagaaatatctttttttaaagcacctgtaagataatttgaagctcttttagtgaaggattgttttaaataagagctctcagttcaagacaactactgttaggagcttaaatcggaaccacaatcagcatataaaggtcctaatcctgaccttaatccctttggaatattggttttataaatcatcaatcaacagtgttccactatgaaagcatattctgtcttcttcttttcatgtattccttcactgctggtgcttaatgtctttccttcctcttctgccatttctctttccatgaattataattgccttttgaattcagaaattaaaaccactccacagaattaatttggaaggggaagaaaagacctttgtcttaacgaaccatgaagaggcatatttccatgcttctgtcttgattactggaagttttttaaagtacaatttgttattttagtttttgttttcagagaggctaccatgctaacataaaaacattaggcttacttaaattcacagtggttattttaatagttgttagggtatcggcaaaatactctaacgttttgaaaattaaaccttttttttaaagcagcatataagaaaatggaaattaaaaatttgagagaaagaatcccggattttactgtcttcaaatttgggaaaaacatttctatttcttagagttcagtagtctctaaaatggaactgttttttaataacgtgtcagtagtcataaactacagataccgataaggagatggcatttcaggagagaaaagacaaattgtcatctgagaccatgagggcagatatttactaataaatgtaaaaaatgtgaggcagcagagtgtagtactgtatgaagagagagactctgtagccagccctgaagggctgcattcagacggcagggattgaattctgattgccacttagcagctctgtgaccttgggcaggttactcagtgtctgtcccaccagttcctcatctgtcaaatatatgcaataaaagtgcacaattcagtgggttagtgtgaggattagagtatttgcaaagcatgtaggacaatgggggaaatgctgatagggatccaaatgctgtatatcagtagagaaatgaagagtttttaagtacagtttctacatcaaatgtaatgtaagaagattgcttggacttgcgaaaagaggaaaagaagatgcagtcgggctaggcgcagtggctcacgtctgtaatcccagcattttgagaggccgaggcgggcggatcacaaggtcaggagatcaagaccatactggccaacatggtgaaaccctgtctgtactaaaaatacaaaaattacccagacgtggtggtacgcacctgtagtcccagctactcgggaggctgaggcaggagaattgcttgaacccgggaggcggaggttgcagtgagctgagatcgtgccactgcatttcagcctggcgacacagtgagactccatctcaaaaacaaaaaaaaaaagatgatgcagtcatgggtgtgggttaggtaagtgtgaaggagtcagtttttgctggtggcaggtaatggacttttacacgcttaatatcagaattagagtcacttcataattttcgttgagaattagccaatattgcttgctttttaagtttttatgtatcttaatatactccttaaaaatctctcaaacaatagtttcttggaagggtgtcattcctgactccctcctccactgccttcgtcagctgttataacagcgctgtggaatcatggtagatagtggtaatccacggtccatttgattctccctccactgtgtttcttagtctcccgaggatctcaggacgtgcaatgattcagagctttatctcctcatttgcaaaacttttatatttaataaaggaagctatccctaaagagagttcaattagctcatcactgttcttactcaaattgtacctaacaattaaagtagtaacatagacgtcttcagaattaaatgaaagctaaacatgagagtgctttaaaacacatgaaattagggcaaatgcgtagcattatcacaaaagatgctacctcttcatacctctgacttggagtacttaaggaaaccaaaacattctgtgtttgtccaaatatggtattcaattcaaatttataccatatggtattctctgactagaaacttgtgtcagttgaagtgtctgcctaaaacaataatatccaagagtgacttgttataaccaataaattttgtgttcagggagaaaagtcattactacaccaaaaaaggaaggttgaccaaaaactggtattacttttcaagtgtgattatgaaaagctgttgtagtagaacagtcatggcaggtagtttgtgctctgaaataacagagcttgtcaggatttgccagcttttatcttttcctttagtagattcattcttaaaaccaaacctaatatttttcgtgctgtagtgggagaatcacctgagcccaggaagttgagactgcaggaagccatgatcacaccactgcactatagcctgggtgaggggagtgagaccctgtcttcaaaccgcaaaaaacaaagatccactctttttgttatacagttccacggatttggacaaatgcataatgacatgtatccaccattacaatatcatgccaaagagcttcactgccctaaaaatccctcctctactctccccaaaaccctgacaaccacttctctcaactattgctagatcctcggcttttctggcatgtcacatagccagaatcatacagtatttgctttttttcagatggccttctctcccttagcagtatgcacttaaggtttctccatgcctttttataacttaatagctcctttgtggttttggtgaataatagtccattgtatggatgtatcagagttagattatccattcatgtattgaaggacatctgggttgcttccaacttttggcatcatgaatgaagctgctttacatgctcttgtgtaggttttatgtggacataacatttcatctcagttgggtaagttaagactaggtttaggtttgtaaaaagctaccagaacatcttcccaagtggctgtgtactattttacattctgccagccatcaatgagagttccttttgctccacatcctcatcatcatttgctggtcagtttcttgggttttatccattcttgcaggtgtgtagtgatatcttactgttttaacttgcagttctctaatgacatgatactgagcatcatcttatgtgctttttgccatctggttggtttttgtttttgttttttgagacagagtcttgctctgtcatccaggtggaatgcaatggcacgatctctgctcaccacaacctccacctcctgggttcaagcgattcttctgcctcagcctcctgagtagctgggattacaggtgcccaccagcacgcctggctaattttttgtatttttagtagagacggggtttcaccatgttggtcaggctggtctcggaactcctgacctcgtgatccgcctgcctcggcctcccaaagtgctgggattataggcgtgagccaccgcacctggccctgccatctgttgatcttctttggtgaagtttccagatcttttgcccattttttttatttgggttgtttgttctcttattgcattttaagagttgtttgttttggatacaagtcctttatcagagatgagttttagaaatattttctcccagcctgtggattgacttttcattctcttcacagtatttttcacaggacagaagttctaaatttcaataaagcccaactcatttttttctgtcatggatcatgcttttggtgttgtgtttaaaaactcattgccaaacccaaggcacctggattgtctcctgtggtatcttgtagaagttttatggtttggcattttatatttaggcctgtgattcattttaagttaatttttattaaatttgtaaagtcattgtacagattaatatttttgcatattagtgtccagttgttccagtgccatttgtttgttgaaaagaatatccttttttccttgaattgcttttgcttttttattactgtaactttagaggaggtcttaacgtcaggtagtgtcagtcctgacaatattgtttgacttttctaggtctttggccttcctatataaccttgaaaatcagtttattgatatccacaaaatagatatcaactaaaatcaaacttgctgagattctaatggatttttaaaattgtaaaacacatggaacatgaagtttatcattttaaccatacaattgtgtgcgggcatttttaacttcatactccagtagttcagggctgctgcagaggaatgcaactagctttttatatacactaaccttatatcctgcaaccttgtcataaatgcttattggttctaggaggggctatttttattctttgggattttctacatagataatcatgtcatctatgaacaaaaacagttttattccttcccttcaaatttctatgcctcttattttcttgtcttactgcattagctaagacttccagtatgatactgaagaagagtgatgagtggggatttccttgtcttgttcgcaatcttatggggaaagctcctagcctctcccattaaatcagagattttgtgtgttgttttttttttttttagcaggttgaggaagttctctattcctagtttgctgagagactttttcatgactgggtgttagattttgttggatgctttttctgcacctattgattgtatgattttttctttaacctgttgacgtaatagattatattatttgattttttaatattgaaccagctttgcatacctggagtaaatcccacgtagtgatggtgtataattatttttaatacattgttggatttgatttgctaatacactgttgaggatttttgcctctaacctatgctcatgagagatattagtcactgtccaccaaggtcattcaattagagaaaccttagatcattcttactgctttcctttctactacgaatgtacatgtgaagaagttaaatgcttgcaaatctagtctcctattgctttgccagcatcttcatccaggttcttgaggtctctcctgaggctgtggcagcctacatccccatgtcttctgtgttcatcaaaactccaacctcattttacgcttgtcactgccatgtgagatactttgctgaaatactaaactgatttgtgggcttataaacattcatttccctattaacctacaaataagatttaaaccaatttgctttttttgatatttaaaaatattaattatttaaagtaacaaacccaactcatgtgtccagtttccccttctccatttctcactctttcctgatcatgaatgctcttaaaatgacattctgttcccgagaatcccctcctcacatctctactttgtgcacacatttcatcatgctcagttctcctgtgtagctttgcctgcaaacacaggcactttgtatggatttgaaggcagaaagatcatctaatattttttagcatgtcttcccccattaggccaggaattctctcatattcatctttcaccaacatttcatttaagcctaatcattttgacttctgcacattagcatttcaattttaaagacttgaaaaaaaatactaaatgttatgtaaatgtaattttttatgaaccttgtttacaaggtaacaatatgtcagagaccatgtcgtgtttaccagtgcctggaatttagagcatcttggtaaatgtttattgagctaaattgaaaaagttaagaatcagtttatataaactacttttacacgtgtagtcatgttcgactatatcattgactctgttactggaagaggttgctgtgaactaaggaaatttttagagtggctggccttgattcgaagtatagttgggcagcttaacaaggggaggggcttttctgtcatggaaacaagataagcaaagatatggaggtgggactagagcatgtgtgagtcaatagagcatgttgacttctgggaaggtggtggtacagacaggccaaataaaaggaggccttcaatacagggatttgcgccactactaagggatttaaatatatgtctattcatatacattctgagtcctgtatttgatagattgtttctttatggggtattctttaaataaatatatattaactgaaagtttttcttgtataatggaactatttttcaaaaaactgaaacatttttaaaacttttatcctcaggattcaagttcgaaatatggcaactttgaaagatagtaagtatgttgtttgtctcaatatgtgaattgagaaaaactaaattttgacaaatacaaatactttcaaaaatatactgctttagcccattgtgtatttgatcaaaactgaccaaatggatttccattgtatgtttgggacattggacttgttctgaaaagaccagtaagaaaggacacctgagacagctatgttctgttgtttgtagaatgatcatgatataactagaaaaaattataccagtgttggtgtaggtgggtgtatgtgtgggaaggggtaaatcatgttatatataaataatgttatggaatatgtggttaaggcaactttcaataccatttaatgttttaaatgtatattattgtcttatgttgccatttgcttgtcctaagtagtagctagttttgccttccttttattagtactatttctattttttttttttggagatggagcctcattctatcacccaggctggagtgcagtggcgccatctcggctcactgcaagctccgcctcccgggttcacgccgttctcctgcctcagcctcccgagtagctgggactacaggcgcccgccaccacgctcggctaattttttgtatttttagtggagacggggtttcaccgtgttagccaagatggtcttgatctcctgacctcgtgatccgcccacctcagcctcccaaagtgctgggattacaggcgtgagccaccgtgcccggctattagtactagttctaatattaagactggtttagcatcgtgctgtttattgtttatctaagcgctcattattctgccttgcacttcagaaaaatatgtcaataaattcacaaggaagttatactgtaattcctttgtcttaacacagtacttctatttttcagtcaccaggagactaaagtccatcaaaaacatccagaaaattaccaagtctatgaaaatggtagcggcagcaaaatatgcccgagctgagagagagctgaaaccagctcgaatatatggattgggatctttaggtaagggaagagtgtaattcacaaattaggaagaactgtttcacacaaggaagactactgatgacttacatttagagcttacagtgatgtcaagcctatctgagcacttgccatgtacttatttttcatctacatccacttgacacgtaatgataacaacccgtgtaggtagtacaggtagggactgttagaatccctgctttccagtgagaaaaactgaagcacacagaagttaagtaacttgcctaagatcacatataaaaggatgaagagcctctgtttggacctatgtggtttggtgtcgagtctgtgtatttgttagccattatacgtgaccatgttaacttttaaaatattctgaaatgttcccagttgttaagtataccatcagaagaacttggaaaccgtgcgttagatgtaagggcttaatttcatcctatgaccttgtagtgtggcattttaggactgcagcgggggcgggtgaggggcagtgcagtggagagctggccttgtggtcatggatatgactcatgatggtgttttgagaatccgaacgatgttgaagcaggaaaagcagctgagaacctccattttcaagatacttaatcaccattcttatcttttcaaaagcatgaagacatttttccttcagaaatttatgtaatccatccttaattagtcttcttaatggaaaagagatgagatatgacagtttaaaaagaatttatattgtgtttttagatgcttttatacttgtttgattatgaattcatcttggaaataaagttgtaaagagctggaaatgggaaagaagtttctattttaacttgtaattacattctttctcttaacttttttatgatcatgctgtcttatcctgagttgaggctatctaaaagaatttttaacttaaggaagatttatgcatatttgatagtaaagaagatcatgcagtgaaccccctatttatctaccaaatcctcagtatctcaactgacagctgtcctttgtttttttatgtgtgtgtgtgtgttttgttgttgttttttgtttgttttctttttgtgtttttttttgagatggagtctcattctgttgcccaggctagagtgcaatggtgcaatctcagctcactacaacctccccctcccaggctcaagcgattctcctgcctcagcctccccagtagctgggattaacaggcccccaccatcacacctggctaatttttgtattttttttttctgagtcggagtctagctctgtctcccgggatggagtgcagtggcataatctcagcttgctgcaagctctgcctcccgggttcacgccattctcctgcctcagcctcccaagtagctggggctacaggcgcccgccaccacgcctggctaatttttttgtattttttagtagagacggggtttcaccgtggtcttgatatcgtgaccttgtgatccgcccgccttggcctcccaaagtgctgggattacagacgtgagccaccgtgcccagccaatttttatatttttaatagagacgggatttcactacgttggccaggccggtctcaaactcctgacctcaggtgatccgcccacctcggcctcccaaagtgctgggattacaggcgtgagccactgtgcccggcctcagcttacagctgtcctaagaacacctgcttacactaggcagttgccagctaaatttaaatgcgtattttggaaataaccaactgctttgtaaattagagatttattgtatttagtgtattgcatataaaaaaattactgcttttgtttgtttttaagctctgtatgaaaaagctgatatcaaggggcctgaagacaagaagaaacacctccttattggtgtgtcctcagatcgaggactgtgtggtgctattcattcctccattgctaaacagatgaaaagcgaggttgctacactaacagcagctgggaaagaagttatgcttgttggaattggtgacaaaatcagaggcatactttataggtaatttaaatatatattgtttattttcataaagatgtaagcacgaataaatcttctctcaaaagttttgacaaactctcaaaaccttcatcaataacaaggtatattcttcagggccttttttggtatattcacaagggggtgtttgtttcctttttcttttttccaggatatattggaacatttctgttttccttcccctgttttctacctttgcttcttcatccggatcataagttgaatgccatgtgaatatcaaaagctatcagcattaagccaaatgaggcatctgaggagctgttacagcctggaaatgttagcaatagttcattaggattagaaggagaggaataaaggggaaaagaatataaaacagacctcatttttagttcttagttctttgcaggtgctgaaggaaaggaatgatgatagtgtgtggaacaactcaggaaatcaccaccacccataccccaaaagacctgatccatggtgacaatgttttctcctgcctgtcccctgtgctctttcagcagaaatcttattaaactagctatgtgagctcttgcttttcttataggactcattctgaccagtttctggtggcattcaaagaagtgggaagaaagccccccacttttggagatgcgtcagtcattgcccttgaattactaaattctggatatgaatttgatgaaggctccatcatctttaataaattcaggcaagacagatttagaaatcaaagcttttttatgttcatgcttttgttcatattttgaaataacagtttaaaaattattttgagatttacatttgtttttgtcaattctaggtctgtcatctcctataagacagaagaaaagcccatcttttcccttaataccgttgcaagtgctggtaagtagtttttctatgatacatattttttggcatatagaatggagagatttgtacactaaggcagacagtgtcaagatatctggtggtagctatagcaaatgatttggggctgtttcttttttagatggaatcttgctgcctcccaggctggagtgcagtggcaccatctcggctcactgcaagttccgcctcctgggttcacaccattctcctgcctcagcctccctagtacctgggactacaggcacccgccaccaagcctggctaattttttgtatttttagtagagacggggtttcaccatgttagccaggatggtctcaatctcctgacctcgtgatccacccgcctcggcctcccaaagtgctgggattacaggcatgagcccagccttttatttttttattttttattttttgagacggagtctcactgtgtcacccaggctgaagtgcaatggcatgatctcggctcactgcaaccttcgcctcccgggttcacgccgttctcctgcctcagcctcccaagtagctgggattacaggtgcacgccaccacgcctggctaatttttgtatttttagtagagacagcatttcaccgtgttcgccaggctggtcttgaactcctgccctcaagtgatccacctgccttggccttccaaagtgctgggattacaggcatgagccactgcacccggccgatctggggctgtttctgagaagtgccatctcttgacttccatgatacttaattcagtcattgtttgataactcctgctctattctgtcattaattgaaaagtcagtatctattgaggttcatcattagatttttttgtcctcaaggattgaagagcgtagctagaaactggctttgcaagttatgtttgggacctctaactacaataaaacagaagctctagaatagagagttgaacagtgttcacagctaatttacattgactgactcaattctcttgttttattgttggaataaagtcatcattgatcattgaagcatcctggaataatattctggaactgattttagttttctaaggcttttttcccttgtatataccatctattttctaatacttcatttattttcaagtatgtactttacacgttaatgtttctgaaattgagatggctctaccagccaatggaacatcatttataattgagtacatttttttctctcttaatgagaaataaagtaggtgttacaaccagtaccatttaatgaaatatagtattttgataatatatagtactgtgtcaccacttgaccccaatgaatgaattttgaaatgtacttctaaatttctacaacattaaaactacgattcataccaatttctagttctcccactctttcatgtgctttgaaaggttttccctctctcattttccagattgatacattcagatttcttcagtaatcaaatgactaagttggaattactgcacaggttgagtatcccttgtgtgaatgcttaggaccagaaatgtttgggatttcagaatattttcatatttataatgcagtatcttggggacaggacctgagtctgtacaccctatacacatagcctgaaggcaattttatgcaatattttaaagaattttctgcatgaaacaaagtttcaaatgcaccccatcacacaaggtcaggtgtggaattttccacttgtggcatcacgtcagtgctcaaaatgtttcagattttggagcacttcagattttggactttgggattagggatgctcaacctgtattacactaaattcgtttcaattcattattattcttttttactggaaaaagcattgagtgcttgctggctttgtaacaggcacatgctaatgctgtccagagggcttcataaccacgagatatagtgcagttatttcaaatgttgacctaatttttctaaagttacacatgtggagtagaatatcaaatggtttatttacacattatattttgctaaaaatatgctatcatctgtagtgtggaaatagatgacattattagaacagattcatttaccttatctagcattaatttctgctctgtaattataaaggagttttacactgaaaagctgtttttgatgaattactattccttccatataacttgaaagaaactcatcacttgttttaacagacagcatgagtatctatgacgatattgatgctgacgtgctgcaaaattaccaagaatacaatctggccaacatcatctactactctctgaaggagtccaccactagtgagcagagtgccaggatgacagccatggacaatgccagcaagaatgcttgtaagtacacagtatggacagtgccagcaggagtgcttgtgagcacacagtgaatctcagctgagaggagtccgtggccgagagtagcatcaacaacattaacatgatattcctgtacctgtaagaaagtatatcttgataggtagttgatttgcaagtactgtgaaaaggtatcctatggaagatgtaaaaatatcttcataacattatttgagaggccaattttggtatccaaaaatttcttacttttaaattaagcaacagaagttagttaacaagttattctactctagtttcagattttttatgtagtgtttttgttttgtttgtagctgagatgattgacaaattgacattgacattcaaccgtacccgccaagctgtcatcacaaaagagttgattgaaattatctctggtgctgcagctctgtgagtaattgtagattgtcgccttcagagaattttttttcctcttgctgtgtctgcttgtttggatgcttaaaagtttttcgtttttttcttttgaagttgaaactcattgctgaaacttgcatcctaactcttaggctataaagatgtggtaaaaatgggacctctttgctttatttttattgtttcagctggaaacactcgggcttagttttcggttttctaaaggattaggaatgggatgtggataattcagtatcatttatgaaatctttttttggaatttaaacaattgtaagccaagctttctgagttacagggctagtttcagatttggttttacataaatctataaaccattgcatgttgggaaggtccaggaattttttaatcattatgttttttaatcattatgttttctatatcagtaccaaaagatagtatagccatccctcagtatctgcagtggattggttccagtactcactctcacctcccccaggataccaaaatctgaagatcctcaagtccctgaaataaaatagcacagtactacatataaaaaatgcacatcctctcgtatacttttaatcatctctagttataatgctatgtaaattgttgttgtattggtttttgtttttattattttatcattatttttgtcttttttccaaatattttacatcggctgttggttgaatccatggatactgagggccaactatatactgctttcctcaagaaaatttcttagttgttgaaaaactttaatgtttatgaaaaaaaggttaagataatgggaattttattcaaaaagttattaagttgaatacccactatgtgcacagtacagtgctagacacagtgttaaggatgtgattctctcttttaaggcacttatattctaataggataagaaacatacaagtaattgtgattagataaaacgtgtagtaagttctttttgactcgttccttcttacctcctgctaatcagttaccatgctctttaagttttaccttctaactatctcttgaatcttcccccttctttatgcccacttaatgcagatccttgtcatttctctcctgggttcaaaaaggtaattatttgagtgccccttaagtgtcaggccctgtgctagacactgaggatacagtggtaacagtatttgccttcagagagctcagtcttcacagtaaaggcagacactaaataagaagtcacagcagaacagaggttgctaaactgtggcctggagctaagaatgggttctgcatttttaaagggatataagaaaaaggagagtgatagcgtgtgacccacagagtgcagaatacttgctgtgtggcccttcaccgaaaaaatttgcctattcttgtgacagtgttatgaggaaaataacaaaatccattctctgttatacactcattctgcagaaacactcgatgtatgtgatcctatattttctggtcaccagcactcttcccagtccagtctcttaccattaccatttctcacgtccttgaacctcagccaccttgatctacttccagatctacagattcgtcactctttctcgcggccagggagtggcatgtgctgcagcctgaaaagccactatttcttcccttgctcccttgattcttcatctgactgcctcctgtgtatccttccttactcagctgggggaatcctttcttccagaaaacactccttccttcagtctgagtgaggcagccttctgcagcatcctgtcttccatttagcttagctcttacagccttgtatgaggaattggctttttatttgtctgtgtgctcctcgaggctaggatgggaccatatcttattcacttttgtgtccccattgcctggtacatacctccttcgtgaatgttgaatgaatgaatgaaatgccatatgtattcagaactggaagttcagaagagggacaaataacattttattgggtgtatgaaaatgtgggtccatggttttaagagtcagggaaaagttcatcactatttaaagtgttccttaagtgttacttttcaagggcagaaactgggcagaatgccagagagacacaactagaactttttgagccaacagagacctttgtgtaagttgttagttggatccatcagcctcgctatcctaagcattcttctcttattttactttctaagcacagctgtgttaggactaacccattcacagcctggtcaccaatgttctatcagcatcacagaatactgtctcatggtgtctagcttgatgaacttggttaggatactctctctgttactcagctttgtcatctgtaacatggggactaatacaaggactaaaaccttctattagccattatccttcttgccatctaccccatgttaaagccaggctgatttgttcttggatcttaagtgtgacaaagcctgcgggaaggaaccacattctgaaggtttgtgggctgtgtgagatccagagaacccaagggggtttttttgctcttgacaaacgaatgttaggtatgacctatgatgatacaacttctgcaaaattgaggaccagcctatttcttcattagaaatgcaggaaacctggccgggcgcaggggctgacgcctgtaatctcagcactttgggaggcagaggtgggcggatcacaaggtcaggagattgagaccatcctggctaactcggtgaaaccccgtctctactaaaaatacaaaaaattagctgggcgtggtggtgggcgcctgtagtcccagctactatggaggctgaggcaggagaatggcatgaacctgggaggcggagcttgcagtgagccgagattgcgccactgcactccagcctgggcaaaagagcaagactccttctcaaaaaaaaaaaaaaaaaaaaaaagaaatgcaggaaacctatttaaaagtaacagaaacagctgggtgcattggctcatgcttgtaatcccagcattttgggagaccgaagcgagtggattgcttgagcccaggagttcaagacaagcctgagcaacatagcaagaccccatctctacaaaaatgaaaaaattagccaggcctggtggcatgtgcctgttgtcctagctactcaggaaattgaggcaggaggattgcttgagcccaggagttttaggctgcggtgagctatgatcgtgccactgcacaaaaccaagaatttagaaaaaggaatccacataattggaaattgagtattaagtttttgcttcctaggaaggtagtctaaatccttatacaaaaacttagctatgcagtgccaaggttggattgcttgtgaatgggtttgcatgctctgtaacctatcagttattctgaatcaagacttgaatatttaaacatacttggaaaagaaaaagatcaaaaaacaaaataaacatatttggctatttagtaatataattaagaacatgagtaaaccatagtattcgaggtccaagtattagttgccagcctaaaaactaaatatggccaggcgcagtggctcatgcctgtaatcccagcactttgggaggccgaggcgggtggatcacctgaggtcaggagttccagaccagcctggccaacatggcaaaaccccgtctctactaaaaaagtacaaaaattagctgggcgtggtggcgggcacctgtaatcccagctactcgggaggctgaggcaggagaatgacttgaacccaggaggaggttgcagtgagctgagatcacgccactgcactccagcctgggcaacagaacaagactccatctccaaaaaaaaaaaaaacctctaaatatattgtgttaatttatagaaaaattgtaatttaaattacatattcatagtcttgcctacttgcatgagcatgtttttattgcttctaacctggattgaaatctatgactttttataacagtcattgagtctgtttcaaaggaatcttgtggtaagtatttttgcatgatgtactcaaggtatcaagtttaacaattgactttttttcattggaaagcatatgtgattaactagcatggattgcttcttgacctgcttgttttgtgtttgtctttttcttctaatataataaccagggattaatgaaaatcaagttccatcctcagacaagaggtaaagttcacacattcttcccatgtctgttcagaaaagaaacctattcagatataagttaagctaatttagtaatcctagaattgtcctctgagagatttagatggatgggccacttcacagtagcagccaactcacgggagcacctgggcaacgctagtggacttttttgtagtgagtgtgttgatcatagaaaatgtagatataaggaaataaactttgaggatagagaattaacattattttgagatattatatataggttgtgaagagtggtggttgtcacactttatggtctctggaccccttaatgtctgattcatgtagcagaagccagctagattttcatctgtctctattcattttgttgtgatgtcatggatcatgtggcctctggaaaactctactgtatactcgagaatgagaatataacaggcaaaataacattatcatgaaaatagttttgacctcatgaaccccatgaaaggttccccagaccaaaattttagaatcactggtatagggtaacactttattgtgtaaattcagttctctgtaccccacttaaatatgtattattatctcttgacattattttcccaaaaaatgctgtttgatttcttacttgttctgtactttgtttttcaggtaaagaaggaaaattcagccagttgattttgtttttagcttactgctgcctttgtccgaagaaactgttcctccattatttgaattactgaagacagcaagatatttgtaaattatcttaaaataaacaacttaaaataa

SEQ ID NO: 51 - DNA, 15102 bp, Homo sapiens
  source 1..15102: mol_type = other DNA
tggtgtgcgtgtcgaaggtcacggcgcgctcacaatggagctctcggagtctgtgcagaaaggcttccagatgctggcggatccccgctccttcgactccaacgccttcacgcttctcctccgggcggcattccagagtctgctggacgcccaggcggacgaggccgtgttaggtaagccgctcggctcggctcggagctggatccgccggggtggaggggcgctcggagaagaggagccggcggagcgagaaggggaaagccccgggaagaggaagtctccgggctttgcccttcgctccggacggagtgttggggacgtggctctgccaggactcggagcagactctgagcattgttttggccccacttggcacctgcatagagccaactccacgttcctggcccggtttccctcccagtctctttgttcttttgtaaagccggtgttcaagtcttgtttgtggcctaaacatctaaggtgtttagccttgtctgaggctgcggctgttttgacagttggacttcatctggggagctccctgcaattcaagcttccagggctaggctagcaaaggtttaagggtctgtttccgaagtaattactaggtcagacagtgttgacatttgccaacttagagcatacctcaagttgctatgatcactccagcgctctagttcagcatgtttacacaggttctacgcctagaaccttaaactatgatgcacaatactttgttccgccccagttaccaggatgcgagtgtcttttaagcgatccggtcagtgactgcggaggtgcagtgtcagtatggattgaagacatattttaagaccgatcgcttttagatgattttcttaaatataaatatcccaacaattcaaatttttgttttttttctgtagtttcatgaactaaacacttgtacaaaaagtatgaaagtggaagttcttaaacgaaaatagtaaccaccacctgggttaatctcaaaaaaaaaatgactgtcaaaccctgaaagtactaatataattttgaaatttgtatcttatattctgaactcatgccctaccttctacccccttgatgtatttgttcatggagccggttaccctaaactcatcatttttaggatggaagtttattctaaaattgacacaatgtaaaatatttatcttgtttttcctttgaatttactccagtgttagaatgaccattgcattgttatattttctttgggggctataatattttttaatagtaaaaatattaaggcaaaataagttaattgaagctagtaatagtagagttcttgttgtgttctttttattgtttttcacttgatcttgttgctcatctcatttacttataattgactgtccttatagttgatgtttttaatcttgttaaagggtttttaaacccaaattaaaatatcctttttggaacatgactgtaaagaatttattatcataggcatcactggaagttaatttattttagatcatccagacttgaaacatatcgacccagtggttttaaaacattgtcatgcagcagctgcaacttacatactagaggcaggaaagcaccgagctgacaagtcaactctaaggtacaggatttatttaaatatccatttattttcaaatactaccttaatgatttcaatttcagttttaaaaatggagacagaactttggctttttttttctttcttctagcacttatctagaagactgtaaatttgacagagagcgaatagaactgttttgcacggaatatcaggttacttactttaaaatttttaattaacagtactatttttcttttactttgtttgtaaagatgtttttttttctttctttcttgctttcttttttctctccagaataataagaattccctagaaatcctactgggaaggtaggtactgtataaggtgtcaagctgaggcacttttcacttgcaggtatgaatggagagtgttggtgtgaaacaagatcttcgggatcttgacccaaagaaaaggagccaaagggcatgtcaagcaattgaagttaagctcatgtttttaaagatcgtttattgagatgattttgaaatgctcctttaccattcataatttaaaaataaagtttaacaatggtttaaattcagaatggattaaaatggagttgggggtggaaagtagagccattcttagtaaatataaataactgaaaagttcttctgaggagactatgtacgaagttatcattgcatctttcagtataggcagatctctccctcatataacggatgtttcttggcgcttggaatatcagataaaggtaaagtttaagaaacttctctagcgggggatttagggaacttcttaaaacctagagttaaaagctgttgcgtgtttgttgtgttattttagaccaatcaacttcataggatgtacagacctgcatatttggtgaccttaagtgtacaggtatttatagataagtcttatccaataatgaaatttataatttcattgatttaaataaacagcgtttcttgttgcgtgttttttttcctgccctagaacactgattccccatcctatccagagattagttttagttgcagcatggaacaattacaggtacagtattaggatctataaatattcctgtctttttataaatgtttacttgagagttatactcttgggaagttcaaaagaaaattaatctaaccatttgtcagcagataatgaagattggttaaggatttaatgggaaaggggcatcaaaagtagtattttaagataggcttcacttgaaattaagatgttattaatagagaattggtctgtatttgctgttcttgctgattgaaataaacttctgtagtgtttagtgtaaatttcttctattcatgatgagtttggtccaataagataaacaaaattaagagcatggctttgaaaatgtctttgctttcagaaattgaattaaactgtcaaaattggattttgaaactttttaaatgactttataaagggggaagtatacataacattctaaaactgtttatattgcccatttaagactgggaaaattcaaaactacatttattagtggatatgacaacgaatttatttcatagtttttaaaaaatgaagctcattactggaaatttaagtgaaattgaatttttcaaaggcatcttctgcagagtcgttttaatgtaactatgaatcaaactttcaactttcagaaaatgtgtatacagcataacctttgttagataacttgagaaaattcagatgtatctgggcggttaaggatccggttagaaatcatgtttcagtgtgagggcaaataaccgatttgaacatgaggtatttccgaggaaacgctttttttgcccgatagtagtttgtcaaaagttaaaatcttgttgaattttaaacttgtttggaaggtgtgtcctgattttttttcttgcatctttcttgagcttggatacttctttccatgttttatcctaaaaacgtggtattgtatacacgtcttttaggacttggtggggaaacttaaagatgcttcgaaaagcctggaaagagcaactcagttgtaacttggggaagttaacgatccgcccgagtgcagaggaaaaccagaaacgccttgccttcagctgaaccaccgtttgtgcgagctggatgtccttttcagtagaaaagaattttccttttgaatttataccattcatcaattttgacactttaaaaacgtgtgaaagggttaagagggaaagatactgcccaagtatttgaatcgtttagtagtaactgtccatttatcctattttgatctttttcaagtcttctgaaaggaagtagacagtattacaccctgaataaataaggtgttgttttccacaaagagtgatgatattttgtttggatctgagttcgtgtgttattactttgtgtgaagctagataggagtagtgtgaacttttaacgatagccttttctcaggattaaagttaaacacggaggaaacgatgcgatctcctgggtttgtcgcagacccctgcttcggggctccgggggcgggcgcgggcggctgcccggcccgttacctgcgcccgagggctcgcccacagcccgaccctcggccgcccggtcccggcccggcgcggagcccctgcccggagccagccgtcgcccgcgcgcgccccgcctcggccgcccgcgggcggggaagaggccggcgcggccgcgggctggcgggcaggggcgggcgctgttgtttccgcgagcccaacttgggcgcaggttccgcgccgcggcgccggagcctgggccgcagcccgcggggccggccggggggcggcggccgcgggacgtatgcgccccgggaggaggcgggcggccgggagaaagaaagaacggggggcggggtgggctgcgcggcgtgcggggccggagcggcggccgcgcggagcagggcggcgcgtgtggcgctgtggagaaatgtctccgccgccgcggcgcggagcgagggagggggccgggcgcgcggcgcggaggggagggggcggccacgggcctgactacaccgacactaattcccaggccgcccttaaggaatgaggggagcacgtgacccgctgggggggcggcggggggagggggcgggcggactccgagccattttggagccggtgtcagtttccactctgccttcagcggtgcatttttttccaccctcccctccccctcctcccctccccccgctcgcacgcacacacacggcgccccccgcccgcccgcctcccccacagcaactatgaaataatcgtagtatgagaggcagagatcggggcgagacaatggggatgtgggcgcgggagccccgttccggcttagcagcacctcccagccccgcagaataaaaccgatcgcgccccctccgcgcgcgccctcccccgagtgcggagcgggaggaggcggcggcggccgaggaggaggaggaggaggccccggaggaggaggcgttggaggtcgaggcggaggcggaggaggaggaggccgaggcgccggaggaggccgaggcgccggagcaggaggaggccggccggaggcggcatgagacgagcgtggcggccgcggctgctcggggccgcgctggttgcccattgacagcggcgtctgcagctcgcttcaagatggccgcttggctcgcattcattttctgctgaacgacttttaactttcattgtcttttccgcccgcttcgatcgcctcgcgccggctgctctttccgggtacgtaggaggcgaggcgcccccgggacggggctgggggccggcgggggccgcgcggggctcggggcggccgcgggtggaaggggagccccccccgcgccccggccgcgccgccgggagggcgctgacagcgtgggcgcccggccccgcgccccgcgccgcccgccccgcgcctgccggccccgcgcgccgccctccccgcgcccgcgagcgcgcgcccgccgccgcccgccgactcccgcggcgccgggaccgacccgcagcccgcgccgcgccgccgccgccagcagggctcggcgccgctccagccgccgccgcccgctcagccccggcgcgccgcgcgcggccccacgttttagttccccgctcccccgggcgcccctccgcaccctcgcgacgcacatggcccccgagaggagtactggtatttccagcctcggcggctctcccggccgcagcgccctttgttgagaggtagatttggatgaaacggggacgggttcctgaaatcgggagctgcttgggtcaagtggcttccctcctctcccgaagaaagggctctggaggggctccagcagccagagaacgcccccattttatagggacgggttgcgtggggggcggccatcccgccaaggtgggtgttaggctggagagagccccgacgaaaatgttattaacttaagttggggggacacttgtctgagattggatggctggtaagatggcggttcccagttgtttccaaggtctcctgcatttgtgtttaaaatgctgaagttttcaaggtggtgtgtgttgggagtcttggataagtgctctgaacatcgcttgggaggtgctccctgggaagtgggcatttcaaatttggagctttttgtggagtgaagatggtgactggacgttagctttgctggaggcttgctttctcactacttctttttctcctttttcttttttccccttttggagactgcaacttttctctcgacttctactaaaggatgcactcagcatcatgactccagtccactatcttttacaggttttgctaaatgtcagcataggtcatttggcaaagggatgctttagaaaagagcactaaaaagttgattgcatatgtttacgcagtcacttgggcttgacagtgatatggcatgatctttttcccagagatttacagttaataattggaagtaaacaagtagagagactttgatcattaccacttgcaataaaaggatttagtgggcttagtggtcacggttcaatatatgaaagagaagcatgtattaaccccttcccttaatgtgggcaaaattccgagcatatttatccaaatgcaagtgtaggttggtggtgtgtacaacgttatgagtagttcaacctatattttataggaaccttaactcccatgttctggaaacacattataagctacactaaacagttgatatttaaggatgcaaattattgacagtatataacaagttatgagactctatatgttaacatttgagttttaagtagaccgatcagaaatccctgggattgattttataaacaaaattataagtttttagatttgagttaattccatacatctaccccaaagtgtagtcagaagtgtttgaaataacctacttgtgtgagtcttatgcctagtaaaatatctttaaagccatatacaagtcactttgtatgcatgtatacacataaagcttttgtaagaaaattaagcatttaattgtacatgataaatccattaatactctatcactaacttcttggatgtatgttaagtgtgcagataggctttctccccaggagtcaaattaaccccaactttacccatgcttatgttgggctgtgaaccccaactggggctatggagttcatttgcatttcttagattgcagtaggcaagctgatggttaacataagaacttgcttctgttttccttcattttgacattcctggtgttaggcctccacctaaaaactgacagccccaactgagtgtgttacaatggcaagttttaacggttgagtatttttaccatgatatgtttggtgcatttttgtttgcttaactggcagtttctgggttggaacctggaaggttttcacttctgaggtggaagagattgtttctcaaatcttatcaagcacgtcaaacactttggaagtcttcattaggttgccactactttcaaagggcataaaaacataactgatttttatataagtaacagtggtatttattagcattataaatggtcacaggattgtggccaaattcttctgaactgaggtagaggaattgtgtgaattaagacttaagatgaatttgaaagacttttggtcaagtacatgtgacttaaatgctcaaagccaaccggtagataaccctccactgaggtttgattgttctccttgttaatacttgtctttgtgtggtgttggttttctgcaagctagaggagaaataaaggcagctatttttattggagccccttcatgaacttcgtgatcggtggttttttagtgcagtatgctttcacaggcaaacagaaatatcagcttgctatctttctaggaaagatcctgtggtttcacaaggagaattttctttaagcaccaagaaggctgttctttaatttaccaagtataatttgatttaaatattgctactctttagggtcattgctctacctacaactcctccgtgccccgcttagatttatgttaatatgttgacaatattctccaaaacaagtaatccagagataactgaggagtcagtcacacaagaagttttctggtagaggtcgccagttgccactgtggtcactttcataagagaggctttgttttgttttttaccattttctagaggttagctcttaatttcagccattgagctgtgttgattggtgtttccctttactgcattaatacaccttaggaattaaaaccgcaggtatatcttactgcaagtttcaaaaggtcctggatttccattcaaggaagatttgagaatgtacttcagtgaggtctggaagcttagtcttatatcaggttctgaaatgaatgaagaaggggggttgaagtttatttttcaagaatactacacgaagtatttgacttccctgactgtcggctggtgtattgttgctgacagttccccattgtgactttcctgtaatagaggtatctgttgggaatatcatttcatcgtatggggggttttacatttgtttttctctcctgtcgctgctttgggttgacaagctgttgatttagcgttggaaatgggctggtcacatggttctgtacatattgtcactattgtaccgattaaagtactttttcttgcccccagcatagtttgtccaaataaaacactgggctttgccctctcctcttcttgtaaaacagatttcagttttcagcctttccaaaactttgtatcgctcatttaatctacaggagagcgtcacattagagaaggaagttttaaagaggttcggttcaataaacatctctgcaatttgagccctgacggtttcgggctaagtgcacagttggcaattctcaaaaaatcccttcgtgaaatttctgaccgagtgattgcagacaggacagaccgagagagtcgagatctgaaaccagctctgcgcaccaagtcgacgtgaaaagaggcccccggagtgtccgaaatggccgggagtgcggtttgcattttcctttcgcgggcgctgccgcaggctccggggtccccgccgcccaggactgggtccctggtccccgatccccgctccccgctccccagcgctgtggcctcgtggggctgccccgcccccccggcgtcgccgcacccaccccgcccccgcgccggccccgcccccgcggcgcgccgcccctcccccgcccgcccgcccgcccgccgccccgcacgcccgccgaggctcggggctcgggccgggctccgcgcggagttgcagcggtggccggatgccaagtgtaagtgtaagttgctatggaaaccccgaccgaggcgagttccgaatccggagcgagacggagccccgggcgccgccggatccgcccctcgcatcccggcccccgggcgtccgccgcgctcaggccccggcccaggccgactggaggtgctcctcctgcggccccagcacccggctccggaaatgccagggatgcagggagggcagaattgttttccctgcgcgtcgcgtaaaaacgtgccaggttctgcttgctggaaccgtctaaaacaaccggaaccccggattttcacttgcagattcttgaggaagttttataataaattcggagacctggaacaagccctagtggttggtaaatatccgcggggattgtgtggcgtctgcagcagccttggggctgctgggctggaggacaaatggaagaaagagaccctaatacgctcagctcccagcccccaccccagactttcttctacctacaggaatgatctgagagaccagaagtaatgttagttggatccttttgcatcagtttggtagaactgattccgatctgatgagtaaattccttctgtagaaacgttaggacagcccagctgtacagtgttaaatgagttttataaattcagtgtttcagggtttgtgattactagatgatctccattcttgttctgtgaattatggccattatttctgtgtcttgcaggattttttatcaagcagaaatgcatcgaacaacgagaatcaagatcactgagctaaatccccacctgatgtgtgtgctttgtggagggtacttcattgatgccacaaccataatagaatgtctacattcctgtaagtaccgagctttagctctcttttgtatcatgcgtatttcacagttcgacctggaatttgaaaactgttaatgattcctgcaatctgtggaaatgttggtacaaagtggtgaaggcattttcttctcttgcatctaatgactttttgttaatatgtattgattgtattacaagcatgcaatatatgtgttctcaggatatgaattagcttatttagttggaaatgcctttcaccatcttgttttctactagttctgggtttctaacaccaatgatttatccactcatttctaaacataaaaaaacttcacatgttctacttctagtctgtaaaacgtgtattgttcgttacctggagaccagcaagtattgtcctatttgtgatgtccaagttcacaagaccagaccactactgaatataaggtaggaaactgttgaaattccttgtttgtaattattattggagttgtataatttactgaaggcaaccctctttatttcttcacagaaaatttactcttgaatacataactaatatgtgtgtgctttgtggagggtagccgtttaatttcttgccatattaatggtgaccaagtttagacaaagtttagtagtattcaagtgattttaagatttttttttcctaactgtcctttaaaaactgagttagttcaccttttttgcattgctttatggacttcatgacaggcaggaataaatatttaaaagggcttccattcctctttattccctattcatattagctagtttagtaacttgaaaggcacacttcttttgacagagcaaatgtgaagaatttattagtgaatataaaatatttttctactgatttaaaaagtgctatatacagagaacttttattctcatagtttttatcttatcaataatagttatagacagcatcacaatcaagtaaaatattatagcacaaaagaagactatagaaacttatgaacatttttagttcttgccatctgaattcatagttttctattttaattatttttcaggtcagataaaactctccaagatattgtatacaaattagttccagggcttttcaaaagtgagtaacttgcttagaaaatgaatttaaagagattattcattagttctttgtgttatgccaaatgtttacatcttttttccccattcagatgaaatgaagagaagaagggatttttatgcagctcatccttctgctgatggtaaaccttttaggggagggaagacattttatatggggggagagcttatctaggaattaaaatgtattaaaattgactttaccacttccatcctcttatatataaaatttattaggcatctgatttttaaaaattacatttcactatatcgttatagctgccaatggctctaatgaagatagaggagaggttgcagatgaagataagagaattataactgatgatgagataataagcttatccattgaattctttgaccagaacaggtaaaatctttaggcaatttattttatgctaatgttttattagattgtttcactaataaattttctctttattagattggatcggaaagtaaacaaagacaaagagaaatctaaggaggaggtatgtttcatgttacaaaaacatatagaagaaacattgtttggaatccagattttatcagggattgtgttgccctttagaatattaggctgttaaatagaagaaaatggtcatgtttaatgtttaagaaaggtctacatgtgatatttaataattagaatttattttatatatgattgttagtcttacaaaatattttaagtagttcacagttaatactttggtatgcttgaagattatattaggaatctgttcatttagtatttgtaatgatagtaaactcagagtgtaattagttgagaggttggtcacctccaattttgtttgatactagtatcttttatattcaagcaatcaaattgaaactttcttcatatcttaaagtaactgaaaaagttacttttctaaatgtacttttaggtgaatgataaaagatacttacgatgcccagcagcaatgactgtgatgcacttaagaaagtttctcagaagtaaaatggacatacctaatactttccaggtatctacttttatattcttcttgcattttacatagattttacaattttaattacatttttcactttggattttgaacccaaaaaagcaatagaaaaaaaatgtgaagttagtgctaaagttgaaatttatcttaaaacatttggtatacattctcttttatgctatgaaaacaaatcccttaacactctctagaaataattttttctcatttgaagtttcaggagtctttctttgttaaaatgtttggagaatatgtttcttaaagcacttttggattatatttaaatgacaaaaaatgtacatttacctttgttcttttattacttaataaaaatatttttcactagattgatgtcatgtatgaggaggaacctttaaaggattattatacactaatggatattgcctacatttatacctggagaagggtaagtagcatatctgttgttagattatgatggtaaactatatttaaagaattaagagtaatttttttccttttaactttgtagaatggtccacttccattgaaatacagagttcgacctacttgtaaaagaatgaagatcagtcaccagagagatggactgacaaatgctggagaactggaaagtgactctgggagtgacaaggccaacagcccagcaggaggtattccctccacctcttcttgtttgcctagccccagtactccagtgcagtctcctcatccacagtttcctcacatttccagtactatgaatggaaccagcaacagccccagcggtaaccaccaatcttcttttgccaatagacctcgaaaatcatcagtaaatgggtcatcagcaacttcttctggttgatacctgagactgttaaggaaaaaaattttaaacccctgatttatatagatatcttcatgccattacagctttctagatgctaatacatgtgactatcgtccaatttgctttcttttgtagtgacattaaatttggctataaaagatggactacatgtgatactcctatggacgttaattgaaaagaaagattgttgttataaagaattggtttcttggaaagcaggcaagactttttctctgtgttaggaaagatgggaaatggtttctgtaaccattgtttggatttggaagtactctgcagtggacataagcattgggccatagtttgttaatctcaactaacgcctacattacattctccttgatcgttcttgttattacgctgttttgtgaacctgtagaaaacaagtgctttttatcttgaaattcaaccaacggaaagaatatgcatagaataatgcattctatgtagccatgtcactgtgaataacgatttcttgcatatttagccattttgattcctgtttgatttatacttctctgttgctacgcaaaaccgatcaaagaaaagtgaacttcagttttacaatctgtatgcctaaaagcgggtactaccgtttattttactgacttgtttaaatgattcgcttttgtaagaatcagatggcattatgcttgttgtacaatgccatattggtatatgacataacaggaaacagtattgtatgatatatttataaatgctataaagaaatattgtgtttcatgcattcagaaatgattgttaaaattctcccaactggttcgacctttgcagatacccataacctatgttgagccttgcttaccagcaaagaatatttttaatgtggatatctaattctaaagtctgttccattagaagcaattggcacatctttctatactttatatacttttctccagtaatacatgtttactttaaagattgttgcagtgaagaaaaacctttaactgagaaatatggaaaccgtcttaattttccattggctatgatggaattaatattgtattttaaaaatgcatattgatcactataattctaaaacaattttttaaataaaccagcaggttgctaaaagaaggcattttatctaaagttattttaataggtggtatagcagtaattttaaatttaagagttgcttttacagttaacaatggaatatgccttctctgctatgtctgaaaatagaagctatttattatgagcttctacaggtatttttaaatagagcaagcatgttgaatttaaaatatgaataaccccacccaacaattttcagtttattttttgctttggtcgaacttggtgtgtgttcatcacccatcagttatttgtgagggtgtttattctatatgaatattgtttcatgtttgtatgggaaaattgtagctaaacatttcattgtccccagtctgcaaaagaagcacaattctattgctttgtcttgcttatagtcattaaatcattacttttacatatattgctgttacttctgctttctttaaaaatatagtaaaggatgttttatgaagtcacaagatacatatatttttattttgacctaaatttgtacagtcccattgtaagtgttgtttctaattatagatgtaaaatgaaatttcatttgtaattggaaaaaatccaataaaaaggatattcatttagaaaatagctaagatctttaataaaaatttgatatgaaaagcacaatgtgcagaagttatggaaaacctatagaggattacaacaggtaaacgttaaagagaatacattgctgacttatagtgatgtggctaagaagtacatgctttgttgtaaaattgcttgaaagcccattgaaagatgtatctgtttatttacagtctttgaagtaaaagttaccaatgtttgccaat

SEQ ID NO: 52 - DNA, 32744 bp, Homo sapiens
  source 1..32744: mol_type = other DNA
atcagacgcgcagaggaggcggggccgcggctggtttcctgccggggggcggctctgggccgccgagtcccctcctcccgcccctgaggaggaggagccgccgccacccgccgcgcccgacacccgggaggccccgccagcccgcgggagaggcccagcgggagtcgcggaacagcaggcccgagcccaccgcgccgggccccggacgccgcgcggaaaaggtaggggccggcgggcctcgggtgtgggagcgcgggccgcggcctccggtctcctgtgcgcggcagcacttaaagccgccggccgggccgcgccgggacctttgtgccgggcgtgggggtgggggcgggggcgggggcgggggcggccgccagcggttgggggctggggcaggattccaggctagtccaggaggaagtccgcacgccgccacccgcctcgggtccccggcgctggcagcccccgggcgcagagccagcccagccgcgttccgaacgtgagggtcgccggcctgggcgctgtcacgtcggggctgccggagctgcgggggaccgggcccgaacggcccctgacacctgcggtctcccgccgggctgggcaagcgcaggtgggagccagcgaggccacccggggctcggcgtttgggactcggcgctcccctggacgggtccggtgcctttgtctctcgctccctcgcgagctgctgtccttggagcagcgtcgagccagccgtcggcgcccgcgacggggactggtctcctccggctgccaggaggcggccctggggccagcgccgcgggcgggggcggcgggagccgggtagaagttggcttagtggagccgctggggaccgggggtgcggtggcggcagtgcagtccacttccccgtgtttataaacgtcaagagtcgccggtccctgccgggcaccccgggaccaggacgcatggccatggccagcttgtgctcagacccggtccgcgagcctgagagcccggcctgtgtctagtatcattttaccgcgtgtcatttcttaggcttcataaattggatttatgagactcctactctctaagtaacttttatttaatcaaattcgtgcttttgagtccaaaactttgcactcattggtatgatcattagtaagttgcattctctaagcttccgtttcctcatctgtgaaataggaacagtaatatctacattaataattcatttttataataatgacagtgagggccaagtttagctctaggcattttacatgtattatttaattctggaaccgctctaatgagattggtactgtttcgattcccattttccgagtgaagaaactgaggcacagggagcaaaagtaagttgcctgtggtcatcaggagctcctggagaaggcatggggtctagttccagagtccgcgtttaaaccacaagtaaccttcctaactatagttctgaaaatcaaatgcaaaatgtaaaaaacttagcttgagagtagatgctcaatgagtattgactccttttcagcccttcttttatagtaaaaagatgttaaaaatatctcggaagataattggtaacatcattggtaaggtttctttgggccaacatgccacatggttaacttaggtgggtagaattactaggttatttcgttttgttttgagacagggtctctgttgcccaggctggagtgcagaagagccatcacagctcactgcagcctcaacctccgaggcttaagttacttttccacctcagcctcttgagtagctgggactacaggcgcctgccaccgtgcccggctaatttttttattttttgtagagacaggatttcactatgctgcccaggctggcctcaaactcctgggctcaagctgtcctctctcaccgagctcccaaagtgctgggattacaggcgtgagcccctgaacctggcccttaggtttttttatttttttttttttaattgtagttttaatgctacaaaaataacatgctagaggaatttagattagacacctttcttaaaccacatacgtcctttacgataggttatacagtagaccaattttagaaatgattaaggaacttcagttggcagttacctgttcatttgtggacatcaaggcccagaggggttaggacttagagtctcactataattctcatatttttaaataatgttgactcattgatcaatattatataagtgactgaagatggtgaagtgttaaataaaaaacattggtattttcattacaggcatttggggagaaagtcattttacttatcccaaaattgagtatgaaggtggaagatgttattagaatgctagttaaaaggacaaagaatgtggttaatactttaattctgtaaacaggaagcaaatagattgtttaactcgtctgtgttgacttcagacctaaacctacaattttaagtgtttgtgattttcttaatgtaaagttctatattaaagttattttttaataccctcaacattctgcacatgagaagcatggaatcagcaattctgaaagtcactggatttagtaattttaacaattaggcagctttctggtcagtataatttaatttaaatcagccccgaattaccatcacgaatgaaaatgtagctctacattggtgttcttcctaactctgggagtgacactggggacatctggtcatattataataatgaaaagtggtcaaacaacttaacatggtgccagttttcctaagcgtgcttgccactgattgtaatgcttttattgtttggcttcttgataagtaagttatggcttacagcggtgagtagtatagtgttctgtctgaaaacatattcattaatattctgtagctgctctggtttgcccttaactatgctgctagtgtgataagctgaaacatcttgtaactggtaaaagtttcagagaacttaactttctgaatatgtaacaagctgcatgtatctgaaagggttcatttagacttctgttagatattagcagattttctcactctgccagagagttaggatctgttaggttgtgggtggaatcctggagattatgccgggtaaatatgtaagtacctgtattgtattagcagtgtttactctgacttggttttaggttctgagagtttggctggttattttttcagaggtgggaggtatggagtagagacgttaagatacagaaaggtacattcgtcttctgaatcctgaagtgttatgctagaggtatctatagctgtggaaaactgaaaagatattatggtatgtacccagcttaaagggggtacagtccgtaaaagtcagaatattagcagccttccaatatgtctgtcggtaggtgaaaaaaaaagtttctctctttcaggagctgtgtacaaaaggatccaaactatactttgtacatttgttattgttttaaaagtggctgtgagtttttagaggtcagctaactttaaacttgccgtttggtttgtgactttagaaggtagagttaactatatttagcaatatgcttaagcgtgtgcatatcacctcatgaaacgtgtgtgtgcatgagaaaagctgcctccagtacacatacatatgtatatacacacatacacacaagcacatatatgtatgtatttcttataggaccaatctcattgtacataatttcaaagcacaggttcctatctccagggatgcataaaaagactcactgaagtatagggagaaaattttaggtctactattatgtttgttgatctcatcactttaaaatttaaaattttgattatgattgataatcttactatattgctgtagaagtacatgtatctgaatttataaattgcatttattttgggtacaggtatgcctagaatttttttgctgataaaggtgagtggtcagaaagctttgcagatccctatatggaggatgatttgagtggggttcaagaactactgtatttgggagggagaactgataagacttgataagagaaataaaagaaacccagtgtgacactggtttctggctaggaggtgctgttcactgaggtgagagggtgaccacaagctgggggtgctggttggctggagcagaggggaaatgatgaccttatgaggccaagtttttttttttaaggtgaccatgggacataggtggagatgtctaaattgcagttgaatacacagattgagagcttaaaaaaagaaaaaactctgagagatttcaatttgacaattcttagtctattgctggttgaagctataggctgtgcatgcaaacaccaaaggagggtgtggagtgaaaaacgggctgaaggaggacctgggaacacttttaatagtcaagggggggtggaggaagaggaatctagaaaagcatttaccttccccagtttcttctctgaacttctaattcctttgagtggcatttttgtgagtgacataggtatttctgggtttttccagtgattggcatgtttgagttaaagacagaaagacttcattggtcacatttctttgtggtaatttattttcagatacctgatcagagaagcagtttgatgtactaaaggcttctcgattgggagacaggaaacctgggtgtcagtgccgggtctgccactgaatttctgtgtgacctttgtcagagtactgtacttccagagcgttggtttccacatctaccctataaagcagcctgcatgtttctctcattctctcgttcgaggagttggaggatagctgctgcctgatgtaagtagagtgcagttctctctccatgagcaactttttttttttttgtatcaccagagagtgtaggcactgtgccacttactctgttaaggatacctgccagcgctgaccagcaacatctgtccctgtcagctctgcatcaggatgtagcttggctgtacattacattttattctatcagtacattgagtaccagttacctgaaaaatgctttactcagtggacatgaatcaagaagttggcatgctctttgatgttgagtctgttgtctaattggaacaagttgtgttcagttcaggaaaacataaataccaaagagtgttttatacaatgtactgtaccataaaatactgtaccatgtaatattccctaacaatgttagaaaaatctcagcattggcttgtgtggttttggaacacgttgtgtaggagatgaggcctgagcttggaatggtatgagcgaaggttggatgacagatggttgtcacattcaaggacagcatgggaagaatccaatctaatttcacagatagtacctggccactttgttacctattaggagttatgtataatatcatatatatcagaaggatatgtgaaggctatataaaatgaaggcctgggttcttgccctccaatactagcctgatgagagacacagacatgaatacaattagttacaatagaagtttgaatagaaataacactatattattaagcatcactgaagatttgtcattcactctgctgggcactatcaaagctgttttggaaccacagagaaggagtagttaattaagttgattgtggttggtgaggagatgaagaggcaataaagacagaaaggaagaagaaaaatcagcattctattttgtgtagggagtatagtttcagtggagtgatgaggaaaatatttacatacgaaattaggtatgtaccatttggagtatggaagtcacatttttctgtataaatgtttattgaatgaatatgtaaataacttaagctttcgtaatctatgaaattagcaatagattattcttctccatgtacaatattttatggtttatgtatgattttcttcatattatgatttcagtgcttcttttaaaggggtggtacagggtcatgtttattggaggaggaaattggagtttgaaaaagcacatttggtagtataatgttatgttagaaaaatgttacaaaaaagtacaatagggagtaagatttatgcttattaaagaagcatggattaaaaagattgagaaacatttattaaagagtcactgaggttcttgttttagaaggccatgattaatgagttggagaacaagaagcaaatttggtaatcatgtaaattatgagctgctgaccacctagaaatatatttgctgataagagctttcatataatgatcatattttatctttccaacaattagatactgtttacagcttactgatgtgtaaaatgagaaactttttttcctatgtttatcatggttttaaaacatttatcatgtatttaaaatactgtatgcactccaccacagacaggatggagaggaagatgtgacaaaagatgtggtcaaaattagttttaatcaaggaagcattttggaatgatctgcttaaaaagtggatataattacgcagtttgagaagataattctccttaattgaaattacggggaataagtcttgctctcaggtgcttattgataccgttgatcatgctggttcttttgctggctccactcacaattatctttgacaacttgccccaaagtaaactttctcaaccaaaaccgttcccaacttctttcctcctcacagggaaaggcaaaaaagtccgcaggcatagagagtggaaagaaggaacagcatactaggctggtttgaaaaacaatcaattgctaggtaataatgtcttaccttttgagtggaaggaggagctgggaagaattaagttcgggcaggttttttgctcattttggatcagcccttcatattatggcttaatagctttgtttatagtgtatttttctgcttttacgttcatcctctgaagtcttgagttaattttgtgcccctttacccccatttgaattaaatgcttcatttttttcccgtttctcacataaagctatttttttttcaggacagggaggggctggtggtggtggtggtgctgtaccagttgtctgtttatgagatcaccattagacaacgtttctcattggcttgaattatttgaattttgtgtgattttcctgttatgttgattctgttcttggtgtctatgagttctgtagaggattccagcctaaattttcttccttagttctgtttacttttcctcgacttttgtggttttgctctttgatcactgtcaagatctatttgagattttctgactttcttgaagagcagaatgagatctagattttctcttatttttaaagaagattcttcactgacttcctttcactttttgttctgtggaagtctttcctaggtgttaagtttccaggctttacctccccctacccccaacgtattatctttaggcattttgtttgccaatgcgtactatatccattatttatctttcccttgcacttgtagattgggtggtgataaaaatcttccatatttcattttcctggagaaggcgggtagagtcactagtgatgaattttatcttcaatctgttgtataattttcttaaagtatctcgccgtgttgtgagctgttctcagatttcaaattgttttgtgaacctatagctttggagcagccaaacctttgttgttagagcttcttagcccaggctatcattatcattgtgtgagaaggggttagtgctctttaaaaagccatttttcttctgggtgggagtggtgaattttagatggttttctaattcagactacttttctgtttgtcaaggagaggagaagaggacttcaaatgtggtgttacatctttgggatcccttagcctcttctctttcatgtctccttttttttcttctctattctttctgcgaagttttgttaatcattaatgctagcttattaatatttgggccataaacacctctgtagtgaccaacacacctcttcctgccagatggaaggaaaaaaagtgttgagttttaattgttcttcctgtaaggggaaaggttccctttccatgggaggaactcatctccacatgtcaccctctcagatggtacagaattcagaaagatttctcagtttcttccattcatgtttttctcgtttttattactctctatgtgggataagtgggaggaacctcatgtctttcaatttggctctgtgttcttcttctggaatatattgatttttaaatactaaaatctgttattggcctatttcttccccttttaaaagcagatacagaaaataatgatggtagaacagacttgggatgaatccaagtttattataatttttaggagacatttatgatatacctctataggtatcagaatcttttctactattaaggtgaaaagatttgagattttgtgaaatcttttgtgtattctttttatttgagttggcttttaggtggcttatttttcaactctgaaatgaacataacatgttacatatgttacatatgttacaatttttttctaaagtgtagttgtttaatttctacaaagatagtccatataaagtttctaaagattgtaaatttaaaaggaaatgccaaatgaattatttgtaaaattgtttaaaaaaattaataaataatgagtgtgtatttaaaagtttgaacatgatataaaaccatacttttatggataaagattagtttacagtgaagattaaaacaattatgcactatttttgacagtggaaacaattgcacatatttgggttaaccactaaaatgagattatttgtgggtggtgtttaagattgtttattgttcagggaatgaattatgaccccttagataaaatttcatatggtaaaaaatgaccttaaggtgaaatgcttttataggaacaagacacaaaacctttgtctgtacttatgaaatatggcaattaaaataacttttcttggcctctattaagttcaaatgcccaagaaataaactcatagaacattataagccctttccatttctgtgccctgagtcagttctaacactagaaggatgttctttgttttaaaatagtgattaagtaggctttgaaaaaattacagtttaatgaagtcaggtcatagcttctggatacagatggtcaggtttcaattccacctgtgcaacttttgattccaccattgcaagttgtttagtctctctggttttgtttcctcatctgtaaaacaaagacactattattcttcacctcattgagttacctggaggagatagatgctattattttatcattattattatcatatccatttgaaggtgctgaaataaaattctaattttttaaagttctaaatgaaataactttttgttacaaattactttaaatcatcaaaacttagtgtattatactcttcttcttgcctgtgcctagtctggccctctcaattgagaagtcagtctttttttttttttcagtaatccacagtgagcagcagtccctgaacgaaatcatattgctagttgggtttgattaataaaacacagaattggtattctagtcctttcaggggggtttgcttccttgtgatgtaagaaccttgtcttagtctttgtgctgctataacagaatgccacagactgggtaatttatgtcagggttctgggggctgggaagtccattatcaaggggttggcatctaatgtctttctgttgcatcatcccatggtagaaggtggaagggcaagagagtgagagaagagaaggaggccaaactccgtcttttatctggaacccattctccactcctgtggtaatagcattaatccattcatgtgggcagagccctcatgaccttatcacctcttaaaagtcccacctctcatcactgttgctttggggattaagtttccaacacgtgaaccttggggacacgttcaaagcatagcaaacctcaaagcttcctccttatttctgtttgtattaggtatgttattccctcccctcaatctttttttaagggtttctgtgatatcagtgttcagagcatttgtattttgtctactatgtttttatgatattagtgttcagagcatttgtattttgtctaacatttactaccttaaatattttgtcagtataaaatatttaaggttttgctgcttttattactttatgaacacatttgtcaggaatctgattgttagaaagcacattaaatagaattctacttggatgtggaatctataaagagtataataaggttttgatattgaggatgtcagtgtatgaacagctataacaatccacattaatctattttctgtagttgtgttacttctaactttcagactttatcctttctttcatatcttgtgtcttccctaaagtggatccagtcagttttctggttataattacaattgaaaaaaaaaaaaaattcaaccatagttacttctttattcaattacgttgttattgagcgcttcctgtaacatttggtaatgatcataacaagtaacacccaggtacttacaattggccagacattgttttaaatgttttatgtgtatcaacttatttaaacttcacaaaacccctacaaggtaaatactgctgtccccattttaaagatgaggaaactgagacagattaatttgccagtgtaactctgcactacacaatgttgtacaacggtagatgccacaaatatctgctgtcatgaagctcagtgttttattttttgatacctcagagtatctccagttgtttttatcgttagtttcttcatttattcaatataaagacattgcgctagatacagaaaacatggagaaacttctagaagatgacaatttataaggcaagtcaaccatgtacatcattagtagatgtataagagctacatatgccccaaacaggaaaccttttaaatgaagattattatatatgttttaacatactgtgtgtatgtacgtacacacacacacacacacacacacacacacacacacggctatatgtgaatcacctggctttagtctttctttcctccccagttcttgccataattcgagggcttcaagagttcatgcagatgatacttctcacaccttggtctagcagttttctttctttcttttttttttatttaatgaaatttcagtttattcagataaagactaatgtatgcctcataacctagtgataatctataagtttgggagttcacaacatttttacaaagcacataatattaacattcaagtgaggcattatagaaagttttataaagaatgaagtaggccaggtatggtgcctcatgactgtaatcccaccactttgggaggcagaggtgggtggattgctggaggtcaggagtttgagaccagcctggccaacatagcaaaaccctgtctctactaaaatacaaaaattagccagccgtggtggcacatgcctgtaatcccagctactcagaggctgaggcaggagaattgcttgaacccaggaggcggaggttgcagtgagccaagatcatgccactgcactccagcctgggtgatcaagtgaaactgtctaaaaaaaaaaaagaagtctttactataattcttttaaaaaaccttggttcatcttgaaagactgatgaatttttgaaatacctgcagaaaaggaaaataatcccccccccccccccagaaatacatacaaaccacttattggcacttgtgttttaagtacctggagaaaaacaggacagatttttaaaggcaattaataacagcttatacaaggccttgtttcatttgctttagcaccaagtaaagtaagagtaaatatgctgtggaagatggtcaggtttttcctccttctctcatatgccccacttctcctaccaggtcacagtacatcagcagccatccttgttgccccactgaggaatcactttagattccagtatttaaatggctgctcagatgaaaccagtagaattctttccccttaagataaggtggcagtgaatgctagcaggtatcaatttctttgatcaggaacaaagaactccttcagaaaactcacttttttggtctttgttaacctatcctgtgaattctttttattggcacaccttgtttacgaatcatgattgattgctatttatgccaagggaacattccgcaggcatgcctgatctatttactaatgacaaagtatgcttactttacataattccataggttttctcttttatttttgggaggaggggtataataacttgttatttatcagggcagatcatatatttggatcaaaaagagaaactggcaagtagatcctaaaacacatttcttaacccgagtaacatctgaaaacatagatttcaattatattttgttgaaaattcattcaactttggtgcttatccaagaacttataatgtcaatttctgacaaaaattataaccctcaatacatatgtattttcaaaagaagagtcatcttaaagtaatatttttctgtatgttaattgatacatttttatagcaaattgaaaattctgagtaaattgaaagtatgtttaacaacaaaataaatacagcatatatggttagcttatatatttattagtgtaaaggcagcagtgaatttgtatcttacaacaaatctgtgaatccagttgcttttttttctggaattttatgtagtatcaccatgctccacaatgctagaaatgtggcattaatctgcaaaaatttctgatgagatactttccccaaatgacatgtaactttttaaaacttttccaaaaaatatggacattttatcaatcacttaatcttttttttttgagacagagtctcggtctgtcgcccaggctggagtgcagtggcgtgatctcagctcactgcaagctccacctcccaggttcacgccattctcctgcctcagcctcccgagtagctgggactacaggcgcctgccaccacgcccggctaatttttttgtgtttttagtagagacggggtttcaccatgttagccaggatggtctcgatctcctgacctcgtgatgcaccatctcggcctcccaaagtgctgggattacaggcatgagccactgcacccagcctatcaaccacttaatgaacaaaaagttagattactaccaattgttcatttaattttgctctaacgtgttttaaaagttaagacatctctgatggttttgcaggtgactggataaaacacactagatgatttcaaaagattaatcttagtatctgactcgtttggcacatcctcagtatccagaataaaatcagtagaaataaaagtaatataactttcaaagaattcatacatgctggaggtcttaggaaaagcagtttttaaattcaaggaataggaggtttgctcatcttactagttacacacatttctcctcatggagtaatggcagctttctggcttctttgtggaactttagtttgtagaaaagcttggtaatattccaggactggctttgtttgggcttcataagcctttagtcttttgataaccgtctctggtttatcatcctcatgctgaatgagaggatccccagtcagatcatcagtgcccacagttttgggagggttgaattcaatgttgtagactcagccactggcaggatgaatctagcgagcagtaaggcattgtttaatgacctcaaagggcacattcgggctaatcactttgtctgtctaagaagcttagtctagggcttctgcctgtggaagtgtccatggaaaaccacccaacagctagctatactaagtgagatttttcagctcatatagggccagctgagtcatgacatcatctcggatgagtttcctttggtcaatgaaagcgttagctaacacattaatttctgtgccccgcagcatgttgatcctggagcaggtctccgctagagaggtgcttcacagtgtttggtgacgcgcgacaactagtgctgttgcctagcccagggcccccatgatcacggctgctgccgcgtagacgcccctttacagaccaaggcccacgccgcacccgaacaagggctttggcccagcctgtgaacttaccttctctgccgcccaggcccagccagctggcagcgctgctagtgggcggggactgtggctcccaggccttccctgaactctggtctagcagttttcttgtctctcaactttagtggccattggtcactgtactggaaacctcgtgtgtctttctcacatcctcttggcctctgattccagctggtgctgctgggaacagtcggtggctcactcctggctgactgcatgctgcctcaggtgcctctcttttgctttttcccctgcggctcctctaaccaactttcttgtctgttccctcttgtctgtccctgggcacgtgcactgtagttcttagaagtgttagtggagttaatgccctttgaggcgactttttacctatgcaactggagttgatccatttccccgttgactttcactggacagactttctacgtacttctcaaaagttttccacaagatcaagcccccaggtactcagtatggtaaagatagtatctttgtattggctttttctctttttcttggttcactgtcttcaaagtgtctctctcttttcctggggtcaccttccaataaactgcctgcacaccagttctgttcccaggctctgctttggacagaaccctagctaaaacaatgacctggtactgtatttttaatacaggccttttcccccaagactgcctgtctctgaaattgtaaattcttaactgtcgtaggttccagctcttttcacttccttgtttccgtggtcccctctcctctcacctccctgttgtgatgtctggtcttttgactttttcctcttgttaactttttggtagcactgcaccttctttgccccccacccccacctttcctcttgcacctgccctgcacaccagggaatagatttagtgattccaaattggagtctgagggaccatgggaggtattctcagagatttgggcatttctacaaaatttaaaaaaaaatcatgctttcatgttaataataaacatttagtttatctggttgaccatcttataacccagtaatataacttcagaatctatgtttgtacttggaagttaattttggtttcataatgtttaagagctatgagcatgagacattttatatctatctataagttggcttatatacttaaagtaattgaaaatttaagttgtcacttggatgtctatagtaacacttttctgtttagagaagttctgcacattaagtaattctgagacattcttctgagtaatgtcagagaaaaatgtcatacaattcaatatggttcagtgaaaatatttttaattttttaactttttgaggcagggtctcactccattgcccagcctggaatgcagtggtgtgatcatagcttactgcagcttccaactcctggactcatggccccttcccctggcccccacttccaccaagttttgctatgttgcccaggctaatttattttcttgtagagccaggatctctaggtgggcatgatggctcatacctgtagtcccagttacttgggaggctgagatgggaggattgcctgagcccaggaggttgaggctgcagtgagatgtgatcacaccactgcattccagcctaggcgacagagcaagaccctgtctccccccaaaaaaaaaaaaaagagagagagagagacagggtcgaggctagtcttgaactctttgcctcaggcagtcctcttacctcagcccctcaaagtgctaagattgcaggcatgagcctaacagcaaagagttttgagcatggactttgtgccaagtatttctaggtgcaatagctataaataagatacacccaggccctattttcttggagcctagaatccatcagggaagacatgttaacaaatagttagaagtgaaatgagtgttacaaatatgcctgtataaattagggtgtccaatacctggtgggctctcaccattgcaggctctcactgtaatcccattgcatcttcctaattttctgcaacccctaagccgtacctcttttcctaggagttcttcctatttcagaaaaaaacagtcatgcatgaatgaactctctttgctttctcacctcctgctctgccttagaagaaaggcaccatgtctctgtttagggtgatccacccccttgggctgcacatgccatccctctttgctccaaggaggcctggcttcatcactttccttttctcttttcctgtgtcttcacctcttcaagtttgcccccagttctcctttcttcctaagtattcttttcatcccaatcacatccattttcataagttcggttagcacctagattatgacaactctcatgtctgtgtctctaactcttgacttatctcctgagatccatactcatgtcctagcttcccaataggcatcttccctagattttgcaataaaacaaacctcattttttcccctaaccccattctccctcgtacatcttctttattttaaagtgatgattattctaaattcctttctttctcccatccttccttctccaagtaagcagcagatccctcatagctaccttctaatcattgtttgttcgtcttcttgtttgttgctgttatctgaatttagacatttgtcacctctcacttgaacctttgcagtaaattctgtatttgtcttccagctcctgtcttgccccctgtccttttctccactgagtttctgccatgtatatgtagaggtattactagcctgcccaaattttttcagttcccttcctatttatagaatggaatccaaactcttttagcatggatggtatttggctctctgtaacgtagctcttcctgcttgcttggtcttcgttcctgttatttccaactcataatttaagtctcagaaatacttcaagattccttttggcctttctgatattttaagattttaagataatataacttatacttacaatagaaaattataaggataaaataatcactcattccaccaacaagatatagttacaaaaacatacatttttctagtctttttttctataaagagagaaaaagtgagacagttccaattttgggttgcagggagctgcccaaatgcatatgcttagaaataagattaggaaggagttattataattcgcctcgggacttcatggctttgtatatgcaggccttttgcttggaatatcttctctccacttttctccacacccatctcctatgtgccttcaggtctaactgaaacactgccatgtgcctgatgcctctgaacttgtccaggcagatttcagtgtcctcagtgcactgtgtccttgtttattactgaaaccatcatatcataataatttgtatttttgtccttgaactgaaagttccctgaagcagtgacccttgtatttcctgatatggctcaaaacctgacagagttgtctgaagaggaacctccagaaaggcagggggaaaccagtagagttcaagggagtagagtgtgttaaagaatggtgaatagtcttacatgttgctttgtgtaaattctttggtagtaaaccgatgtacttcttcaagtgcatattgtagtgagtcaaaaaatttgtgaatgaatgagtgatgaacgaatgaatgcagagagtaaggtaaggcctagaaagggttcttttgcaagagtaatttcacatatatggttgggcatggacatcagttacacagttatgtgccacataatgacttttcggtcagtgatggaccacatacacgacagtggtcccataagattataacggagctgaaaaacacctgttgcctagtaatgtagtgtcatagtgcaacacattactcacatgtttgtggtgatgctggtgtaaacaaatcgaccatgctgccagtcttataaacgcatagcatctaaattacagtgcataatacttgataataaacaactatgttactgctttatatatttactgcactatattgttaatttttttttttttttttgagatggagtctagctctgtcgccaggctggagtgcagtggcgcaattttggcgcactgtaacctccatctcctgggttcaagtgattctcctgcctcagcctccagagtagctgggactacagatgcgcaccaccacgccaagctaatttttgtatttttttgtagagacggggtttcaccatgttggccaggatggtctccattacttgaccttgtgatctgcccatcttggcctcccaaagcgctgggattacaggcgtgagccaccgcccccagcctgttgttatttgagagagtatctctccttacagaaaaagtaaaacagcctcaggcaggtccaggtccttcaggaagtggtcccgaagaaggagatcttttaggagatgacagctccatgtgtcattggagacaggatatgcaggcgcaagacagtgacattgatgatcctgacccagggcagctgtgcaggctttaggctaatgtagtgtgtatttgtgtccacagtactgtgtatagtaatgtcagtaatgtcctgttcagtgtgtgttctgtgcagtgtactcacttgcccctctcactcactcactcactcactcactcactcactcactcactcacttacccacccagccatccagagcagcttccagtcctgcaagctatattcatggtaatagaggtgcatcaattttaaaatcttttgtaccatacttttactgtgtagtttttctgtgtctaactgtgcgtagatacacacatgcttactgcagcattccagttgcctgcagtattcaggacagtcttgtgctggacaggtgtgtagcctaggggcaataggctgtaccgtagagcctggatgtgtaggaggccacaccatctcggtttgtgtaagtgcactgtgatggttgcacaaagatgagattgccttcgcatttctcagagctctttctttgttaaatgacacatgaaggtactgggttgaggagagggaaggtaggtaggaaatggagaccagtgtagacaactgtttctaggtctttgaccgtgaagaggagacaagcgttagaattaggacagcaactgaaaggcatctttccctgttatcccctcatactctgttttatatggaatgccattgggaggaaaccccttcaggtccttttctcagcataagaatcacctggagtccaggccccatgctcagggattgtggattttaagcctagggcatccaggtaaacccaatgcagttgttctctaggcccacttagagaagtgctgtcctgggagctttgtggcgtaggacttgggcacctgttccttccccttccatgcgcatgtgcagggggcacccagtaccggtagaagggaaggccagcagcattgaaagcgaggctccctggccctctgcctctcctttcctgtccgggtctctgtggcttgcttccctcaggccacttctaactgtggtctcctctccgccccctggtcctgtagctcttctgtgttcttaattggagtcatcctctagcctttccctttccctgagagaaagcctcgccttttacagatatcactagccaatggcagtgcctctctgtttcttgccagtgccccgccagtcgccagtcgcaggatcgttgacatctgtcattaaactgtttccagctgctggccttgttctctcagctgttcttcaacactgaagccttgtttcgcctgcttccgggtttggagctcttccggaggcacaagggtttcagaaggttgactttttgccttgtcaaggtttatagaaggaaaggacagtgacatttaaagtagtgtggctccgaatgttaggaatcattttctgttacctaataacttcatcttagtggtgattgtctaaattgtatgatatgttgacagatttctcaaagcagtctctagtgatcattaaacagcctgagttgtatcctgaagaaacatgtatctgtccatatatggaacaaatatttgttccattccctttgtgtggaaactgcctgcatgcttcattcatcacagtaatgcatttcctcaggaacttttaatgtttcaggtgtctgttgtcatagctttggaatcgtgataacattatttgacttgcttagaattatagtctaatggatttactacacactaaaccttttagacaggccttgaaaggtgaatttggtaggcatttcacacttctgtgacactcagattttgctggtctcttggatacagtcacaagtgatatgtaagcaaaactgcaagctcaggcataacagcctgctgggctgagcacgattgcagaagtgaatgacttttcacgttacgcttaactcttttctctcgggtgctcagagcacaacttaaagcattctctctgagccaggggaatagcatcctggaatgtaagcccttgaagatggaggtctgtaaaagaaatattcagtgttaacttggaattcagtgaacttttttcatattaaaggaaatttgtcaagaaaaataattgcacagttaaattgtgctacagttgttttcattaagaaagtagaaagaagaccctaacagtttaaaaaacaaatggccctcattgtctttatattgtgcatataactctttgttatcttcagattatatgaaactattagtattatttttatattcttctcatctttttttcttttgccttgagaaagtcacgttcttctcattgtgtactttacatccaaaattattttgtaactcttttttttttttttttttttttttgagacggagtctcgctctttcgccaggctagagtacagtggcgcgatcttggctcactgcaacctccgcctcccgggttcaagcgattctcctgcctcagcctcctgagaagctgggattacaggagtatgccaccacacccagctaatttttgcatttttagtagagacggggtttcactatgttgtccaggatggtctcgatctcctgacctcgtgatccacccgccttggtctcccaaagtgctggattacaggcgtgagccactgcacttggccctctataactctaaatgttgctgcattttattattgcaatgactaataagtccctaaacttgatgcagttagatttccctgttattggatataggatatttacatttttgctcttgtgaatatactagagtactatactgaatgtgtgtgtatatgtgtgtcaccttttatatatttaagtatttccttagggtaaattcccagtagctggattattagagggtagaaatttttttatggtttttgatataaattgtcaaattatttcccaaaaagttgtatcagttcacagagctaccagttggtttctcgcagccatctgctatagttttgttgggttaaaaaactttctatttttgctagttcatcttatgttgctttaatttacattttccaataacgattaaacctaaactttttttgtataaatttgcttttttgagtatttcttcttgtggagggacagatacttatatataattattagattggctgctagtccaagagcagtaagtagttaagggatcaagtcagcaaccagtggccgtagccatctttgaccaatcaaagatatagattcatatcatcgtgaaagctttgattcagagaaaatagttatatatgtacctaatggtaggaaattggggtagttgtatttagtatatagaatattacctaattttttggttagaggttctagaagacaagactttttcagtttgtcttatgccctctttttttttgttgggggagaggtggggggtctggacactctaggaaattaaaactgagtattttacttattgcatgcatagaagttgattttcttttcttttctttctttttttttgagatggagtcctgctctgttgcccaggctggagtgcagtggcataatcttggctcagtgaaacctttgcctcccaggttcaagcagttctcctgcctcagcctccggagtagctgggactacaggcacccacgacgatgcctggctaatttttagtagagctggggtttctccatgttggctgggttggtctcaaactcctgacctcaggtgatctgcctgcctcagcctcccaaagtgctgagattccaggcgtgagccagcgctcctggcagaagttgattttcttaaaaaagagagataataggaaaacaagctcaaaaatctatttggggccttatgcaggatgttggccttagcctgaagaaataaaaactgatgaagcgcattgttagcagagggatgacttgatcaggtttttgaaaacgaatgttcagcattgaggtaactgaggcatctggatatgctggtctgggcccctgggagccgcaggagataatggagatagagattctatgggctgagaccattggtaggttttatggtgttgaggaatacttaacactgattttttttttgagcgctgttaattaaatgttaaaatataatcggtttgctttagagaaaggcacgaatggattctggggctctggtatggaagttattttcgcagtgtaggtgcaaggtgagggaaccagatagggaggggagatgggcgagggtctgtggagaggggctggagtgaaatggtttgagagccatcatgtttataaaagcaatagaaggtacggtggggtaatactttctatttaatgcatttttcattttatttctttataactaatataaggcacattttacatttcagatgaatttacaaccaattttctggattggactgatcagttcagtttgctgtgtgtttgctcaaacaggtaaaaacaaaaaattttcttagttgtcttttcatttccgtatcttgtattgcgctttgaccagttaggttcatatgagaacctaagtcataatcatgctgctccttctggaagccctgcaattgttcctcttactcagagaaaggtcaagttccttcatggtcaggctcccctcacccctgccacctgggatgatgggaggcaagttggctggtgaagtactaaaatgctagggattgaacacactgcaagaagatcttttgagaacatgagagtgtgtaagtgaacagaaggcaaaagcaagtatatttagaagcaaatgaaataaatgtgtagaatggaggattatgaactgtccattattatctgcaaagactttctagaagacattctcactctttgataaaaaagtctcacaaaatgttggcatcatctaggaaagcagtgaaaataaagctgaaaatgtatttaacccttctataaagatgtggctccacatctggaataatggatacgcagttctgtcctctgaatcttgaaaaactacactgcatagagcagttcgatatcaggattggaaggacttactacaagtagtaaaaatgaagcaggagaccgtaaaagaaagtattgataagttagttacataaaatcagtaataacaaaaacattctgtgtcagaacaccgtaaacaagatgagaaactaaacaaaggttccacttcattaatgtgtatagaaatccaataaaaactgaggaacataacaaaaaaatttgcaaaagacataacaaaattataaaagaaatggttagtaaaaatatgaaacaatgtaaaacctgaaattgataggcttcaccaatgaattgatattctaatttacacttatgaaatgagcaacagttttttaacattaaagcacttcggttggaaatgtggtaaaatggtatttgtacactgccgttttgtgggagcttatattagtagtgttgccctatggtatccatggggaattggttccaggacctccttcagataccaaaatccacaaatactcaagtccctgatataaaatggcatgatatttgcatataacctacacatatcctcctgtatactttaaatcttctctagattacctgtaatacttaatacaatgtaaatgctaggtaaatagcttttacactgtattgtttagggaataatgacaggaagaaaagtatgtacatgttcagtacagacacttttttcccccatttttgatccgtggttgcttgaatccactgatttggaaaccacagacacagagggtcaactgtatattacttttggatagaaattagtgtgtatagagaattttagaaatgttaatatgctcttcaacttagtagttaattattcttttaggttttattataaggaaataatcagatgtgtactaaggtttatatataagatcatcagcatgtgtatgtgcatgtagtacagtatgtgtatatgtgtacttggggtgtttatatgtgcatgtgagcaagcatgtgtgaactgtgcacacatacatttggaaacaatctaaatttgtccagcattaaatagagtacacttatattgaaatacataatcattaaaagctttttaattctttttaaaaagaatttgtgatgataagaataaaacacttaggataaggtataaaaaacagtatacaaaactgtacaactgtatatataaagtgcatcctcagtttcatgtaaataatacatgtattaatatatatatgcttgcttccccttgctatttatctgcataggaaaaagactggaaagaaataggcaaaaatgttagcaacagtcctctctcagttaacagattcagtgagttggttctttatgctcttgtgtgttttccagattttctataagaagcatatgctggttttataatctcagaaaagatacgttggagacagtctgtattagcgcttaccatgtagaaggcatactcttccttaggtagatgcaaagaaacctaaaacatactttgaacatagagcctgagaaattctgggattatggattagatgaatatggacttttcagttatttaacatactgaaagcaaagggaaagccttgaagattcttgtgagtatggtaggagttaaatgacaagaaataatactttgcccagttttaagagaactcatgacatttatgacagtcaagaatgataaattctgaattatgtcttgtctttgatacagaagacaaggaagataacttatgtctctctgtggctttcagtgtcaaggtgatccaaaatcacggtcccaaattttgcattgttctcaccggtttgtgggagctaaaaattaaaacaattgaactcatgaagatagtagaaggatggttaccagaggctgggaagggtagtgagaaggtggggaggaagtcgggagtgttaatgggtacaaaaaaatagaaagaataagtatgacctagtatttggtagcacaacagggtgactgtagtcaataataatatagttgcatattttaaaataactaaaagagtataattggattctttgtaacacaaaggataaaggcctgaggggatgaataccccatttaccattatatgactgttatgcattgtatgcctgtatcaaaatatctcatgtaccccatacatgtatacacctatttacccacaaaaattaaaaattaaattaaaaaatcctgctctctttggggaaggtctagtttagatggtaactaggtcatagtattaatatttaacatatgtattgcattgtcattgtgattctgatttttcattattttctctctgacacttcacataaaatgttctgttctttcttctttctgacagatgaaaatagatgtttaaaagcaaatgccaaatcatgtggagaatgtatacaagcagggccaaattgtgggtggtgcacaaattcagtaagtaaggttgctcaagtcctttccatttgttctctggtcatttagtgtggctcagtgctgtatccttcagaagcacatattaatttttatgtaaatcataaaatgaataacctaatggtttggagctatgtggttcaacacagtagccactaggcagatgtggctattgagcacttttgtacaaattagaattgctctaagtttcaaagatatacaagatttcaaagacttagtattaaataaataataatggtgaaatgataatttttgtatatttaaaaataatgttataacagtgttaaaattttctctttttctttttttagtgtggctactaaacaattttaaaatacatatatttgtagctcatctttgtggcacatattagatttttatgggagaaccttcaaaaaaatcctagtcatttagtttgactgtttcagatttccccttttttgatggggaggtataaattaaccttcttaattatatttgagttaaactactggaattgatttgcatcccaatataagcttattgaggttaattagggtttggattttattcacttttgtcatctctatacttttgctaatatggtaccttccacaaagcctactaaatgttcagtgagtcaatgaatgaatgaatgaatatatcaaaagagaaggtaaggagaagtcattttgaggttgtatagtttattcacagaatgaataactaatatcagaagatcaaggggttactgattttgttttcatgcaggcatttgggcccaagtttcaagtgcctatttttgtatgcctaagtggtcaagtgtcagatatgtcgtatggtttgaccacatgaaagaaaaaatgagaggttttgttgtttttcaaaaattttctaatggtgttttctaaaagtggtgtgttgggattacattggcaacagtggaggaaatatggagtgttgtgagtttgtctcaggcaaggcttatgtaactgaagctcttggttttcatatctgaaaatgaggatgataatatccgctttatctattgttacaataattagaattgatgaacttaaagcagtttcacttaaaaacttctaaataagtggtagctgctattattgttaacatatccattttatggggactacagtttatctgtagttaaggattatcttagcctttgagctttggagcataatccttaaaattttaaaggctttctgaatatattcagtgaaattgtatttgggtgtcatgattgtaaatttcgtggattgattagtatttagaaatgtgtaattcactaggatcttgtgctttggtaggtagtagtttaggtttaataaatagtgcagctttgaattatctgattcttggtattcccttccagttgttgattacataaatactctcattagtatgatgtttctcttaaaaaatcttatgtaaaaactattgtgtattctttaaatttaaatatcttcacttactgttactttatacagcaccgttaaattgatatttgataaataaataccatatataatgtcactgtttcccccacattttcacatttcttgaaacacctttattcacagtctttatatagatctttaacagcagtgtttttgaattcactaaggcacttttcagttatatgattaaatttttatttctaagttgtttgatgtataccacatttaaaatctctgtcattactagaaattttactactgcaaatatccattcacctgccattaagaactttttttccttttttgaaatttacctgccattaggaccttttacccttgtcatatacttactccttttacccttgtcatatacttactattttgctttttaaaagttttttaaaaacttatttacaataatagctaatacttaaagttttttcaaacctgtgggaatacttatttaatcggtgctaaatttcgtgttgtccttttaaaaaatgcaataattaattgagatgtttttaagctcgtctgttttccctaaacatcgggttgttcagcatattgcgatggggagagtgccacataatatgagacgctttgtaaggacttttcaaagggaaattttggagaaatgatctgatatttgggtgtatgtatacattattagtagccattaaccatgctcaattagtgatttcactaaagaaattgcttttgattagatactctgaattacaagatagagcatttactgtgtacacttgggtcagttctgggaaaggtattactttcttggaaatgattgttttttaacaagaacacttaccacagtttggatgaagggagcattttgtttaaaagccagaattggggtacattagatgtgatttgatgttttgcaatttaattgcttatttgcaattattatgtaaaaaggtttgaccattacaattttcatttatacctatattttatatgtcatttagacatttttacaggaaggaatgcctacttctgcacgatgtgatgatttagaagccttaaaaaagaagggttgccctccagatgacatagaaaatcccagaggctccaaagatataaagaaaaataaaaatgtaaccaaccgtagcaaaggaacagcagagaagctcaagccagaggatattactcagatccaaccacagcagttggttttgcgattaagatcaggtatggaagcccaactctgtgaatacctgcgtgtttacttgaggcattcgacaccagctttatgcaaactctgaccagtttctgttgaaggctcgtttttacatgtggactggcactcaaaaatgtggaattgtttaaattttagaaaatttttgcagatataacaattgtaagacatatttacttggaataatattaaatgttgcctaatattcaaagtaaattttgttaaagattcagaaagtattaattagctttagtgagttttaaaaatgaaagtgttcatcctctggtctaattacataatatattataaaagcaacattttaacctgttcttttcctttgtatttgtttagtattattaaactgttaaggtttttgtaattatgtctgttagtcccacatctaaacatgaaggaaaaaacaagccctcatcctcgcttttctggtttccgacctttcttgtcaggagaatggtagagtggccctgtcccctgacttccctcccggcccctcctcaaccaggtcagccctctcctcctcatcctgctctagcaaagctccaccatcgccttcagcccgcagacccaggggacccttgtcaggattttttttaactcttctgtaccaagtaacactttgtactttttgaaatgctctgtccttgatcaatgataccactcctcggtttttctttgtgtctcttaccattgccttccaggcctctttttgtgtcttttttcttcctccctttttgcagtccacctaaatgtcagttttcctctcgtggctttaaaacccaattgtatgctgcagcaacacagacttttcttgagctccaaacccatttctccaattgcctattagaaatctatatagagaaaactacaagttaaaattttaattacattttcatccaaacctctctcctgtatttcctaagtaaattacattaacgtctcttgtatctctctcttctcctccttcatcatctctctctgggtttcttttgtagattagctagtctctttgcctcataatgataataaaaataaaataataaataataaataataataaataaataattatttttaaagctgtctgccaggctttctaaagtaaagatcggatcatgttattcacttgcagggagtggcatcccactacacacagaacagagttcacaacttcagtgtctaaaaagtcagttgtaccctatcacgtgttctgccttgccctctccagactaatttatggtgttctatttgttttcttctcttataaactgactttttgtctgttttgtccactgtggattgggaatatcttttttatctttgcatcctgaaggcctggtgtttaaagtatttgttgaatgaaactgaatacatacccattgagttacttatggaattcccaggtttttgtaaaaattatgacaacatgttttattttattgtgtttaccgtgtaaaccacatttatttggtttttctcgtttgcgtttgattgccaacaggcaagtttcattttctaatctcttgtctaattaggggagccacagacatttacattaaaattcaagagagctgaagactatcccattgacctctactaccttatggacctgtcttactcaatgaaagacgatttggagaatgtaaaaagtcttggaacagatctgatgaatgaaatgaggaggattacttcggacttcagaattggtaggaatgttgggaacattgaccattttcattataaagtcttggcaattctcaaatgttgttttatattttattcctttgttactcacaacatacttgtgagataaacaagccagttttttagccttttctgagtggaagttgatattccagtcacacgtttaataatcttttctgccaccttgttcctctgtcactggatgctactgtttgacacagattgtacctcatagataatgacttgcatgcttattttcatactaacttgatcatttatcttatgacttactttattttatttttaagagtttcactcttgtcgcccagactggagtgcagtggtgtgatctcggctcactgcaacctccgcttcccgggttcaagtgattttcctgccacagcctcccgagtagctgggattacaggcatctgccaccacccccaactaattttttgtatttttagtagagatgggggtttcaccatgttggccaggctggtctcgaactcctgacctcaggtaatccagctgccttggcctcccagagtattgggactacaggcgtgagccaccatgcctggcccttatgacttattttataaacatgtgttgaatacccagattttatctaattgctaattagtatgtctgcacctgcccgtacagcctgatctcatcttagacctggatttttcatatgatgatgatctgctttccaaaccttatttttcccatttcatgcatccccagcttaacctcttttttgcctgcttctctccactcctgttgctctagaggtttagcaacagaatattagaaagatttgacagttatgaggcctaagagctgcctttcaaaaattagccctattttagtggaaacatttaaaaatagcacttgcttaaaatgttcttttattctgtaagcataattcaaggaccatggcattagggagctcctatcaaattagtgttttttaaaatggccagaattctagaatatttgtttattcatttgttcagcatgtcattattgagagctggtgtgccaagaaaatgaatgtgagttatttttaaagtagggaggcaaaataaaaagattgtcttaggtcttagtccatttgtgctgctttaagaaaatactataaactgggtggcttatgaacaacagaaatttatttctcacagctctggaggtgagaagtccaagatccaggcagattgagcatctggtgaggtccctcttctgggttcatagatgataccttcttgcgatgtactcacatagcagcagggagacagcagctctctggggcttctttgatgaggtcactgtaggagtctattcttacgttgctataaagacatatctgacactgggtaatttatgaagaaaagaggtttaattggtttacggtcctgcaagctctacaggaagcatggcgctagcatcagcaaggcctctggggaggcctcaggaagcttccaatcgtggcagaaggcaaagtggggagcaggcttctcacatggtgggagcaggagcaagagttggggagagatgccacacaattttaaataacagatctcatgagaactcactcactgtggtcagaatagcaccaagccatgagggattgatctgcccccatgatcgaaataccttccaccaggccgtaccttcaacattggggatcacattttaacatgagacttgggcggggacagatacccaaactgtatcagttactaatcccattcatgagggctctgccctcatgatctaatcaccttccaaaggaaccacttcctaataccatcatgttgggaattaggttttcaatgtaggaattttggggtaacacagacattcagtccatagtaacctacatttggtaacatagatgaattttttaaacaatgcaaatctctgtctttccatctatccatccattcattcatttatgtaccatttttttcttggcaggatttggctcatttgtggaaaagactgtgatgccttacattagcacaacaccagctaagctcaggaacccttgcacaagtgaacagaactgcaccagcccatttagctacaaaaatgtgctcagtcttactaataaaggagaagtatttaatgaacttgttggaaaacagcgcatatctggaaatttggattctccagaaggtggtttcgatgccatcatgcaagttgcagtttgtggagtaagcgcattcatttcctatcaggggatattgtttctattatgtgtgtgaattttaagtgtgattttactatgataatagaaaaattgaccttaattttcatagatttgattatcttagagaagtaattttaagtaaacccttaaattgcctgtatacataaagtgcctttataaaagcatatttaatctttatgcaaaccacacagttagtttattcatgcgggcttttaaaagacagaatgctaac

SEQ ID NO: 53 - DNA, 27738 bp, Homo sapiens
  source 1..27738: mol_type = other DNA
gagtctcaggggcgcgcgcccgtgggcggctgcgtcacgtgacccaggtaattggcacggcgcgcgcgcaccccttccgcgcagccccctgacctgcagcctccggacctcgctgcagcgcggacccggcccgcccgcccggtgagcgcggcggcccgccccctcccggtccctgcgccgctgcttctcctgccgtcctggggaccggccccacagctcctctctcctgggtcctggggcgccgctgcccgcagccctgagtctggccccgccggggggagggggaggaggaacagactgtgaccttggctctgaccttggctggccgtggcctcccccgggacccccagcccatcgcgcgcgtaccacccggctagtccagggtcctgcgcagaggagcgggtgctcgcggtgggtttctccagcccgaggacttcagactgccccgcgccttccgtggccaggggagggcccggagctgcgagggctgtgcgggggatggggagggtcagcgctgtgcacctggcgggacccataggcagcttcggactaccaaggagcctaatagacggttttaaccgcggtctccgattacagatgagaaaactgaggcctgagagagggcggcatggcctgaggtcgctgcttgcatgggatgcgcttcttccgccccccgggagatgtgggagggggacggggtaatcccgaggccacagcaggctgcagtacgcattcgccgaaccggagagaccctttgacgcccctcggccacctggctcaagcaggccctagcagcccctccccagtgtcttggaacaggccccaactaaatagaattgcggtttgttgctgagcaaaagctcatctgcttctcagaaagtggggtcagagtagacctgctgctgagagaatccaggctctgctgctgcccagcttggagggccctctggggagaacccttcccggcctctgtttactgatctctgcaatgggtgcattagggagtagtcctcactagggcaccccagacagggttgtgtgtgtgggagtcttagtggccatggtgtcggcagttttctggggttgggttgaggttctgaggttgggttggggatgctatgtgaccttgtcctcagagaagagacccccaagagatacccagggcaactctgctggagtctggactgggcagggggttgcacagggcacctgactctcactccttgttgctgtccttgactgtatgggcaggaactagtagggctggcttgggctctggctctagatactgagccctcatgccctgctgggatgcaggtgggggtgggtggcaggctgccctcctgccaggctgggtcaaggtcacaacagtgcccagtggccaacccagactgtttagtgtttataaaacagtgttcctgcaccgggccattctggacacagccagactttgtccctatctggcccaaactgccccattcccctgtgggggtgggagtggcgctggcagagggagcagctctggctcagctgatgggaactgcatcgctaagagaaatctggcttacatattgactgcagtgatcagggcacagtcgctggaaccccacacagccctgtcactcaccagattagccagcttagcctcttgcacctcagtttctctgtttataaagtggaactgatatgagtgcccaccccatgggatgttgggaggattaaatgagcacagtatctgtcctagaatcagtgctcctgacggtgcctattatgtttattcccatgacgatggtcttgatatctagtttcctttgccatagactggggatgataaagcgtcctgggttgtggattctttttgatgctctagaagattctccctgatgcttcaggagctcctgggcctagtggccagctgggctggcacgaccttctctttgcccaggcctctaggatagtcagaggtggaacaggagttgggaccctggctgcctgaccccagagctcatgcctggcacttggagaggtgctgctcccagaggagccggccccaagtgccccgcgctctagggcttggcatcactggctcgtgggctgggccacatgacccgaagcctcaggggctgagcattggggagggaaacttgggggcactcagaggctcccaagctcacctccctcctccctgcagtggaatcttttttgttttgaaaattttctctgttcaggcttgctgctggttgccccaggagcctgtcctccctccattgaggtgacatcacccctttcctctggctcatgtgagttagaaggagggctgtgccctgccctctggtggggcctgaccttttgtggaaagtccagccagtgagtttctggtgacatggttgagctgatggcaggggtgaggcagaagggtgcaacaggtgttggctgagcacacctgaccaggagcgttggctcagggcctggcctgggcagtacttggaagccagttataccccagaatgcacattttctggggcctgagctgtccaggggtaggggactcctcccgcctgggcgaccccttgtggggtggtccttgcacccagcttacaagctgggcggtctgggcaggagggcattagctggtattcatggggagctgctctatggcagtggctgtgctggagcagaggaaggggttctgctcacagttgtagggtggggaacagaggtcccactttacacatcatgtgtaggatgaggtggcaggggtatggggtgatctgggacctcagtaggccctatcaacccctaacctgcctggatagggatatctggggggttctccaggattggcagagggctcttagaactcttaccgtctgcggaatagagaaagcccccatcactgaaagcccaagatttagatattttccctgggaaggcacaggtgacagagtgaggtgagatgagctgcagggcctggttccccgtggtctgggtgggcttccagtctgtacctgcctggactgttagctgtcttgagtggcgctgggctgggcctggggctgccttccattctactcttcctgcccctccagaccttagcccttcctgcaatgaagtggggctattgttgggcctagtgtcaccagccttctggctgggcctgggagagagggcactctggcccaggattgcagtcacagggagtcactggtcacttttggtcgcaatgactagagccacagccctcctgagatagtgtgcctctatcacccccgacacctgtgctcactggatgcttttgcccctgcttttccctgaccatgcacaacacacctgacccctggaggactgcctgccctggttctagggtggtgggcctgagacccactccttcttggtggtactccctgcacctgccctgtggctctccgagtgggctccaggacctaggtgggtgctccctgaggcagggcctggggagttcatgtctctgcacaggctttggggactatccgggaaggagtgtggtctgggatgagtgtggcacagcagggctggggctcagggctgtttgatatctattgatagagtttactgagctgggagcttccaccagacagtaagcccagggggctgggagagtgtcacattcccagtctcatcactgcctagcccagcaccatctgcccagtgggaatgacaagtgctgatgagcggacagtggcttggtagagcctcttcctgtcttggtcctgccatttatgcctctccttcattgcctgtgtccagaatgagtcagctgaggctgctgccgtcccgtcttggggtacaggctgcgaggctcctggctgcacatgacgtcccggtgtttggctggcgcagcaggtcctccgggccaccggccaccttcccaagcagcaaaggtggaggcggctccagttacatggaggagatgtacttcgcctggttggaaaacccccagagtgtccacaaggtcagcatccccaccctaccctgggccaccgcaagggagggaagccctcgggggccgggctgtggcagggcagtggggagaagcagcttgcctgctgtgtgatcctgggcaggtttctttgcctctcaggtcctcagtcatcaaagcctgttgctttccctttgctgaatcagccagtgggtggtggttttgattgagaggccctggccatgtcctgctcagccacacctgagccctgccgtgccccctttgtcgtgctatgctgcctccatatgctcctttgtatgtaattagggacatacgtgtttgtgtatgtattgatctgataaaataaatacttgctgatagtaaagaaaaaaattaaattagatgggagggtgaaaagtgaagttgttctctgaccccttcacctgcagtggaaagcagtgcagtcacatgatccaaagccagaaggtataagaagttacacagtcagaaagctccctcctaatctatcctcatctgctcagttcccactgtcccccaacttagtgtcctctatatcctttccaagacttgcattaggtaaacttactgcaaatgtaactctggatttgtctccctttacgcaaaagtaacctgtaacacatactgttttgctccctgctgttttcgcttggtgatgtatctccaagatctttccatatcagtacatgaagagcctcactattcactctgtccagctgtgtagtattccattgcatgtatgtgccacccctattcctgctgatggacatctggttcatttctagtctctgactgtggcgaacagtgctgcagtgcatcatcttacaccttcatcatcttgcacctgcagagccatctgtagggtaaattccccaaagtggaatagttgggtccaggagtggctgtgtataattttgatgggtattgccaagttgctttccatggggattgtaccaactgagtctcccaccagtgccgtatgggagtgcacggaggaaagcgcttttacattgttcttatggaaaacacatgcaaatgcctgtgtgtgttcacatctgctttttgcttctacacagagagtagcagccatacatcctcttctgcttcattcactttaaaacgtatcttggcaatattccatgtccacaatactgaaagcacctttttaaaagactgtgtaatcttccagattctaaatgtaaaatcgttatttagccagttttctatggatagccatgtaggttgttttcacattgtcaatttttgtaaacagttctgcagggaacatcgttgtatgtacatctaggcaccctgggaaggccctgagagctgtggtcctcaaggaagacctgacactccttggggccccagcctgggccacccctgactcttcccaggccctgacctggctgcgttcttgtttctgccctgcctagtcctgggacagcttcttcagggaagccagcgaggaagccttttctggctctgctcagccacggcccccttctgttgtccatgagagcaggtctgcagtctcaagtcggaccaagaccagcaaattggtggaggaccacctggctgtgcagtccctgatccgggcctaccaggtgaggggcagctgaggcacagcctgggaggctgcactggctcctggggtgtggccaggcactgaagggaaggggtctcagctccaacatcatctccccagagagcccttctccttgtcctctactgagcggcacctactcctctagccagtctttgccacatcaccattcagagcacttaccacctgcttgaatttttttttgtgcatactgacttgtgtccttgtggtctgttccttgcacacaccatgccccgagtacgtggaggagcacttagtaagggatcaattccaaagcctgttgaatgaggggtgagtagattaacccttgttaattctgttttctcctctagaatgggcatcctgggagaacagggactgatacagcaggtgcctaattcatgtttatggaatgaatggttcagtaaacaattctcccccaccagttgctcctcctggagacttaggctctcccatgctgggcccctgctctgtcagagtcccagtgatggtgtgtgtttttggtcttgaccagacaggactaattggaggactgctgcggtgttcaggccataacaagcgtaatcatttggaatatctctgggaactgctggcaggaggtattccgtcagggaaatgtgaggcagcagcaagccacagcaaggctagggtacaggggggcattagcaaatggaaatgatgctttgcctctgaatgagctgcccaatctgtgggatggaacagagttccctgtacaccacccacctggggatggaagagggaaggtgagcagggttgggttcccttctggcctgaggacccatcaattgtgggccacctaggagcaaacagcagctattgtgtattgtgtctttcctggctggctgaaagaagcagacagtgatctaacccttgacttcaaaaatgaagaacaaggatgtaaaactgtatattaaatacagggaaacgttcagggtgctgcccgagggccttatcttctaagcacagatctcagcccttcagtagctctttgttctttgattaaccaagacgaggcattagagagttttcctggcagggtggcttctggattcaggtgtgttactctgttgtgcctggtgtggatgagctcccaccaggagggctgcagccccttacaggcgagtagcaggcacagctgtggttagaatcacctgcacactgtgctgaaaaaaaaacactgtattattataagcattttcaaacatataaaaggcagaaggatagtgcagtgagcccaccacccatcaatcatggccagccttgtttcatcaatttcccccttagcccccgctcactgctgattatcttgaggcagatcccagatatagcatttcattcattgaacatttctttgtgtatgtctagagaaaagggcttcttaaaaaatgtgccatgataccattatcgcatctaaacataataatgcctaatatcaaatatgcagttgacatttgtgtttgccttttgtcctgtgctttctttttttctttttagatggagttttactctgtcacccagactggagtgcagtgatgcagtctcgactcactgtaacctctgccccacgtggtcaagtgattctcctggctcagcctcctgagtagctgggattacaggtgcttgccaccacgcctggctgatttttgtgttttcagtggagacggggtttcaccatgttggccaggctggtcttgaattcctgacctcaagtgatctgcccgccttggcctcccaaagtgctgggattacagcgtgagccattgcacccagcctgtgctttctttttactgcttctttgaagcaggatccagctaaatccacaggttgcaataggctaaagtggctcttacgtctcttgtactttgcaggttccctctgtttctttttatgatgtggaaaaaccaggtggtttgtcctgtagggttttcccaagtctggattttgctgatggcttcctcatgatgtcatttcatctgtcccattgtcccatgtaatttctgtactttgacaattagatctagaggctcgatcccatagacatttgatttttttttttttcaaaatcagcttcctggtggtgatggtgatggcacttgagcagttagcagctgtggatagtgatttcctagatccattaactcactaggggttgcaaaaatggtgatatgccaattctgttttgccttctttattaactgaagtcccactatcaggagaaacttccgtttgttaactctgtttatcctgaggtgcagattgtgtaggaaagacaggatcactgctttatttttttcttttattcagtgattttcaaaattatgaggtgattccctagcacactccaaaagtgactaatgaaagtttatcttcttttttttggattcatatgaatgcatgaatataaacatatttgatgagtttcaatctgctgtaggtatactgtccttatagttgctcaaaacttgtccttattcccagcactcgtggtgtttgaacactgccttgatgttggtataacaagatgcttcaagctcagcttgtacatttctgcctattccagaactgtccaggtctctggctgtttcctgctattggtttgatcattacttctgggccctttcaggaatcagagccaggaaagggtttatactgatgcttctaacgtgctacaaatgtgggatttggggtttgtccttgaccctgtcaatcttatggcaacattgcctttagagatgtcaaaaatagaggttctcaaagatgccagtacaatggcttgtttgatttcccagagctcacatgcaacaatcttagaataacagttcttttttttttttttttttttttttagatggagtttctccttgtagcccaggctagagcgcagtggtgcgacctcagctcactgcagcctccacttcccagattcaagcgattctcctgcctcatcctcccaagtagctgggattacaggcatgtgccgccacgcccagctaattttgtatttttagtagagatggggtttcaccatgttggtcaggctggtcttgaactcttgacctcaggtgatccacccatcttagcctcccaaagtgctaggattacaggtgtgagccactgtgcccagccagcataacaattctaacactattacgactgactggtaataaaaaagacttgatgaatttttttctgtttgtctttagggaatgttccattagtcaattggaatggtttctctctgtatttatgccactaagtggacatatttattcatttgattcatttcactttcaatttttaagacttaattttgttttataagaatgtaaaatatttacaaggtttgaaagtcaaatcttcaaagtaagataacttcttaaaaatctggctcctagccctgcctctctatcctattttgtcccctcccctagaggataatttttcttatgttgtggtttttttaaattttatgattttcccttctaatgcatatatttatttgtgtctcctttttattagataatgtgtagttcaccatacatactttgctagaatttgcttttttgcttaacaatattttttagagactaccttgtagtatcagatggggatttttcttcttccttttaatggctctggagtgctccgctgtgtggatcgcccatatccatgcgccagtctcctgctgatagacagtggggaagtttctagaatttcactattactagtagcaccgcagtgaacacctttgtgcataggtctttttcctgtttttgcccgtgcatgttgtacttccaaaccaggttgagctcctgccaccttactggctgtggctggggtctcgcaggcagcagtgaagtagccgcggggcagagacatggggaagcttaacattcgggaatgggaagagaggggctggggcccagagccttaccctggaggaggtctgtccagctgggtcccagccccaccctgctcttttccctcctcccagatccggggtcaccatgtggcccagctggaccccctgggcattctggatgcagacctggactcctttgtgccctcagacttgatcacaaccattgataaactgggtaagacccttcctcaggacggccatggcagtgctgtgtgggtggcccagtaaggggcccacgggcactagggacagcctgatccttgggaatccatggagctcggggagcagcccacagggcctcctttctaccttgcctgtgtactgcctgttgttcctgagaaggatgcctgccactttccctagcttgtgccccatgtgttcaagcctgagaggcttgtccaccctgcctccctgggctcactctcacttctgctccccaggttggacccagagggagggcactggggagactgggaggtctggtgagactgcggggctccacctgggcctgacctccctccctccactttgctgcccggggctcggccacgcctccttctccagccttctatgaccttcaggaggctgaccttgataaggagttccagctgccgacaaccaccttcattgggggctctgaaaacaccctctctctgcgggagatcattcggcgcctggaggtgagcacaggcgggtgtgtggggtgcagctgaagcagctctttggagcttgccagaggacgggaaggcactgtcttttttgttctagacagcagggatgtcagccgtccctcttccccgctcctcatggggtcccaatgtgtctccccagaacacctactgccagcacattggcctggagttcatgttcatcaacgatgtggagcagtgccagtggatccggcagaagtttgagacccctggtgtgatgcagttctccagcgaggagaagcggaccctgctggcccggctagtgcgctccatgaggttggcaccacctggagggccaagtggctggaggtcctgctccagggctctatgagacgtcccacaccctgcctaagagagcaggagggtaccacaggaaggcaggactggatcggcctcaccactggctgcagggaggagagttgggaccaggtgtttaggcagtttggccaagagctggcccaaggcagagcaggtcaggtgggcagggatgaggctctaggagaacaagagagcggggacactgagcaaggccagaagtggcgggaagtggctgtgggaacatttgggcagaaaattatccctggtgtggagtgactgtggccacaccacctgtctgttcactggacttttctgaagctgggtcccccagggctgcaggggctgggggagcacctgactcagctgctggatgcaaagtggattcctgagcagcgaggtgtgggctggagtttggatctggctgggtggagatctttgggacttggcgaagagagcccttgagtgtggcaggagggtagtgggctaggagtgggtgggcagtggcctgttggaggagcttggctatgaggaagagagagggcggcagctgggaaggggtgtaggcagaggcgtttggttcagctgggaagatgcctagcctcccctaaccctgtgttcctttgctgggtgggacaggtgtatccatggtgggccctggaccatgtaggtggaaggaggatttgtgacttcctctgtcctcagcattcagctctgagcactcatgaacagcccctgtgagccccagtcccctccctctccatccctttccctttcctcttcccatcctctccccaagcaggtttgaagacttcctggcccggaaatggtcctcagagaagcggtttggcctggagggctgtgaagtgatgattcctgccctcaagaccatcatcgacaaatccagcgagatggggattgagaatgtcatcttggggatgccacacaggtgggtccccctccctgctgtgccttgcgcattctcctccagcccaggggacagaggtgggagagatgagatggaaatcagagcggaggtgttggtgggacctgggggtagaggtgggtttcctggaaagttctgagtcctgggcctggcctgctcgtcacagaaattgccgggtacttggccagagtcacctggggccgggtgctaaccaggttatcaggcaccctctctccctggccatgttgcctctgtccctagcaagggtgagatttcagaaagcggtacactatacttcttgaggttcctgtggacaaggagaggtggagggatttcttccagggaagggagggcagggcctgggcagttgttcccgggttgtgtccccaacagggaggtctgtggaggtgagccgagggtctctgacctggctgcaagctgactgcgtgttcccttgaccttgatgaagatctaggaggcttgctcagcagtggggcgttacctctgagctggagcctgtggggaagcaggagggggaatgcaccctgggggacagagacgtctgtggccaggggtcctgctgagtgggcatgtgcagatgtgcagagtggcctgtgggaagggccctgggcttttcccgtgaccagagagctgcttgtggttggactagcccagggctacatcagcatgagggcatccaaatgcatggtgcaggggtccccattcgtggctggcctgccaggactttggggtttgtctgtcatggggggcctgggaatgcccagtgtctggtcagagagttaggcagagctggcccagtggcctgaggcagcaagaaagcatggggctttaagcctcgggccattacagcagcaggagaggatggtgcctggtgattgggtggcctgaggagggctctgggcacgaaggggctgtattaggccaggccaggcctccacagtgggggagggaaccctgaggcctgcgggctttgccaggtgagagcccggcccctctggctccaggggaaggctgaacgtgctggccaacgtgatccgcaaggacctggagcagatcttctgccagtttgaccccaagctggaggcggcggacgaggtgggtgccatgcccaggtcccggcacccttggagagctgggtgtttgggaggtggactgtggaggggctgagccgggagcttccgggctgagataaaccttaagatggatgcattggagaagcctgcaggagagaggctgggtgtttgcctgaggaccctaaggctttttggagcaagggctgcagtctctggtagctgggagggccctcagataatctgggtcaacctccctgttttgagctagggaaactgaagcccaaagatgcaaaggcttgctggaagttgctcagttctgctcatgtggctgtgcctccatgtccaaagtcctgtccaccagccaggaatgactcccttgctcatttgtttgcccagcagagccttgggaggtgaggatggttttccgtacccatcgacctgctgaggaaatgttgttcctgctcccaccccctccctgggaggcctgggccaggccttcagcccatactgcctagcctctttctttccttttctttttgagatggggttttgctcttgttgcccaggctggagtgcaatggcatgatcttggctcactgcaacctctgcctcctgggttcaagcgattctcctgcctcaaccttccaagcagctgggattacaggcatgcgccaccacgcccggctaatttttgtatttttagtagagatggggttttgccatgttggtcaggctggtcttgaactcctggcctcaggtgatctgcctgcctcggcctcccaaagtgctgggattacaggcatggagccaccgcttccggccactgcctagcctctttcaaagtcctgcccatcttccctttcggtggctctctgggtcccctgggcagtgagcctgtcactccctcctctgtgtccctttgccctcaggactatctctcctgctgtctccagcctgctgccgtgtgtgtgtgtgtgtgtgtgtgtgtgtgtgtgtgtgtgtgtggacccatacctactggctcctatcccaggtctttctgacatcctgttccttttgttctagcaccttcagccttctaagcctcactttgctcttccataaaacagggataaaagcgcatgcccgagaatggttgcaatgagtcaaagatgacctgtgtgtatagtggaaaacttggccaaaggatgtttaaaatgaaattactattttttttcaactgaaaaagaaatttgatcattgtgaaaacaacaaaacagaacaaagcttatacaatgagaatatgttcctcagtgagactccattcttgtggccaattttgtttgtgtgcttctgttgtgtttaggtgtgtacttctagaaacatttcatgctgatacaaacaaacctctttttccagtgcaaccttatttctaagaggccatgggcatagccgtgacaccgggtggcaccttgctgttttcacttaacaagttgtcattgtttcctgcctgcacacatgggctaccccaggcttcttacagctaaagcatcccttgtgctggacattgggttgttctcatgagggtccttgcacatgtgtgagcgagtttatctgttagatggtgtccgagcagtgcagcggctggagctacgggggtgggactgaacgaccctcccaggagctggcagatgtcagcgagcccatccacagtgtgtgatggtgccagagcccccaccccacttcctcctacacgctctcgaatcctttcatctttgccgatataataggttcaaaagaggattttgttgtaatgcatttctttgttatgaattcagttgcttatcttttcacatgcttttgagccattcatatttttctgtaaattcctgcttgtggcttttgctcattttcctatggagtttttgggctttatcttcctgatttgtaaaagcgttttgtacattgagggaatttgccctttgcctgcatttgtttatgaatatttttctcagcttgatttgtttcccctatcgctgggcgtgggtttgctcccccatggcaaatttgctagaatttaggtgtcttttgtgttttctggtgttaggatattgtgtagaatgctgtaagtcttccttgcttcagggtcataaaatgttgtgtgttcctcattgctaccattggtgtgaggagtcaggggattcagcttcagtgtttgctggtggcctggccgagggtctctgcgctgatgcctaggcactgcccttctctccctgccttccccaccgctggatggccttccccactcttgtgctctcctgctccatggtcagtgtacagagaggctctgagccaaggcctggggtccctgccttcctccctcaggccagtgaggaggggcagtgtgatgaggagagaggggtcagagacagcttggccctctgaggcagtgggatcgggggaatgtgccagcctgactgtgggctgcagtgcctgcctgtgtatctgcctgtctgatgtgggaggggaggatccatcatgttcccatctccaccttcagggctccggggatgtcaagtaccacctgggcatgtaccatgagaggatcaaccgcgtcaccaaccggaacatcactctgtcgctggttgccaacccctcccacctggaggcagtggaccctgtggtgcaggggaagacaaaggcagagcagttctaccgtggagatgcccagggcaagaaggtgagctcacctgggggaacccagaggacctgggcccttcagggtgggcccagagggctgggctggaccctgggtctccacagtacaggtgccggctgggctacatgggctggggcacgcagcccctcctggctcacacctgccctgcaggtcatgtccatcctggttcatggggacgccgcctttgctggccagggcgtggtatatgagaccttccacctgagcgacctgccctcctacacgaccaatggtaccgtgcacgtcgtcgtcaacaaccaggtgagcatgtaggctccacgctgggcctcacagcgtcagcatccctggaaatccaggcagtagcttgcggggaaagtgagatgctcctggctctgagcccactgctgtgctgcttaccaggcaggaccctgctctttccagccttggtgtcctggtctgtgaaattggaagacacaatagggagggataagtagggctggaaggaccaaaggagcacctgtgtagcgagtgcctcatggaggctggccgtgtgcagccccacatgggcaatcttagacacagggaccttggtgccctttctctaaggcagctgagcttctaacagctcatatggagtctagaaagccctgtgttcactgccttgtttgcattaagtcacgtcatcgtccttgaacatcctgtgaggtgggaatttaagtgacccctttttatagatgaggaaacaggctgtgggtatgtaagcaccttgccccaggttgcagttagccgttgttaggactggattttccaggcctatgttcctcactaccagtgtgtcaaagtgactggcgaaaaagagcaggctccacccggctggtgctgctgccgtccccgtgggagctgttgccgtgtctaattgtggggctgctcaccatcaccctgttgtgtcccacattcctcctgggcacctcagtggaccttgagcatccccctgctcagtctccaaggctggcaccttctatctcactctaagtaaattgagaggcgcagcaggtttctcctgcctctgcagattggattcaccacagacccccgaatggcccgctcctcaccatacccgaccgacgtggcccgggtggtcaatgcgcctatcttccatgtgaatgccgatgacccagaggctgtgatatatgtgtgcagtgtggcagccgaatggagaaacactttcaacaaagatgttgtcgtggacctggtgggtctggggactgaggccaaggcatgggtgggtggcccatccctgctgtgctgagccagccatgtcatcagcatcttcagcactcagggctgggagtgcttcttggatgagagatttatgccaccaagagcaatctgtgcaaaggcctgggacgggacattcattcggtgataggtgatagtggagctcaaagggctcccagtgggtgtgccctacccagatattccccaattttgcagcagctacattgaccacacagcgtagggaagggcctgagcccctctggctgctcctgcaggtctgttaccgccggcgtggccacaatgagatggacgagcccatgttcacccagccgctcatgtacaagcagatccacagacaggtgcctgtgctgaagaagtacgcagacaagctgattgccgagggcacagtcaccctgcaggagtttgaggtgggcaggcaggctgcaggggcgcccaagacaaactttgggtggggaccctggagaggggttgtagatgttaccagcccagtgctgggcactaaggatttaaagaagtagccactatggtccttgtccccaagaggccccagttaccaaaggggaccaagaactaaggatgcagttacagccaagtgggacacagtgggtactgcaatgtgggggaagtccagccttgagcaggagtgcgggaaggcttcctgtaggaggcagccctgagctggggttgtccccataattatctatggagtgttcgtccttccaccttcatggagctctgagggcaaggactacaagtttccagagccttctccaagccccttgctgagcgcactgcaggcctgcccagcctcggggtacctgtacaggatcccctgaactctgagactttggcttctagccatgaggtccctataggccagagacagagagttctagaagaacttggtgatggggaccaggacttacgagtccaagtggactgggcgtctggctgcgcagggctttggtgctctgtccacatcttcatcctgattccaggaagaaattgccaaatacgaccggatctgtgaggaggcttatggcaggtccaaggataaaaagattctgcatataaagcactggttggactccccctggcctggtgagcgagcagtgtgtggctcagagggactcccctgggccttgaggtcttgcactgggatcaggactggaatggccctgggtgacagctgtcattgcctagtctagaggctgcaggctctatcactgagtccccaaagctgcgtggggccgattcctgcaagtcaaggatagcattgccctctgagcatggatggccaggtgctcactgaaaagggagggcatagccaggtgggagaggaagccctgggcactggatgcttggggccagggtgctcagagggcctccctggggggcagggttagaagagctgttaccctggggcccagaggtgggtgttgggcctgtgggggagttgcagctgtggctgtccagctgtcccaggtcccaagggtgggctcagggtgagtccgagtgccggtggagtttgggaagccatgggccactcagtcctggggaggcaggctggccagggggatcagaacccaccactgacacagtgtggacagagcctctctccctctcaggcttcttcaacgtagatggggagcccaagagcatgacatgcccagccacggggatccctgaggacatgctcacccacatcggcagtgtggccagctctgtgcccctggaggactttaagatccacactggtgaggttgctggacaggctgcagcccaggctgctggccccaccccaacactgtgcctcgaagggagattggttgggatgcaagagagatggtgtgtcgcattcctgctcagtctgtagtgggtccacgtagctctcggcaccatgtctgtgcccgtgacagtagctcttttcagggtgggcgtggcgagctgggcagctccagatgccacactcccagctgggtaccagtgactagtcttaggttggggaccttggattttccaaatgcctttgccggggcgtccctgggtcaggcagaagagcaggaaagcaagggctcccatacaggggctggaacgcagcctggaacgtgggcagaattctgcagctgaaaggacggtggcttgccggggcctggaccaatgaccgagggcagcccccccactccggggtgagactagaatgtgggtggtcaccgactgcatcccttggctggggccactgtgacctttgcctgggaagtccggagggtcccctgtggctgtattggggtgcctacacaccctctgacccacctgggggagttctgagggggttcccttacagtgtgcaccgagaccgaatgtcctggggcagctgctgacagcgtttggggcatgtgcccgctctgtttgtgtgttagcctctgtgtgtggggctgacaggagcacagcataagcctggggacttggagtcaaatccgtgtaccttgacagctgtgtgatctgagtaaatgactctgagcctgacggtgtctgcaacgtggccaatgcttgccaagtggtacctgctccacccctccacaggctcggggtagccccttgtctcagctggaggaggggtgcctggccctgggccctcctgcagcatccctgccctccaaccaaatcaacagatggctgccctgctttgtgcggggtgtgtgctgagcacctacctacccgccccagggctggctgtcccttggccctcaggccagcactcctttcccacaggcctctctcgcattctgcggggccgtgcggacatgaccaagaaccggacggtggactgggcgttggcagagtacatggcctttggctccctgctgaaggaaggcatccacgtgcggctcagcgggcaggatgtggagaggggcacattcaggtgagcgcagtggggctcagcatccgcacaggagacctggagcagaagctgggcctggcttggggatcccgagggggcctttgttggggtgggatcttcacagcatccctagcccctgccctcaggtggcatcatcagatggccacctcgctgaccccccagggcaagtgtgcagagctcactgctgggcccaagctgtccactaaggtcaagctggtggccatctgtggtcctcaggatcatgtgtgtgtggggggtgtgtggtgagtgtgggcgagttgtgtgtggtgtgtgtgtgtggtgtgtttggtgtgtatgtggtgtgtggtatgtggtgagtggggggagtgtatagggggtgtgtgtggtgcgtgtgtgtggtgtgtttgttgtatgtgtggtgtgtatgtgtgtatggtgtgtgtggtgtgtgtgggggtgtggtgtgtatttgtgggtgtgtggtgtgttgtgtggtgcatgtgtggtgtgtgtcgtgtgtggtgtttgtggtgggtgtggtgcatttgtggtgtgtgtggtgtgtgttgtgtgttgagtgtgtatggggtatgtgtggtgtatgtgtggtgtgtgcgtgtgtggtttgtgggggtgtgcgtatgtgtgtggggtgtgtatagtgtgtgtggggcgtgtatggtgtgtgtgatgtgtgtgtatgtttggtgtgtgtgtagggtgtgtatgtgtgtaatgtgtgtgagggtgtttgtgtggtatgtgtggggtgtgtggtgtgtagtgtggtgtgcgtgtgatatgtgtggtatgtgtcatgtttggtgcatgtgtggtgtggtatttgtggggtgtgtgtggttgtgtgtgtgtagtgtatgtagtgtgtgtggtgtgtgtgattgtgtttgtggtgtgtagtctgtgtggtgtgtgtgttgtgtggtatgtgtggtgtgtgtggtatgtgtggtgtgtgtagtgtgtgtggtgtttggtgtgtgtgcatggatgtgtgtggtgtatatgtgtgtggtgtgttttgcatgtatgtgtggtatgtgtgatgtgtgtgtatgtggtgtttggtgtgtgtggtgtgtgtatgtatgtgtgtggtgtgtgtgtatgtatgtgtttggtgtgtggggatgtgtatgtgtgtgtggtatgtgtggcatgtgtatgtatgtgtgtggtgtgtgtgtgtactgctgttaagtcagcccctatcttgcttgtttgcagttgtctttgtgaatccaaatggggacttgacacttgtcagttgtccacaccacatttcctctggttcgggttcctaaaatgttctagatcctgcctcagtccgctcctggttagcaagccagggtggtgtggcttccaggacttgaccagctggctttctcattcctggttgcttatctcggctggtcttgctccagccagggcccaggtggccctctgatgcacccagagctacctgtcagtccttgccagggactggggttcagccaggcgcccctcacttactgtgcccacctcggctactgcacggtggtttctgcctcttgtgagttgggacagggctggtgagatggtaaagaagccagcaagacggggcaggggaagtggcctcctagggtctctggctctagctggcacctgggaagtgtcttatcaggtcccctttatgggtgaaaagctgacattcagagaggtgccacaactcacagctccttcccccagaccccccagtgcgtggtgtgtgggcgctgctagcaggcagggggcaggctggggaggcctggtgggggacaggctgcaggagggaccacatggctctggttttccacagccttcttggatgccatgttgtgggaccctgcaggtttcctgggacagtgacggaggcttgcctgcctcctgctgcccagctcccctgctccaggtgaacaggtgccagcccacctgccctctgtccctgccccggtctgtgtctctgcagtcaccggcaccatgttctccatgaccaggaggttgaccgcaggacgtgtgtgcctatgaatcatctctggcctgaccaggccccgtacaccgtgtgcaacagctccctctcggagtacggagtcctgggtgggtccacgctctcctgcaggccaggcaggccccagacacctggggacaagagatgggctgggaagggaccggggccagggcctgggaggggcgagagatgctcagaggcccttaggggatggccctgggggatggtgattgggctgccctcacctaaggccatgtgggaggtgaaatcgtgtcccatctgggccccttggggatcccagttggggggacctccttgccttgaggggttttgtgggtatcagggccccagtgggcgcagacagagagcccaacacagtctgctgtgggttccagctgctgagcagtccagtcttggcccagccctctcacattcctttgagccccatcttgcctcctctgccctgcaccctaggaacactgcactgagatcccttctctgggctctgggcttccctgcctgtgtcccctgtgcatgctctccctcagatgcatcattagctggctcacctcgtcctcactgcctgcccctagaggccaggcagccccccgcccccaggcagatgcctctagggctgtttctgccccttctccttagcagctctgcatgtttttaaggagttcttgacagatggtccctgttgcctccccaggatacctaaataaggttgaacctgaccacacatgatagcagggctgagggtagcatctctgagcatgttgtcagcccccaggatggtacattgtaccctttgaatcccagggaatccctgggttcgtcctggcttgtgagaaggatgggtgggggcatggaggatatactgagaaaggctaaatttgactggagccactgccacttggtgactgtgtgcagcaagctctatcttgtcttctgtttaggctttgagctgggctatgccatggccagccccaatgccctggtcctctgggaggcccagtttggggacttccacaacacggcccagtgcatcatcgaccagttcatcagcaccggccaggccaagtgggtgcggcataatggcattgtgctgctgctgccccatggcatggaaggcatggtgagggctgcggtggtggctggtggcttggtgggttctggcgggccttgaaggggcgggatggaccctgggccccttgtcgggttggacggtatatgccttccaggcccctggagcacgtgggtctgtgcagggtggggtctgcacatgtgcatgctgcagctgctgagacgatgatgctacccctggcagcagaaggcgctaccacgtatgagtgcttgctgtgcgccaggcactgttcaatgcttctgaatgttaactcttccaatccatacaacttaatgaagtaggctgtgttcctgcttttcagatgaggaaacagaggcacagagctggggagtaggttgcccaaggtttcacagctagtagctggggtttgaagctatcctgtgcagtactgcctgttctctggtcccctcctgtatgacctgcctctgcagccacacatggggcagagggaagacatgcaggctgggtgcatcctccggaggctcctgggctagcaggaagggaggaaggagcagggtgtcatgtgataccatctggtgggcaggtggcctgaccaggcagaagggagacaggcagggggctcattgccaccattatccctgagtggcatgttatgagcactttacaggctgcatactcggcatcctcacaacaccgggtatcagtgaggagggaggtgaggctccctgcttggggctgcctgccgtgaaggcagcttcttgggaggccagatctgggccaggctgggtgtggggggctgggtccttggccgtccccaccaagagagggcaagtggcagctgtgcagtgggtcatccccgtcctgcaggagctggcttggagatgcccctgggcttgtcttgctgctttcatggagcagagcggtccgtgtgggtgagggtgggcgaggcccaggccgagttgggttggcccctgcctggctgtgtggtcatgggtggtttcttaccctctccttgcctcttcatctgtgcagtggggaagagtgtctgcatcatggggctactttgggggttagcgataaggcgtgtgggattcctagaactctgcctcctgtacagcaggtgctcagtcagtggcagccactgttccaggacattccagagaaagcacgtctcagtgcgggctttttgctttttcttctgtccctgcaagttcacatactgtgctagctctgggcagaccccactctgaggattcccattctgctcttgttccacattcttggttcttttctatggttcaggctccagggtgagggcacctctgctgagaagccctccagactttcccctgagcctggggtccctgcagggccagatgtctttcccatggtggggtccagccttggctgtctggcgtttgctttcagggcccagagcactcgtcagcgaggcccgaaaggttcctgcagatgagcaatgatgactcggatgcctaccctgtgagtgttgctgctgtccccaggacagggacgcgccctattgtgcccacagggctaggggtccagggtgtgggtgcagcagacagccaccctggccatatgcatctcgtccccacaggcattcaccaaggacttcgaggtgagccagctctatgactgcaactggatcgtggtcaactgctccacaccggccaactacttccacgtgctgcgccggcagatcctgctgcccttccgcaagccggtgagtctccgtcccagggcaggggtcacaggcagggggcctggccaggcagggccagctggcagctgggcgtgtatttcccttccagctgattatcttcacacctaaatctctgctgaggcacccagaggccaagtccagctttgaccaaatggtatccggtacgtgcctggcctgggtgtgtggggtagcccacaatggggcggtggcccattgtgtggcttctgcttctggggcttctccaacctcccctctgcctgtggctctgctgacctgcagcagctcctggcatggtcccactagcagtagggttgggaggttggcacaatggctgacctgggccagctcaggtcatgtgggttgcgtccatggtagagtccactggggcccccttagaccctagcagggctggtcgaggcctggcagaggcctgctgagttcgcaagatattgagtatcattcattcatttgtccattttaaaaattcatgagccaaacagacattacaggccctggggtcctggtgtcccctccaggagtctttggccttatttccctgggagtcagatcagataaaacactatagttgcaactgagaggtgactatgtccagggaaggacaggtgtgaggctggtggagcagagctgtcttggaaaatggtcctgggcagtagagggagggctgggaagggcctcagcatggacaggggttggattttctcccatgtgtgtttggatgtcccctctgtgcaggtgggcagctgttagagctctgatgtcgggactggactacctgggctacctgccctgtgctggcttctctcttgagggcctgggatccatttgtcctctctaccccagagtcttcacctgagatgcagggatgtgaggacactacagtagcttcctgagaggttttgcagtgtgcgtgacctggggtcaggatcatgggctcaggaaggaagaatggttggggcttggaggtgaagctcagctgccaggctgaaagaggaggagcatgcagcagcctcctgggacatctgcttagtggtgggggactgcagtgctctgcaggaggtgggcgcagctgggcagaagcaaggttggggcaaaggatgatgccatcatgttgccttctctgtctccttcagggcgcttcttattgtacccccacctccggtcaccttaaacgtgatgcttccagggctcaacccttgggtgtctccacccctctccctatgacagctcagggtgtcatctgccccctgctccatcttttagttcaagaggtgtccactgcagccacaagtccaaacctgcagttagtgtcagtggctaaggagagcctggggatgcaggcctggtcctgagctgccccagcccctctgggtaccaacgcctctgccatgtcctgttggtccctcagggaccagcttccagcgggtgattcctgaagatggggccgcagcacgggcccctgagcaggtgcagcggctcatcttctgcacgggaaaggtgtactatgacctggtgaaggagcggagcagccaggacctggaggagaaagtggccatcacgcgcctggagcaggtgtgcctgaaccccttgtacagtcaagtgatgggcaagctcacgtcgctggccccggctctggccaatgtgccaggcaggccagatgaaggccggtgaggccctgtgcctcctgtccgggggtgctggggacataccgcccctcctctggctatgctcctttgtttctgcctccccagatctctccattccccttcgacctgatcaagcaggaggcagagaagtacccaggtgcggagctggcctggtgtcaggaggagcacaagaacatgggctactatgactacatcagcccacgcttcatgaccatcctgaggcgcgcacggcccatatggtacatggtggggccgctgattgcccctcacctcggccctgaggctctgtcctggctccatctgtcccataggccatgctacccagaactggccctgcccttctctggtgatgagcaatgatggggcatcatcagtactggctttgtgtttgttctgcagccagaactgtattaaggaacctgctacatgtctcaaaactcctgccttagatcttaggccggttatgtagtccttggagccttagtccctgcatctctacaaagggcggtgataagattagatctgatgtatgtattagctctggcacatggtgcgttcccaatactggcatcatgtgttcctgggaagatgggagagggtcctgagaaactccaagaagccaaaagtatgtttgtccccaaagtctttgagttgttgcctcatttgttgtcctcatgggcaagtgcagtgacatggagggacagtttctccccactcttctgtggctaggtgactgagtttgatccgggctttgcagctcattggaagtggtgccagggccaaaaggcagggtctatggcttcgaggtcagcggttctcagatgcgtgccccctgcagtcccggagtgagggcagcggttggggggcggctaggccccgccttccccttagcttgtctctcctcctccaggtatgttggccgggacccagcggctgcaccagccacaggaaacaggaacactcacctggtgtcactgaagaagtttctggatactgccttcaatctccaggcctttgagggcaagacattttagagctgggcaaaacctgtgtaggtctcgctgtgggtttgctggggaccaagggggtgatgaaaaggggaggggcggagctcctgcccaggagaggggctgtggggccccaggataaaacagacacagtgacagggccaagagccagcactgctggccttggtgtcatgccagaatctaccaggactgagggagccagaggagtcctataggcaggctactgtgctggagcatcccccagctgctcccatcttgctggaatttcttgggcggcttctccacctgtatctcaagacagacacccgggggcctgtgtctgtggccgctcccatcccggcagccctggctgctgctcgccccaccctcgcttatctgtagattcaaagcgatgttctcttctgtgctcttagaagtagggagttcagcagtaacagccaggtgaagcgaacctgctgggtgatttgtttgcgctctgttttatggggcattcctgcgagatgtgtcagcttctgtgtgaaatgcagccacagctcatgtgtaccaaagtagaaaaccaaatcacagagaaataaaaacatgcttcagagag

SEQ ID NO: 54 - DNA, 16521 bp, Homo sapiens
  source 1..16521: mol_type = other DNA
gccgccctttcctctttctttcgcgctctagccacccgggaaggcctgcccagcgtagctgggctctgattggctgctttgaaagtctacgggctacccgattggtgaatccggggccctttagcgcggtgagtttgaaactgctcgcacttggcttcaaagctggctcttggaaattgagcggagagcgacgcggttgttgtagctgccgctgcggccgccgcggaataataagccgggtacagtggctggggtcagggtcgtgtctaggggacggccgagggcctcggagggcgagtattgaggaacggggtcctctaagaaggccggactggaggtcagggatctgcgcggggcccggctgggcctcggggggcggtgggcagggccttcgcctgggtctggccgtgtgagccacactgggctggctttagagggaggctatgggagcccagcctggcggggttaggcggcgtgggggtgggggttcggggctgcagtcatgagtcgaggtcggctgttctcaggaactgcctgaagaggctttcgggtcttgattgaagcaaaatccgctcccccacgctgagcgcctgcggagtagcaggctctttcctgggcccggcccctgcgcgccctgccatcccgcctcgggggtgggaaagtgggaccgcacctgggccaggtacaggcgcgggtccctagagccaggccgccctgagaaaccgatcctggaactcgtgggccttcttgggcttgctctgcccacggccccggcccacctggagctgttaagaacagtcagcccaggcacttaactctcatgagcagtgtagtgcagtttttttcatttaaaaagatacatctctgcttctttctggattgatttttctttgaagatgaatgtgagaaatagaacttaaaggtctattctgagtgtgctttataaatgattttatcatcagtgatgggtgttagaaaaatctaggtaattatgcctggagttctgacgtttcattggcaaacttcagaggaagtcttgaacttctggttgtcagcttttttttttaacccattcattgtgattcaagtataccgtttttctgcttagtccttgacattgtttaggttataattagaattttatctgtggaattgcacttttcattcttttgttttacggtgcttaagtgatatttcctactcttggaaaaagtaccttgaaagtcttgagcatgtttgtctgtgacctcagcaagcagaggaaaaagattaaaattgtcacgtgggcaactgtaaacacttaaaatgtttttgtcgttttaaacaaaattttcctaatgaacagtctgaacacattttagttctgtcctcataactttaaaaaataatgttttgaataaaattaggagtatcataaagcggtataaatttgttgaaatatttgggtataactttggcacacgcaggtactactttaaagtgtcacaaaaagggaacataattctggtttttgtttggaaagaatagacaagttgatacctgaatttgagggttattttgattggaagaagctaaatactacactagtatagaatatacacgtttccaatgtctcaggagtcaagaaggatggaaagttattgtaggagtccttacccttgtaaatattgtttgaatgtaattaatatttatggaatacttatgctgcagtaggcactgtggaaaatgctttacatatagtgtttcattaatgcttaaaactactcgagttagtggcatgtaattaagtcagtttttccttcactttaggatctaccatacccattgactaactatggaagattataccaaaatagagaaaattggagaaggtgagtggttttagtaaaataaattttatggaatgatttaacaatgctacaacttctgtaatatgaacacatttaaatatttattaaaattcaaccattaagttgtcttgtagtaccagtgtgcattaacatatgttctttacttaataaacgcaaatttgctcacatttcaagagaattgaaattaccgaatccctaatgaccgttcgcctcacccccatagtcttacagtcttctgatactaaacacttatagtagtacttgtattttgaagacactattgataacttgcatgtgtgttgaggggcagaggttagggctgcagaattatgctaacttcataatatatttttagttttagtctctttcaattgtttttaggatgataaatatttttatccagactttatagactggttacaataattgacttaatctaatttaaataaaatttctatttagttaccctaagtataaatgacctgtcatatagacatgtttaagctattctaaaattataacttatgtatataatccttccctttctgtggtacttgaaggaatgtttagatctatatatggcacaaatgaggggtatatcccttcgcctgttcctcgactccagcagaacattctcgattctccaggtacaaaataatttgctaatagaatccagtttatataggttctgccagaagaaaattcccaactatatttttaatgtgatcaaagaccccacttgacaagaaatagtgaaaaacaagggggaatactggagggaatttagtggaataggagtgacaagttagtgtggtgttcgattggaggtgtgtgtgtgtatacatatatatatatattttttttttaaatcacttaaatacctcatacccattctactaaacaaattttgctgctgaattaaaaatatgtgattagtatgtctaatgctgtgtagtgtgtttcttaaattcccagagaatttgtgttggttttagtttggcataaaaagagaccttcttaaagtataaatatatttttctttaagatgatagaactccaaacatacaggagactgcagatttgacttctgagaaaagtactttaattgctactagaaataggagcagttaaaagaatgtaattttaaatttaatccattacatacatgtaagtcataagacttccattctttatttctagcagtgtgacagtggtaaaccctcttaacttttctggatctcagtttctgcctctgcaaatggtgataattggacttaacacgaaagatatgattcaattgaacaatattatggaaagcatttgttatgagcgctttaactcagaaaaccttcaaatgtttatcatttgaacattgtattattactatgaacactgtctccaaaaccatctcttcaccagctccatctaatgccacttaactcttaatttggatttctttgatgtcctcaaatgtatcctgtgatttggcctatgagttttggcaatggctgttctttctacctggaggccagtttctactggcttcattttttatctcctcctctagtccaagagcattttgtagttccctttgcatcataccataggatccttgagggctggggtttttgtcttgttcacaactgtttgcccactgcctatcagtagtgcccaacccacaggagatagccaaatagataataataacatctgttttccttgtttgctcttctgaacactgttgtttctttttctggcttgtattgtcatttctactccaatgcctgattgttttggattatgtgctggatattgttttggaaaaaggaacttgtggaaataaatggaggcctaaatgattcacacagaattttcttttggttctgccaggtatctggttaaagtctagtattaaaatactactttaaaagttatattttttcccctcaacttttcattttgaacatctccaaatctatattgaaagatttatgcaatgaacttgtaatatttttaccaagatgttggtgttttgtcatgtttactttattatctgtatgtatgttagcattattttttatttttttcattgacattaattctgatttagaacagtctctgccttttctctcacttgacagtgagtcttgacaacctaattcatttcttaaatacctccagactttactattttaaatattacaaaaattgttctctggtttcttctgaattacagaaatctgagtgttgtgatactaatctttgaaatccttcctgtcttaagaaaatgtctttttggatcatagagtagcagtatccatgatggtggaaccttgcctggcatttagtaggcatttgataaatacttgcttaatgaaggttttctgcttaagggcctccataacttgatcatatcctacatatttttcttttgtttctttttgtttcctgggataaatcttccattagacttagactgatctccttctaggcttacctgtgttaatgatttttgcctccttagttatttatacttagttaaataccctagagtatttctgtctttagaattcttagttcattttggaggatatgccatgtatttcaaaaataattttggatgattaaccaatagaaagttctgctttgtttaacccctcttccagtagttcagtgagaagtgatattatctctaaaattcaacacattgagtgttggccactggttaattgttaattctgaaaattatttaggattagatgagattgtacacttgagggagaagaaaggatgctagaaaaaaaattagttctgaacttaccattaactgtttatgtgactgtattatgcaagtgactaattttcctgagatcacttaaacagtatgccagatgattgtgctactggtttacctactttttgtgtttaatgagagctgaatttacatccaaaaaaatgtagattttaagtatatgaaggttgcctacttttaaggatggctgtgaggattaaatatagtcaattctcctttaatgtagagtaattttggttatcaaaaagttatacattaatccacaatttaatcaaaatagtataaaatgactcatgtcagtttatagttttaaaatgacaccagtatttaagaaaacatagacttttgtatagaggttctgtcaaaaaaattaagcttaagtagcatcaatttgctactgctcaaactgcttaattttttaaccaagcagttggtaatttgttggttgttagccttttttaaaatattgctactttcagagaaactcataaaagctatagaagaggccttcttcctagaacagtgcactctaatcacttttgaagttaaaccaatgccatggaaagcaagctattcaacaaaattttgtgtgtacttaaggggttcaggacctccctaaactccaactcgagtttaaaaagacttatctagggaattcagccacgtatatgacagattttagctagtcttctcccttattgccatttcattccctgtatccacctcctccctccctgctatcccttataattgatattgttgctcattacctgaagcccatatatcaaaatcagtattttcatcaacttgcaaatgggtgtgaggctttcctaatatgtagtacatacaatgtgctttattaggtttaatacacaaacacctggtcttttttctccattcttttgagaatgaggactgttgactgtattttgagatacagataaaagtgttttgaaaagcataaagcactctacagtattttctgaaagtgtcataatgacttttatcagtaatatttcctgagcccaaatttttacactatattttatgcccacttcgttgcagggtaggatattgacagaaggttaattttaatttgcaaatgatctattttgttctgtaaaatatgctggaacattaatggtaatttagatgtatagaaaacttgtgatgactacatgaattttatttttaagccatacagattgtagttactctcaatttctttttggaagcaatgagggtatgagtaagatacttcccatatggccacaccagacatttctatcatgtgacccttatgggattcaatgatcttgaaatcctttagtttgaccaggtgcggtggctcacgcctgtaatctcagcattttggggcggcgaggcaggtagattgcttgagctcacgagttccagactggcctgggcaacatggtgaaaccccatctctaccaaaaagacaaaaattagccgagtgtggtggcatgtgcctgtagtcccagctacttgggaggctgccgtgggaggatcccctgagcccaggaggaggaggttgtagtgagccttgattgacccactgcactccaacctggacaagaaaacaagaccctgccataaggaaaaaaaaaaagaaaaaaagatctttagtttgtggggtgtgtcacacagcatattatttactttgtttcaggtacctatggagttgtgtataagggtagacacaaaactacaggtcaagtggtagccatgaaaaaaatcagactagaaagtgaagaggaaggggttcctagtactgcaattcgggaaatttctctattaaaggaacttcgtcatccaaatatagtcaggtatgttgtaatatctgaatgtaagccattttctgcatgctatttcaaatataaatttcaacttggaaatctttacatttgctcaatttcttggtctagccttactgagtggactagaaccctatttttggtagttgagaatgccgcacatatgtaaaagagaacaggctgttaaagcaggaacagagttggaggagctgggtgatgtagattaatatttgggcctagaatagcaaggtaaattggccatgggagtaaagccgttttcatagagctttgtcaactctctcctacttggggagctctagttcctgaagaccctttagttagagtcttaagaaaagtagctaggtcaaatgaaaaagattttttttccttaaagtatttgcattgggtgtttttggagacctgtcttcctaacagtccaagttaaaatctaattgtacttggctggggctagagattggaagtagcttttaaggtcagataccactttaaaatttatttgtataattcacttcagtgaaaaaataagctctcagcaattagtagccaacctagatatgttcttttgaatacaggctccttataaataagcacctcctgtacaaggcttaattttaaatagttgccctgagattcctttcttaaatttgagttttgagtctcttccattagggaagctactacgtcttccccagtttttattatagcaactgaaattatggaaggagttttattttgtgaaacagaggtcaaaaatgtttgctggattcttctctcatatattttttttccccagtcttcaggatgtgcttatgcaggattccaggttatatctcatctttgagtttctttccatggatctgaagaaatacttggattctatccctcctggtcagtacatggattcttcacttgttaaggtaaaagcttaactaattttattaatatttatgcactgtggatataaagggactatatatagaagtccctgcattttgtgggaatatgcttggaaaaagtgttagaataagaaaaagtatttcatttttctccctcatggttagtttatacaggttagagatacccatgttattaccagatagtgtttctagtaagtaaaaattagtgcctgagataacatagaactggtaggtattgttggaagctagggtagtctggtctttctttggctgtcagatacatgtaaaacaaagtaatgaaagcctagggcagagtggtggttgtaggtgttttattccagttttgaacatgttttggtcaatttattgtagacatttattatatttcaggtaaattataaaattgtatagttttaagtactgaagtatataaaagtgtcttattcttgcaccagttctaccaaaccactctgcagaggtagcgctgttagttttatttgtaatcttacacttgtatgtatgttcactttgtatgtatataaagatttttttttttacacaaggtggacttatttgcatatgtatatatacatattttcccttttttgtgtaaaacattatcaagacgtagatctacctatgtctatttacatttttgatataattaaaccacttccatattgatgaacatttaaattattttccaacttggttattgttgctcttattaacagtactgcactgaatgtccttatagatatttatcttcgtatgcaactttataggataaatttttagaatgggaatgatggattgaagatgtttatttacattttgatagatattgccggttgccccctaaaaaacttgtagcaatttactcttaaatactcatggtgtgtaatacttattgttttagtacatcattgccaaaacttggttttatcaatctgttaactatgtgaaaaaggcatattaagattgttttaattttatatttcatgacaatttaacacttcatatttagctattataaaccgcctatattttcgttaggatacgttctttaacaatcttgcatgacttttggactttctgcttttatgtcttgcttaagtcttcctcactcaaagatcgaatgtattagaataatacatgtcagtatttttctggtagttttagtaagtcctgtcttccacacatactttttttgtcttaaattctgtattaagatttattttgacttaaaaactgggatacagattctgctttatctttttccaaatggctagccagttgttctaactggttttatgtacaggcaacaatggttttacttacaatttttcagttttacaatgaagcagaaatgatgcacattcactagaaaccatacttcatttacccatacaaccattctgttttttcactttcagtacagtattcaataaataatgaggtattcaacacttccaactatatgctaatgtaagtgttttgagcacaattaaggtgggctacgcttagctacgtttggtaggttaggtgtgttcaatgcatttcgacaaggtattttcagcttagaatgagtttaaccagatggatcatccgttttgttttgttttttgaacaccacttgtccctctaagatggagcatctgtattactttccaatttcaaactgtaagtcatttttctgtgtactttgtttttgtaatatccatgctacttcagatgtcaatgacattgtctttggcaacaaatgtcttgtaaagcacttttctctgaactaagcagcattttatgataattttatccattgaaatatataatcataatatctttgccatcacttttagaatctaattttttcaagaaggaaatgaatatgtaaaaatgaaagatagaaaaggccaactgtattgaagatacaaaatagagttggtagcggtatatagaagaaaaatcaagaggcttctgtgtagaaaaccaatttgtaatttaaggatcggggaccaaaaatgtttaaagactaaatgtgttcacattactatagatatgtctataaggtgaagattcttttcttaggtatacaaatgtgatgttgtatataaatgggcttcccacccacaaatgcttattagcctaaaatggcctgaaagctctagtaattaaattatttctctgcgtcctaattttttgtctttgaaacagattatttagaaaatcatgtacttcgcttaagtttctaacttttacttgctttttccagagttatttataccaaatcctacaggggattgtgttttgtcactctagaagagttcttcacagagacttaaaacctcaaaatctcttgattgatgacaaaggaacaattaaactggctgattttggccttgccagagcttttggaatacctatcagagtatatacacatgaggcaagtggaatagtggtttttgatggcttttgaatgtgtgtgattgctagattattttctgtatttgtgaaagtcaagaaataactcaataaaagatatctactctgtggcagtatcaatttattgcctctcagctccaaattcattgcatgctatgtgaaaatggaactgaagcctttaagtattttttctttaccagctgctatgttgttaaggtagagggtactagagggacatggcaggaggaaggagttttcctagctacagtttttacattttcattattttttactttatttatttacatcattcccatcctttgttgtactttaattctttatattaaactctccccattcaaatcaccaccttggtttctgtctcctgactgaaccctccctgattatagtcagattgattcaaagacaggttttgttccttaaggtatattatttctgatacatttaggaattgctaactataatttatgtttgatctgtgttatattgctgacttggcatttagtgtttctgaaggaaagggaacattgtataataaaggattattgaaaggctgtcttctgtggagttgtctacccttgacccaaagactgtctccagatcaaaactagtaacagtgctcatctgattagatgtcttggctgcttgttagtctttatcatttttttacatggctatataaataaactaagattattttgttttctttgtcttaaacaaatgctattgacctcattagctttgttctaacaggcaatatttttaccatatgataaatatactaaaatggttggttagttctagatcactaatctgttatttgacttattcacgttttttaaataatttaaaaatcattttttatcgacgcattattatacatatttatggggtacagtgtggtatttggatacatgtatgcaatgtgtattgattaaattggggtagttagcatatccattgccccaagcatttattatttctttttgttgggaacattcaaaattctttgtttgggctatttgaaaatttacagtaaattattggtaactgtagtcagcttacagtgctgtagaacactagagcttatttttccttttgagctgtaattgtatccataaaccaacttatctctgtcttcctctactaagccctgaataaccactattccactctatggccattagatcaactttttacgttttcaaatatgagtgaaaacatgtggtatttatccttctgtgcctggcttatttcatggctcatccttgttgtcataaatgacagaatttcattctttttttatggctgagtagtattctagtattccattgcgtgcacgtatgtgtgtgtacactacattttctgtatgtgtgtatgtatacaccacattatctgttgatggaaacaggtcgattctgtatcttgactattgtgaatagtgcttcaataaacatgggagtgcagatatctctttgacataattgattttatttattttggacatatacccccagcagtgggattgcaaaattatatggtagttctagtttgtagttttttgagcatcctctaaacagtttttcataatggctctactaatttaagagcccaccaacagtgcgtaaaaagttgccctttctctgcatccttatcagcacttattttttgtcttttgatgataattactctaactgggtgtgatagctcattgtggttttgatttgcatttccctgatgaatagtgatgttgagcactttttcatatacttgctggtctttgtatgtcttttgagaaagttttattcagattgtttgaccatttttaaaattggattcttactattttttttattctggatgttaattctttgttgtatgaatgatttgcaaataatttctcccattctgcagattgttgcattattctgttattctgttcattctgtttcttttgctgtgcagaagctttttagttcgatataatcctgtttgtctatttgttattgctgagacagggtctttctctgtcacccatgctggaatgcagtggcgtgaacagggctcactgcaacctcaacctcctgggctccagtgatccttccacgtcagcctcctgagtaattgggcccatacacaggcatgcaccaccatgctaggctgatttttaaattttttagagacggggctgtcagcatatttcccagactgttctcgaactcctgggctcatgcaatcctcccgctttggcctcccaaagtgttgggattataggcatgagctgctgcacctggcctcatttgtctatttttgattttgtttcttgagcttttgaggtcttatccatatgatttttgtccagatcaatatcaataacagtgtttcctctgttttcttccaatagtttcatagtttaaggtcttatttaatccattttgagttgatttttgtgtatggttagatataggggtttagtttcattgttctgcatgtggattatccagtttttccagcaccatttattgaagagattggcttttccctagtgaatgttcttgtcatctttctcaaaaatgagttgactgtaaatacatggatttatttctggattctctattttgttctgttggtctctgcgtccttttttatactaatatcatgatgtttcggttactatagctttgtaatacatttttgaagtcaggtgatacgatgccttcagctttgttgtttttgctcaagattggtttagctattgtgggtcttttttggttctatatgaattttaggatttctttttatttctgtgaagaatgtccttggtattttgatggagattgcactgaatttgtagattgcattgggtggtaatatggtcatttttatattaattcttccagttcatgaacatgggatgtcttttttgtatcttcctaaatttttttcttcaatgttttatagtttttagtgtagagattatacatctcatttgttaaatttattcctaggttttttgtacctattgtacattagattgctttcttgatgttatttttcagctagttattggtgtatagaaactattaatttttgtatgctgattttgattttgtatactgcaactttgttaatcagttctaagagtttttggtggagtcttttaagtttttctatatataagatcatctctgcacacagggacaatttgacttcttccttggcaatttggatgccctttatttctttctcatgtttcttattcatgttataatggtactgttagtaccatcttagcaagtaagcagtacctgcactttgttcagtgtcaccccaaatctattatcaatgggtttggtttttcagtggggggaagataaggctgtataactgtcttgatctttagtgatttgaaaagcaaaaaaatatttattatgcttttatctgttttgtcttctaatgaatagaacttagaaatgaaatatttatcttcaattttgtgtacctttaattgacttaaacaatattattggtggcagtcatacaacctttaaaggacagccctaataaaaatataaatgtttaagtgtaggtaattttatgcaccacatttattcattgtaaaaatttgctttttaataggtagtaacactctggtacagatctccagaagtattgctggggtcagctcgttactcaactccagttgacatttggagtataggcaccatatttgctgaactagcaactaagaaaccacttttccatggggattcagaaattgatcaactcttcaggattttcaggtagctattaaaaactgagataataaaggtaacatatatgtaacaatgagattacatttatgctttaagaaatttttaatttcctgttttttagagctttgggcactcccaataatgaagtgtggccagaagtggaatctttacaggactataagaatacatttcccaaatggaaaccaggaagcctagcatcccatgtcaaaaacttggatgaaaatggcttggatttgctctcggtaaggagtgcccttgatactgactttcaaattattgatgattctgaatatattcagttctttgttttgcctagaaaataggaagaacactaacatttttgagctaggtgtctgttatgtacattgtattatactagcttcattttagatatcaggaggcactagtggctttgagaggaggatttagcattagtttttgttttttatctgacaggtagctatggatattctgagggagaagccaggattaatacacatttttttttttaagttgctgaattgtagtggctctcctttctagcatttttgtcactattgagccctcttagtttatgctagacgtgtttttcttattggttgatattttaaattattaaagccatcttctgaataagctttattcgcactttgtacctagtttctccatcagaaggatctattgctataccattgtatacattttctcattggtcttcgggttactttcagagtgtaaagactccttatgccacaaaattaagcttagatttcccccaaatcaaatactataaatcagattccttagtctagccacaattgacatatcttggagtggataaatctttgttgctggcattgttctgtgcatcataacttgtttagtggcatgtcatcactgtcttctactctctagatgccattagtatactcttcacagttaggacaaccaaaagtgtctccagatattgccaaatgtctcctgatgggcaaagtctatcccagttgcgaaccattattgtaaattaaacttggtttcaaatttgagctttattccttagctctgggaacttgggcaagttacttcccttcgagcctcaatgtcctcatttgtaaaatgacattaatacctacttttagctgtgggaattgagtaccatgatttatacaaagcagtttgtatggtgctggttacatgagagttcagatggtaactagttagtaaaaaatctctagtgtgcttgttgattttattttattttagtatttcttaaagatcaaatttaacatcaatcctaaactttatttagctttttctggcgcgtaaactaacatactaagttgtgtgactataattcatttagtgactcatttttagctatttttataacacattgtgctatggggggttttggaacttgctggaagctacatcagaaactgccatagttaattgccatttcaagaatgttgtaaataactcaggtggccgtttaattctcaatgtaaatataattaactagacgtctttcctatatttgtgtctcagttttaaagctatttctggatgcttgagtcttaccgtaattgataacaaaaagaggttattgagaatatctatgatttacagagtaagttattctagacctcaagagtgaaatgtaggggaggagacatttgtgtgttaaactaatggaaatgctcatttaatagatattcactgaaagtattagttttggtttattgctagaaaagttgaggttttatggagatttttgtaaaaaatggtttatttcctaaataaatatctctttttcttttttctcccagaaaatgttaatctatgatccagccaaacgaatttctggcaaaatggcactgaatcatccatattttaatgatttggacaatcagattaagaagatgtagctttctgacaaaaagtttccatatgttatatcaacagatagttgtgtttttattgttaactcttgtctatttttgtcttatatatatttctttgttatcaaacttcagctgtacttcgtcttctaatttcaaaaatataacttaaaaatgtaaatattctatatgaatttaaatataattctgtaaatgtgtgtaggtctcactgtaacaactatttgttactataataaaactataatattgatgtcaggaatcaggaaaaaatttgagttggcttaaatcatctcagtccttatggcagttttattttcctgtagttggaactactaaaatttaggaaaatgctaagttcaagtttcgtaatgctttgaagtatttttatgctctgaatgtttaaatgttctcatcagtttcttgccatgttgttaactatacaacctggctaaagatgaatatttttctactggtattttaatttttgacctaaatgtttaagcattcggaatgagaaaactatacagatttgagaaatgatgctaaatttataggagttttcagtaacttaaaaagctaacatgagagcatgccaaaatttgctaagtcttacaaagatcaagggctgtccgcaacagggaagaacagttttgaaaatttatgaactatcttatttttaggtaggttttgaaagctttttgtctaagtgaattcttatgccttggtcagagtaataactgaaggagttgcttatcttggctttcgagtctgagtttaaaactacacattttgacatagtgtttattagcagccatctaaaaaggctctaatgtatatttaactaaaattactagctttgggaattaaactgtttaacaaataa

SEQ ID NO: 55 - DNA, 32744 bp, Homo sapiens
  source 1..32744: mol_type = other DNA
cgcagtcggggggaggcggcggcagcggcagcggctgcgggcagcgcgcggggcgcagggcgcggggcgatcaccgtcggggctcgggaggcgggcagtgggcacaggctccccggtgcccgcccctccgctgcggaggggggccgcgagcgggcggccggggaggggccggcaccgccgccacaaaatgagcctgctgtcggccatcgacacgagcgccgcctcggtgtaccagcccgcccagctgctcaactgggtctacctgtcgctgcaggacacgcaccaggctagcgccttcgatgccttccggcccgagccgaccgccggcgccgcacccccggagctggccttcggcaagggccgccccgagcagctgggctcgcccctgcactccagctatctcaacagcttcttccagctgcagcgcggagaggtgggtgcccccgcgcgcccccgcccaccgccccaccgccccaccgccccaccgtggcgggccgttccctgtctgacccgctcttcctggcctggcgcggcccggctccgcattgccgggcccggcttggcttggcttcgttcaactctgccaaactcgccgcccgaagtccccggggtgccgggtgcgcgtcacctcccggctgagcccgggctggagcaatgcaggccggggcggagctctcccgccccctctccctgccagggcagccctgctccaaaggggttgggggagggagttgaggaggggttgtctccggattttcttcagacagctggggtgcggcctgggcggggagccccttcgaagtgtccttctcacgcccaaccttatcctcgtcctggccaccgcgggctgggaccgagagtgcagattctgctcggagctcctctggaagggcctaaaatcttttctccgacctctgcggttcccgacccgaaaggcaccctggagagcagtgactgcccagagggcttctcctgctgttctcactcggggaccccagatacgtcctccagctgctcgccctcccccagccacataggaagtggtttctgagggcttgaccccacagactgcgctgtccccagccctcccagcctcgaaggaaatgaaagggaaatcctcttgagctcttgggaggggggctagaaagggggggggagaggttccagctgcccagcgccttctgcagaaacctgggccggctgtgttgcaaagtctgcctgtttggtggattcagttacaaagttgactgggcagcgcctctttgccagcaagataaatacacagatcgccaccacctcccagccctttttgaagagtctccagggcctgcccagataccactcctttccgtgggctggactcctcccctccctccatttactcctgcctcatttgggaatttcagacacccatctgtggccttcacttcctccccttgtgggggttttctctgcaaagatgcaagaggtgtgttcgggggaggacacacatgggggtcactttccttccagacctgggcacaccggtgagttttaggagagtcagagtcctgaatgggttggggaggaaagcctatgtacgcaagggtgtgctgggggtaagagagggaggcagagggtcgcccttgagttcaactctgccattatttactaggggaggcatggacatataaaatgctggcccaaggccaacactacccaggctgacctgttgacctgggtgggtagaacaggcgtgggagggggctgggtgcagaggaggaagatgagtctgaaagtgcaccctttggtgtcaggcaaaagcatttctatgccaaagctctttgtaaactgtaaagcattctctccacgtgaggaatggttcttggctggggatctttctttcttgtaagagacttttctgcctcttcagggaattggcttcaggtgaccagtgactggaggaccgtttgtggggtgtttctttggtgcatgcgtcttttcagttgtttgttctcttaccaaacatttgttgagctctgggcaggacccggggattcacagccacaggctagtgggggccacggatgagtaaacagacaaggtgatagagggtatgaatggtgggtgatttgatgggggtgcttgtgggagccccacgggagtttctcaccctgggagaagggtgaacatgacccacaggtcaagtgtggacccctaatcaacctcttctagcctccctctgctccccctaccatggtggcattgttccccacctgtgggtctcccctgagaggacctgggagtttggaaccatcaagagtaccctataagaataggatgttgtgctgctttttgaaaatttctggcatccaggatcccaaccggagctcagtgagaactgccctctgtcacttcattgctgcgtacctcagtttccccataaagtcacacagtgtgaaaggagcaggaaaaggttatactgtatagtgcagtggtggggaaatgtctttcacaacctgacttcagggaaccccgtctctctctgggccttagcttacctatctgttaaatttagtctctgctacaccccaggatggtatatctatagtatttgagacctgttcaaacaagagagggctgggggagtcaagaggggcttctctgatgttcacaggccagtggcttcctcggaggtgatggagggctgtgcctgctgacttccggaaggctctcttggcttcaggctcactcatcctcaccccccacccactttgcctcctaaaccctctcaaagcctcagctgtgttcctgaggacaggcctttcctgcgcccagggcttagctggtgacctaatatggctccaaaatagcaactggctgagaaggcaagaaaaaataccccccaccccaatgccaccaaggggctggtcggagaggaagcaagtcgtgtgtgggccggaggggactctacggagggacccagggggcccaggagcatcaccattctgtgcgaggcctggcaggcccagtggcagtgcctgcggatgtgacttgcatgctgaccactgaccacggcctgtctgcgccaacccctgtgccaagagcccaccccctcctgcaccacccccaggctgctcccaccacaatagcaaaacaccatgaatgcagctgggatttgagggggggtgaggacatgggggcacagaagcccattgtgcccctggaacctcagctctggaagctgaagataagccaacggttctgagtggcacactggccctgagagcagagagagagatggcagagttcacaccagagttcctggtgcaggagcaagcaccaggaggtgacttggattcttgtggggacttcccagcttgtggtgagggtgccaggccaaagcggacacaagcaccttgcacagtttcttaaaaggcttctgggtctacaaactaggccccgtgaaacccagtttcaaaaacctgatctacggcaacaacgatacatttttggaaagggattcctaaggcccttggctgagccccttctctctctccaggtacccaaggaaggcagttcttagatggagtaggggctgggctgcatggggtcttccctgccaagtcttgtttggaacttaaattcacaaccgtaaaggggctatgggagtcatttctggaaaagctgagttacctccttgtgaagatggcctcttgggccccttgaagggctgcccagagcccctgccaggtagtccctgtaccctccagcctccagggagatgtggctgtctcactccattcaggtagaattcttagggcagctgttctctttccctctttctccagggacagacgtagctggaaggtgtggccctactgtcaagagacccccactttgtgaatgttgggggagggactttgtggtcaaatacatttggaagacacagtgtccttcctttcccttggaaacacacagtgcccactagcacaggaaaggccctgagaactcctgcagtgcaaaacctgttaacctttcttcagcttgacagttcccacacctatttgagcagagaacatttttggctcaggacacctgtcagtgtccttcctggaaaacctcttcattgttggatagttccaacctttaggaagctcttcctagagcatcagcctctgcagcaatgaacctcctctttgctgctcaggtctacccattggaggtttgagaacagtagcaagggtgtcacaaggcttaacaaatggcctttccctgggcccagcccttctgtatggacatggccattaaaacccttagaggagtacatacagtgtcctcctttaaaaggccccagtcttgacagttttccgagggtttggatgtgccctcaacagacggagataagcccacgggctgcctgaccagtgtggatgtgtggaacaaagccacatttctgcccaagaatatgaggtgcctatgttcgagagtgggcttaaggagctcaggtgggttcccagcagcctttgtggtgtgtgtgtgtgtgtgtgtgtgtgtgtgtgtgtgtgtttagggggcagctccagggcctgagagtaatggccattctatcccagcccagagttcgggaggatgctcccagctctcttggccacccttgggaagctgaagtgtgactcaggcaaggaggaccgtcatttgagaagctgttggctgaggcaacctgaccctccctctgtcagattacgttgactggacaggcatggactcagagggaagaccacacctcgtggaccttctgagtcaggtgggagggaggaaagcagacagcattagtaatcagtaagtggcagcagcagggagccagatgctgtcagtacccagaggagggctccgggaggagatggccctagtggaacagtcctctgctcttgggtggtgctctattcatggcctctctttcctcatagcttccattttttgcagaagaggacacagaggcctggcaagtcacctagccagtcagtgggagagctagatctagaattcttctgtgttccagctacgggttgcatctgcgacccgtcctgcaattggtccccagatttgctctcccctggatcagcctctgggtcccagtgagggcaggcagcaatccgtctggacggggccatcctatcaagcctcagtgcctccgacattttgtccctggtcctcaaactttctggaattgctgagtactggtcatgagtactgggtttcctaccatgtccctgttccagccactccccatcaacccagcatgggggcatgagtccagggctggcctgctttaggagaaggagagaagatgggcactgagcactttctactgcttctgcacccatatcctagtctgtgtgcagcatccgcattgtctggatggggaaactaaggctcttctaaagaaagacaatgcattcagggaatcagaggcagaaccaagactccagcctaggtctcaggtcctagatctgttgtgtgtgtgtgtgtgtgtgtcgtggtggtggtggtggcatgtgattctttattcagccctcctctggccatactggtctacttggggtttttgaaaacatcaagcactccccctcctctaagcccctgcacttgctattgctgctacctaaaatgccattccctgcccttgtacatggacacattccaactggcttctttatgacacaaatggatgtcctttctctgaggggttttacttggctgccactgggagcagacctctttccagctgctgtgagcctgtgaaagatgagttgtaggtgctctggtaaagcatgtctttttttttttttttttgatggagtctggctctgtcacctaggttggagtgcagtggcacaatctctgctcactgcaacctccacctccccccaggttcaagagattctcctgcctcagcctccccaatagctgggattacaggcgcctgccaccacacctggctaattttttgtaaagcatgtctgaaggattggtcttgttctgtaatagcaatatgtgtgtctgtctcagtagttagattgtcagcaccctgagagtaggaatcttgtcttttctacttagtagtcctggcatctggttcttagcgtgcaggacatgctagctgcttagttaatgttttctacgtgggtgggtgtcttgaattgtaacctcccctcctcccttccacctcctgacttgtgagcatgtaagtactctcctgagcctcttcaccttttgttttgtctcacagaaaaaaatatgtatcgatttcttgattcattggaatgagctgacttgggagatagtgaaaccttgtcccctacaagtgtttcagcagaggcttgggtatgctgatgaatggtccttgaccttctttggttagggacctctttgagaatctgaagacaactagagtttctgctgccagcacaaggcacagaacataagcatgcgtgcacatgcatatacacatgtttgcatgtgatttcagtgggatcacacacaccttcatgcccacagtggatcacagatcaaggatccctgcaatggaggctgcaagcctcagtggtactccagacagagtacagtctagctaaatatgcgggtcctttccagtcctgggattctcatattcttgctctctgctttcattcaacaaatatgctctagcagtaagaggcagcccggtccccagtgcttacacactagctgggcagagggcttatagctgtgaaacgtgagcacctgtcaggtgagtggtgaccctgggctggagctgttggaaccaaggaggaaagggatctccccaggtctcctctgctttgtcctgctggcactgtctgctccccctttcctgggtcctttccctatttctctctgcccactcccccaccaaaaataacctagacttgtgatttaaataagaatcttttgctaagcactgactgtgtccagggaactgtgttttacatttgctgggtgaatgggcctccaggaggcagtggtgccctctggagtcctgggtgaagggttgctgtgcctgtcgtggccagcccagcactgtcctggcccatgggtcagctttagacctgggaaacaaacagagccaggggctgagcacagctgaaaaccctcagtcaaggtgtggccatgttttcccattggctcgcttcccgccttgcccacgggctatctccttgtctccctgagaccggctggtgtccacctctgtatatatcggacatgtatgtgtttgaccagccgcagatagatgcctggggtggaggaagtacagatccccttgggagcagggtggattcatttgcgagatgaatgatctcttgtcccaaacagaggagtgtgggtgcgtgtgtgtgtgcgcgtgtctgtggggtggagtaggggtggctttgggataagaaagcggttgttcagctgatgaaaggaacccctacagagctagggactcgaatcagagttcctcctccggggccttctcaggcctggggagcaggactcagcccttgcttctgccgtgcctggtagcctggcccagacgctgccttttccatggtctcactgtggccatgtccttcccagcacatgctgctccccatcctgcctgctgtcactgcctctcctatctgtctcttgtcctgtttctgtgccctctcttctccctctgggctgccctctgcagcttctaccctcctgccctaactcctgctacccctcacctgctgtgcctacctactgtcctgcagggaaggaagaaaagagaagaagtccctcttgtcaggcttgctccggggagaactggagtcagccttggaaatctctgtctctgcaccccgtattctgcagcagaaccaccatgcccagggcctgcacccctcatgcagcgcagagacactggtccttcatcttgccagggccgaggggcctagcatatgatgtcacagggcctctgtgccaagtagagtggtccgcacctggcattttcctctgactccccttcctataggggaggtcaagccttggaggccatgtagaggctgaaatataacagggcaacacgtgctggctgcgttaccttgggcaaatcgctcagcctctctgagcctcagtttctagctctataaaatggggccaataatgcccatttgaatagtattcttgccaggtaagaggggactaagaaaggtaaaagatttagtcaaatatatgacacaccgcatgatcagagtaaaccacaggccgagcacggtgactcatgcctgtaatcccagcattttgggaggctgaggcaggcagatcccttgagcccaggagtttgagacctgcctgggcaacatggtgaaacctcatctctacaaataataaatacaaaaaatcagccagccgtggtgccatgtacctgttgtcttagctacttgagaggctgaggtgggagaatcacctgagcccaggaagtctaggctgcagtgagctgtgattgtgccactgcactccagcctgggtgacagagtaagaacagtaagaccctgtctcaaaaaaaaagtaaactataacgtcttcccaccttcctttccccaacagccaagcaaaaaccttggagaagttccagcactgggcaggagtgtgatgcatggtcccccagatgcggtgtgagggtcacatccttcctgctacctgctggggtcactgacctagggaggaaagagaggtggcctcttccctaagcctggtgatctgggcctagatggcccaggggcttccacttaccccataagtggctttgccctgcaccagtgcccagagcagcctaatctaaggtgggagtgcccctccactcggcccatggaaatgagaccgctagggcatctgttaccctatctgtcaattgggcaggcccttccctgctggtgaccatcgcacccagggcaggctgtggggcaatggagggttgcagaacctttgtcttcagggatgtccagccttgtgggagaggtgaggaggcctcacacacggggagagattagagagcgacttcagagctccattggtcactcaggcggggctgcgccatgatccctgcgccccctcctgccaaccgcagtgctgactgggctacgctggggtgggagaggtcagcaaggcctctggtgggagtcggggcctctatggccgggggtgcttcaggagcacctggatctgtgcttttcatgcttttccttggagcctgaggcctgagtaaggggaaaggatgaggtcaaggccacaaccctggagttagagcccgatctggagccaggccctggaggggttctggatggacatagagaagggcattcccaggctgaggcagcaagtgtgggctggagggagaaaggcagagctgcgcggtgggcatggtgagaggagcagggttagggctgacagatgaaggcttttagggccaccttgcactccagccacagaaggaaggccacagaacagatggtgcctgtgtcggcctctgcatgccaggctccaggggcgtctctcaggacccgggtgtctggaccctaggaaagcaggaccacagggatcagcaaggtcacccttcttcccccttccccgctccattttacactgtacagatgggaaacccaagaggccaagccccagctccgagcaggagggggatagagctctgggtcctggcctctgttccatccagtccccacaggctgtggaaacaaccaggagactgatttgcctttcacctccctggcctgagctcaaacggggcctcagagaggaagcagctcactgcctcacccacccttcacactggccagccaagcaggatttctggccctggggcctggctgggtaccctggtctgcgtccctgtgcccctgtgggcctcagtttccccatctttcatgtgggaatgaggtagggtcagctgacggtctctaccctttcggctctaaggtagcgttcgtctggaattagggctgggggatgggccctaattccctggagacaggctggagggcactagaggtgggaaggccatgaggaggggaagctctggcctcacttctctcactgtggagctgcctggggcaggggcaaggctgcggccctccagagggtggggtgtcgagctgccaaggagagggcacccgcttagaggcctctggctgcccagggatgcctgtggggccgtccgtgggcaggggactgtggccgcaagatgggggagaggtttttcagggtgtaattagtgcactttctggcacccaccaaacttccccttcctcttgacaatttgctgccaaacagcctgattcctgtggacttgcttaaatcttatccaggggaaaaaaaataaaaataaaaaaaaaagaaagaaagaaaggaagaaaaagaaaaaaatattaagagggttgttatttgtgaaattgtgtttcccagccatgagggtgagtcacaccatttggggcttcaagtttcttgtttggatgaacttttctctgggaggctggggcggatttggagggggagggggccttctggtgtggggaaagtcttcgagtcaagataaggggagaccctggtggttgggaagtccaggtgctccaaggctgggtggggctgggctggttgtacctgaattgcctgggggagcttgaaaaatacagattgggctgcagtaggcgggggcgttgttgtttcacgggcatggagtttcagtttgagaagatgaaaaagttctggagctggacggtggcgatggctgcacaacagcatgaatgctcttaatgccactcaactgtacacttaaaaatcattgaaatggtcaattttgttgtgtatattttgccgcacacctaaaaatacagatttcgggccctcgattccaggtggctgctttggtaggtctgaggtggggcccagaaaactgtttgttataagcttcccaggtcattcaatacaggttggggcacactcatgtaatctgtaaaatgggatagtgactcatagagttgtgggcagaatcagctatctgaatacgtgtaaaatttccagtgctggggtcacagtaagagcttggtctgtgtcactgttatcctgtgatgtggtttttatcagaactctcccccatgccgtggaaggttgacccccattggctcccacagctccagggacgggggaccctctgcttctcaaggtggactgctccatcttggattcatctgagagctggagtgcccatcaggctgaacgcaggtcaatgtggaatcttccactggtcctggatttggtggtcgggccaggcagtgatacagaagttacagtcagttggacccattgaaatccttcccagtcactataggtgactgtgtgctgggctggcctgcccccgatgtggtgtctgtgtctttccttccgcatcccaggctctgatccagatgcacacgagacggaacagagtcccagaaggaaagggctgtggtcacacagccgtgtgtcctgaggcaccaagaacatcagtggcacccagatgatgaggaccatgtctctaggaggggagtggcagatgcctgcagatggatacagttgggtggctgggacacatacttgtgcaaagtaggatctgcttcagttgggggaggcaagactgtgccctgtgccctggggccagcttgcagctcgcctccctcccctgcctatgctaagggaacacagaaaggactgtccccaacctgggcttctgtctgccccatctttgtaagggagcctgaggcccttcctttcagaggccctgtttccccttcagcctggaactccccaaaacaaatccttgtctccccatcagacacaaggccccccaaggtccgcagcttattcctgcagttcttgggcacctgtgctggggccaggagatacttaagccccaagcccagatttgttgttgaccctcctggggaggccgcctctttcagccttggccttgctccaggaaagggggacccctggctgctccctgccagccccaccttcgctaaattccagtatgcaaggcagcccggagcccgtgactcctataaatagaggctgtatataccaggagggggcctgggccacgtctgctttgaagctaagcaagatgtctggttcctgtcatctggaggtgagagagatggaccacttccctccttgggcttccagagaggtggtttagggccaggctgagggctccccacacacagactacacaagcctcgggctgcaggaaacctggcaaagggctgggcttcagtcttgtctagtgtgaagcgggagcaatgccgcaagctgacattccctttccttacaaggtggggaaactgagtcagcagtgactttcctaaagtcaccccaccagttagtggcagagccccaaatctgacaggttgctttctactatatgttcttacctcatggcagtatgttaagaactaatggtaataataataatagccatcatcaacatcattgccatttactgagtggttctgaagtgccaggcatgagataaactactttccattcatgacctcattttagcctcatagaaaccctaggaggagctgttactaggaccattttgcagatagggccactgaggcccagagtagttaactggcttgtccatggagacacactagttaggatttgaactcaggcttctggagcccagagccctcgggtagctgaagactcagtgtgaatccatgcgtgtgtttgggtggggggttatggaacttctcccaaggcagaggctgtagtatatgtgcctctgtctcccacaggcgctgagcaacagtgtgtacaagggcgcctcaccctatggctccctcaacaacatcgccgatggcctcagctccctcaccgagcacttctcagacctgaccctcacctccgaggctcgcaagcccagcaagcggcccccacccaactacctgtgccacctgtgcttcaacaaaggacactacatcaaggactgcccccaggtaaggcagccctggcccagggggtgctcttgggctcccctactgacctgcggacaggctcctgtgggtagggcaggcgaagcagtgtccccagggccccttccaccaatgagtggccccgtggtcctctggcctctacccttttgtccctgctgggatttctgaggcaaggctggctggtgtggtcaggacagaggcccatcttgggcccacgctggttggtcagcaatctgggtgggggatttttggacccgaactgggcccccaaaggaggttctgtgcctttgggtctccaccagtcttttttgctaggtggggcctgttctgagggggcagtctcctcacagctccctggaggccccatctcatcacattcacggggaaggaatgcaggctctgggccaggaatccagatgtgcaccccctcccctgaaccccacctctgcctcctcagcctgtgagggaagaggggaggggccctgccccacactctgtgctcccaggatagggctgggggaaggcttcaggcactgcagggcggagcatctctttcttggagtgagaagggagggtcgggcagatcgaggcccccacctgatccaatgcttcagtatgacagagtgggcctaccatgccagcccacctacaggatggtccctgacccactgatagacatggttttgggatcctgggaaaagagggtagtagtcattttaagtacagcatgagattatcagtgattttttttcctattagtttttcctattttccaactttttttataatgtggcattacttttattttacgtttgtaatggaaatggaatcctggaaactctggaaatgcatgtagtgttcccctccagatgttggaaactgacgtgtggttgggtggggctgggtcccttcaggaccagtgggaggccaaaatgtgctgtcattcattacattcccaaaccctgctcagaaacggccacaccatgcttcaggttcttgccgcttagagtacggccctggcagagatgcatcagtgcctccagggagctattacaattgcaggctctcagagcagcatcttagcaaggtccccaggtgatctgtgtgcccccatcccagactctgcatacatagtgggagctgacccactgacgactttcctgcagaccccacatctccagtgggtcctgtcctccccctcaatatacacagtaagcaggaggctattggctcccagcagagagtgagtaccctcagcccccctggggttctctggatagaatgaggggcaaacaggcaactgaggatctagttggtccttaagggcatgctcatggcctgtgcagtccatagcctgttgcactttgtccagctgagccccagcacaggggcccccagctcatgtgcacacagccatccacagcagccctccctcatcccctgcctacagcctgggaagtgggcagagccagactgagctccgttaaggagacaggcactgtgctgagtgctctccaagcagtatttcatttaatgaaactactctatgtgttaagtgctctatttgcctcattttccatggggaaacagatgcttcgagggaggaagggactcacacaggattattgagctatcaatggaagagctgggattttaatccaggcaggcaggtgacactcagacatcaacaggggctctggagccccgaggaggtatgcttactctgggctggtagcctgggaatgctaccaggagaagggctttggagaagggtggcagggcctcccccagggtgaccaatatccaaaggcaatggatgtgagccagaggcccggggatagcagagggtgtgtgtgtgtgtgtgtgtgtgtgtggtgtgtgtgtgtgagtgtatgtgcacatgcatgcaccatcctctctcctgacagggccagcgctcttctaaatgctggggcagaaggtccctggcaccttccagcacagtgctaacgtgggatcttccttcatagagatcatcatctcatattggactcttaactctacggcagaaggaggagcagaggcctcattttacagtcttggggaggtggagagggcagaatgtatacgagatccccagtctcaggatttctgtattctttgcctccttaagctccttgtcactccaagctaagacctgcatggtctgtggggcctcagtttctcactcaagctgattgaggccttctcctggctccattccaaacttgattctgtcctggactcgtgaaggcccaagcaccttcttcctcccttcatgagtggtgggaggacagacagaggctcgcagcatcagtttcgtcgcctgtcccatgaggctaaggagagcactgacacccagggtattgtgaggacatagtgaaactatgcatggaaggtgcttagcacagtgcctggacacaggaagtgcttagtaaatgttggctagcatttttttctcctttgggtcactatgaagagtgcacccatctggcaaggcactaggtatttgggcaggctagaacctgattggatgctgtctacccctcacctggccatagctccaggggcaggtgctgggctggattcatctctgtgctcctcaccatctgaccacgccagctcaagggacctcacacgcagcggtgctcagtgcaaggctccctgaagggaggaacgggttgacagggcttttataaaccacagaaagaaacctgtgtcacaaatgaaatagtgtgttagaacctaatttctataatatttaaaagtagaaggattttcttgggaacagctttatgagatacaattcacttcccatataattcccatttgaagtgtacaattcagtgattttcgtatatgcctggagttgtgcagctgtcacctcaatcagagaacattgtcatcaccttgaaaaggaatttcatactccttaggtatcacctcttttttttatttttttgagacagagtctagctctgttgcccaggctggagtgcagtggcatcatcttggctcactgcaacctccacctcctgtgctcaagtgattctcatgcctcagcctcccgagtagctgggaatccaggtgctgccatcatgcccggctaatttttctgtttttaatacagatggggtttcaccatgttggccaggctggtctcaaactcctggtctaagtgatccacctgcctcagcctcccaaagtgctgggattacaggcatgagccacctctcctggcccagatgtcacctcttgatcatccatcccctcgcatccataaccactcatctatttctctctctgtagatctgtctattctggacatttcatataactagaatcatgtaacatgtggtcttttatgactggcttctttcacttagcataatattttcatggttcatccatgttatagtgtgttaggaagtgttccttcctgttatattttctggaagagtttgtaaagtatcagcagtaattattttccagatgtttgatagaattcacctgcgatgccgtctgcgcccgggctttcttttgtgggtagatttttgatgactgctctgaactctttactcattatagagtattctgatttttttttatttctttttgactcagttactacagtttgcatcttcctaggcatttttccattttatctaatttgtctaatttgttggcatacagttatccatagtattcttttataatcctttttatttctgtaaggtcgttaataatgttacttctttcatttctgattcttgcaatttgagtcctctctttcttcttgtttaatctacctaaagttttgtcaattattttggacttttcaaagaacaaacttttggtttagctgattttctctatttttttctattatttatctcattaatttccacttgcatctttacttttaaattatatttaaaatacatatggcataaaatttaccatcttaaccatttttagcttacggttcgtggcattaaatacattcacatcgttgtatgaccatcaccaccttccagccacagagctctttttatcttgcaaaactgaaatttatcttgcaaaactgaaatttatcttgcaaaactgaaatttatcttgcaaaactgaaatttatcttgcaaaactgaaatactgtacccattgcataataattctccctccctgccccccagcaaccaccattttaccttctgtctctgaatttgactactctaaatacctcatataagtggaatcacatggcgtttgtcttttggtgattggctcagttcacttagcataatttcctcaagtttcatccacactgtagcatgtatccatttcattcctttttaaggctgagtaatattccattgtatgtatataccacatttttaaatcagttcacccatcaatggacaactggattgcttccaccttttggttattgtgaatactgctgctgtgatcgagggtttataagtatctttgctcgctttcaattctccacttcaatatttattatttccttccatcagcttgctttagatttagtttgctcttctttttctagtttcttcaggtggaaggttaagatactgattttatatccttcttttcttttccttccttccttctatcctttcatccttcctctttttatggagacaggattccactctgtcaccgaggctggagtgcggtgctgtgatcataactcattgcagactcaaactcctgggctcaagcaatcctcccatctcagcctccaaaagtgctgggattacaggcatgatccattgtgtctggccccttcttttctcaatgtagataattacagctatgaattttcctctgagccccatcccataagttttggtatattgtatcttattttcatttatcacagggcattttttttttttatttcccttgtgatttcctctttgactcactggttatttaggagtgtgttgtttaatatccacatatttgcgtgtttcccacacatcttttagtgatttctaaccttattccattgtggtcatagaagatattttatattatattaacccttctaaatttattgtggtttgtttcagaacctaacattatgagttattctggagaatgttttgtgtgcacttgagagaaatgtattctgctgttgtttggtggagtgttttatagatgtctgttaggtctagttggttcatagtgatgtctatgtctcctcctgctttgttgatattctgcccagttcttttattattattttaagtggggatatttaagcctccagaaattattgtttgtctatttctttcttcaattctgtcagtttttgcttcattcatttgagtgttctattattaggtacacctatgtttatagttgttgtatcttcttgatggattaatcattttatccttataaaatgtccttctttttctctagtaactgttttttttttgttttaaagtatattttgtctgatattagtatacctagctttctaatagttgcagattacatgacagatattttcctatcttttatttccaacctattcatatatttgaatttaaagtgcatctcctgtagatagcatatagttgatcttgttttttgttgtctaatctgaaaatccttgccttttgattggattgtttaatccattcacatttaatgctctttttgacgtagatttaggtctgccattttactgccatttgctttctaaattactcatgtcttttttatttctctattccttctaaagaataacacaataaattgctttcttttgcattgattttctaactaacattttaatttctttaatgattttttttcactatgttttgtgagttatttttttagggttgctctagggcttatcttatacattgtgtcttaccagaatgcctcagatttataacttgattccagtgagatagagaaatgttactcctatgtagctctattcgctccttgttttggctttcagcagttttactatactgtgtctgtttgtggatctctttatgtttatcctgcttaaagtctgttgaagtgcttggacgtattgtttaaattttttcatcagatttggaaagttttcagccatgatttcttcaaatattctttctgctcctttatctcctctccttctgtgagatgatttttaaatgatctaaatgctttaaaaacctttaatggtctaactgggagtaaaatgtgcagaacactaggcccaccctgcctaggtcctgaagctgcccatggagcccccggggtctgaggagggcaacagtgaaagcaagcttaaagcattcactgccacgggagccaggggttggtcacttattacttggtcctttctcaccttaagagtaggatagaggtgtccagagctcagctcatcagactgatggggcctctcacatatccccagggcagtggaagggggattggacactggcaggaagactgggaaaccccaaaacagagggagaaggtgctagaagccaattctgaatgtcaacaaagggcagtccatccttgtggggtgaggctgtgcctaggccatggtctagtcatggtctagccatggtccggccaatgtcagcactgaaccaagaaggattaggactcaagagtgtctatcatttgcttcttgaaaaaacagctgctattgtcctcatgtagtgcaccagccatccggccccaaggtaataataatatcatacactatacaatagcaatagcttctaagcactgagtttaccactgggtttagcatattctatgtattagctcatttaatgctgtcaaaaattgtctcggtaggtactatagtgatcttcaattgccagatgataaaactgagacccagagaagtggagtgacttgcccaaggccacacagctagtgaatatcaaagctggaattggaactcaggtgctcctgattccagagcgcatgctttttcaatatcatcctgcatcacccttggcatccagactttgatctccactatcattctcagaaagtcagggttctttaaaaagatagatgactggaagtagagagggtcaaggacaatgtgggcagaggccatcccaagcctggtctggccaagttggtgtgcctggtagtttcaccacccagcctcagggtgtctgctgccccagtttagtcaggcaggtcaggagtgggttgggattgccagctctggtggcaacagaaaacccagtgactgcagggcggcatggttgatatctgctgggcctgcctgcagggtcgcctggtatctcgttttggcctctgcacgctgatgggtcaggactctgaaggcctgagcagcaatgtgttgctgtgagccagctgcacttgcctgtaggggtctgtggtgggggcctggcgcagtgccacatctgtgcccaggacacacagtctgtccaggacagagcaggactccagacatgttcccatcacccaaccattcctgagagtttcttgtgcaccaggcctgtgctggataaggcccttcccctgtcctcggtggtacagatagaaagagtattggccactctgggggaccagggctgtggtgaggtttactgtgcaggcccagctcagcctggagcttcgtgggaggcctcagagaggaggagcttggatttggagtggggaaggcttccaagcaagcgtgtaaataacaggaatatgctttccgggcactgtgagccctgggccacagcaggcgctcctgggggaggagtgggggtgtggctggaacaggtgatgaagggcttgtgtgacaggctgtgcaaacttggactttatctggaggccagggagaagggttttaggtgacatgctcagattggcattttgaaagatcctgctagtggcaggttggaggctgggctgaaggaggcaagaacgctaaggaagccagcccctgaacatggatagggactgatgactggacacaagacagcggtgagcagaagctgaaggggagggaatggattctggaatggaaaagtaccatctatgggccgtggtgcccagtgagagggaagagggagcaggcagcaaggagggctaccagatctttacggtggctgcctgggcaaatcagctgccaactgggatacaaatacacgtgcataaacaggtaggctcgccttccactctgcagttatttattgaacatctactgtgtgtcagacacatagcaagcattagaggacaccacaatgagcaaaacaggaaaggctccctctgtctaggagcttgtgttgcagttggtgaagtcaggcagtaagtacaaatcagtgggaactagggaactatcagatcagatgaagaacacagaagagtgctttcatagtgtgcactgggctgccttctcctggagtagcaggagttagtagttagtagcatgcatgcttaggcccatgatacttttagggtccacagatatgtttcttttcttttttttttttttttttcagacggagtctcgctctgttgcccaggctggagtgcagtggcgcgatctcagctcactgcaacctccactttttgggttcaagcgattctcctgcctcagcctccagagtagctgggattacaggtgcctgccaccacgcctgactgatttttgtatttttagtagagacggagttttaccatgttggccaggctggtttcaaactcttgacctcaagtgatccgcctgccttggcctcccaaaatgctggaattataggcgggagcaactgcacccggccacagatatgtttctatttgcctatttgtatttattttataaccagatgagaaaatgggtataatagtgaatatataattatgaactcagcctggagatttgtgtttacaccaatgcagtcagaaaatatatatatatatatatatatatatatagtatatatattttgtttgtttttgtttttttgagatggagtctcactctgtcacccaggctggagtccagtggcgccatttcagctcactgcaagctctacctcccaggttcaagctattctcctccctcagcctcccgagtagctgggattacaggcgcccgccactacgcctggctaatttttgaatttttagtagagacagagtttcaccatgttggctaggctggtctcaaactcctgacctcaagagatctgcctgcctcggactcccaaagtgctgggattacaggcatgagcctccatgcccagccagaaaataaaatttttaataaggttttatgcaaaaagggcccacaaaggcaaaagtgcctagggtccacagaagtcataatgaagccctgaagggtgtctggggcagctttcgattgggtggccactgtgggtctctcctatgataggacatgaaaacttcacgtactaccactccactaaagctcaggcagggggagggtccacatgcccacagtaaggatcctgatgttgacgtgggtgatatcttgttgaggtcaaaggatacagccttgaatttttaacccaaaggcaacttttcctaagctgtctctttgcccttcacggctgtcaggcccagccatgcccagcctgacagccacccttcaggcactgacctgggagcagaagctctctagaacccgtttccatcacttctgagacattgttagtggtactcattactcctttgagggaggtctgaggggtgttgtcacctgtgcctcttgtgtccagctaagaacagggcgccgcgagaggtctgggagggcctgagcccaggggaactgccattcctgagtcagcatgcccagggctgctaatgaaatccagatgttagacagaaaacaatcatcgcccccacccatctggcagctcgggtttcttggagattgcaaaagaagaaaaatagagccgagagagaatggaatcctagaacagctgagatcttagaggcaggatgtaaatagtctcagggtcttgctggggaaagggcaggagacaagggaaagagggggctggcccagtcctccttcttcctcacccaggtctctgcagccctcggaccccagcccctgcacccctccccaggccagagcaggctggtccttgaagggagtaggctgttggaggcagcaggcagggccgaggcccccagcccatgtctgacccttgcctacagtttccaacccctcattccaaccctgacctcactgcaggtctgggtgtcctctgggaccagagtggctagagcccagggaggggacaggccaaaaaggactgaggctaggcagaattgtgggctgactagaagcttctcctcagaaccccagagctgagtggcatagggatagaggatgaggggtatggtgggccagctgggggacctagcctcttcttcccaccagggtagcctcacacatatccacctcacatgttagggagcatgcgaagggaaggctctcaggcttataaagtttaacaccattgattagttcagacccatcaacatactggtggggaaactgaggttttctcacaacactggggctaaggactgcctgtcataaaaaaatgtatagaaggctgggtgcggtggctcatgcctgtaatcccagcactttgggaggacgaggtgagcagatcgcctgaggtcaggagtttgagaccagcccggccaacatgatgaaacctcatctctgctaaaaatacaaaaaaattagccaggtgtggtggcgcacacctataatcccagttacttgggaggctgaggcaggagaattgcttgaactcaggatgtggaggttgcagtgagccgagatcgcaccactgcactccagcctgggcaacaagagcgaaactccatttctaaaataaatgaataaataaatataaaaaatgcatacagggaggggcagaaaggtaacaccacagacaaaaagccctttgaatgttagacagtggaattagcaaagaaagtgttatactgccacccattactcattagcaaacatccagaaggaaggaagaaaggaagaaaggaaagaagggagggagggaggaagggagggagggggaagggagagggagaagagggaggacagacagcatcattctgtgttcccactgaggaaggactgggcctagggcagatggcatagcaggggatgggtgctgaaggtagcattgcagggggttctcctggagcctgggctggctggccaaggggcctcagctgaggttcttccagcacttggcacagaacctggaatgtcgtgagcactcagagaatgtcagctgggatgggtgttgctgggggtgtcgtgcctgccgtttggcaggtggtggcttggcatagatgctgacgttagggtagtgccccaaacccagtgtccgggcctcgaggctctcctccttgccctgccgaagccctctcctttcagtgaggtgccttcgagcacagccctgaagccagcctgcctgcgttccacccctggcgccgccttgtagcagcagtgctatgtgcctttgggaaaaattcattcagtctttctaggcctcagtttcctcctctgtaaaatgaagatattaaaacatcctacttcatgggatgttgtgagcttaaccgagttattttatctgaagtgtttataacagtgcctggcaccttgcttgcactgcaagtagtaactcttaggactgttaattactgtcattattattattattattattattttgagatagaaacttgctctgttgcccaggctgcagtgcagtggcatgatctcagctcactgcagcctccgcttcccgagttcaagcgattctcctgcctcctgagtagctggaactatagacatgaaccaccacactaggctaatttttgtatttttagtagagacagggtttctccatgttggccaggctggtctcaaactcctggcctcaagtgatctgcccgcctcggcctcccaaagtgctgggattacaggcgtgagccaccatgcccagcctactgtcgttattattatgcctcaattccgctgtttcaaactggcttgagaagtcccagggttctaagagactgcttcagcactgtggggatccacagaggtggctggagccctcccttcccaccctcattccctaagggaggggctgcctctgggaggggctgcagagaggccaggtgacaaggctgtgctttctcaggggtcttggggaggggacaggggaaggcccagatgactttgagtcccccaggttgtgctggggggactctgctgtgcccaggatgggtgctgtgggaggaggggcgatgcacagctggaaggtgcccagtgccgcctgtgggctgtcagttcccctatggcccagggaagaggaatctctctccaagtgcttgcctaggagcagctgctgggggtggagcaggggtgggggattggaggggtggggcatggagtgtgagggctcatggggagccacttttatatccttcctgctgcctcttgcctggcaggaaagagcctaggagggccagtttcacatcctcagctgccagttctgcttttagaagaattgcagatgataattaggagtccccaggaatctcgatgggtcaatggcctcaccttcccagccctctgcttctgagccttagggacagagatgttggcagagcctaggagccaggaccagtcctggtcttgaactacctgcaaggcctagtgaatggaatgctggagcacagcaagtgcatccttaagctgaatagctccaagtgtcacctcctttgggaagccctctctgatttctcctttcctccaagctcagagggactggcctcctctgaatgccagaaaggctcactcactcactcatttattcctcacctgccaagggcctccagtgtgccaggcccttggcctgcccctctcacatggctttcctttgtcttggagtaactcaagtgccctttgctgtgaagactccggggaaggttctggctgggacatcccttggtccctcaacctcagtaagaacaggagagccccaggcagcggagtctcactgagctggactcagagttcacttttgctctttcccagctgtgtgtccttcgccgtgttgcccaccttctcccaggcatctgtaaaatgggttcaccatccttgcagagtgtgtgtggaaagcgtctaatgcagggcttggcatcccacaagcactcagtaagtaagtggcagccctcactgttggtatcacttgttaggccgtggggcttcctgagccagatctgccctcatttgtaaagtgaggctcatgtacctgatgggagggttggtgtgagggagatgagaagcagcccggatacctgggaagcaacacccaccggagcccctctccttctccctgacccacccctgcagctgcttaatttcatgcatgcacgcagacacatatgtgcacacatgcaaacgtgcgtgcatgcacacaccccttgggcttctcagcctcaaggccttgctcacactgtccccgagtctgcaatgcctttcccgaatctcttctctcctatccccctttcagagcccagcttgagcccacctctctcagggagtcttccccaaccatccagggcctcagagctctcctctctgaaccctaacttgtcaggacagcaccccttccccagaacctggttttaaggccctcaagaggtaagaaatctcaaccaggtttctcatctttcccccatccccatctggcccctaggggacagagaatgcccctctttgggtgggcttcactctgccctgccccagtcctggaaggtagcccagcctgggccgtttgacctctgctcagccttctcatccccactccacctgtgctatggccttagccagtgactctctcatctcccccaggttcagcccaaacacgtcctcttgcatggtgcagcccctatgcccttctatgccccatgtgctcctgccttggtgagtcgtgcctagcccagggccggtcctggcacaagtctgtctcctacttcctgaggtcacttcccaggcgaggtctgtgtctgcctggcaggcagagggagcatggccttggggtcagaaggcccgagctctcatcccagggctgtctctctagctgttcaacattggccaagttgaccttacccttgggcccccacacccccatgcatgaagtggcatcagcaatgaagcctgtctctcagggcttctgtgagatccagaggcgatcagacaggtgaacgcgctttgagaactgtgaagttataccatttgctccactgcccagcgagcagccacatttgctgagatgatcagaggtgtgcgagcgagggtgtttaggccttggtggctgctgtgagctgacccctgcctcaactgccatggggtcttggaggcatatttgtgagggcagcattttccctttccaccatgtctggggtggctgcccagggtggagcctgtgttgggtgcctcctgctcccagtggctttgtgtggagtgggaggtggcccagctggggcaaggtggccagatcccagcctgtgggttagaggacttggcaccactgacctggcctgacttggagacatggctcctcaacacaccgcccccactccctcccattccaaggctcagggctcagagaaacggggcagcaggtgcagggaagaaatgtgcatggaatgggggtgaggagcccgaggacatcaggccttcctcatgcctggctcacggagcaccttcgtctcatttgctggctgggttcttacactcacctggatgtcatctgtggcccatgtgcccactcttcttctctttcttcatctctgtctctcatcctttcttcctcttttcttttgtaacagattacataacttgcccctggtcccacagctggttaggatcaggccaagtcagtctgaccttaggccgtgcctttcccactgctccctctgcccacaacaacggatgggggtccatcctctaggacatgctgtagacctgctgatctccagccctggcagaaatcaggctgcaggaggcactgtgaacccaggccttcctccctgcctggcttcctccaagttccctggctgtgtgggagccacaggtctctccctgacaggttggggtgatggtgaggtggaggggtgcccccaaagcagtaggcatgatgacaaggggtaaaacccaacaggggcccatgctcctctgctccttcctggggactgtgaagctcaaacagagccttgtgcccctccctcccgcaggccctctgagccctccccatgcatcagtcctccctctgtgttcccaaaacaccctgcacaaacggcttagtattttgtattctcttttgattgtgatcccggggagggggaaggctggcagaaaatcacttagcgcagcacctggcacatagtgagtgctcagcaagtgtgagccattgcgttgctgtggcttcagtgcgccatccacagtgtctgccgtggtgcccactctgagcagggccccgtcataagggaaacatattaacagcacagcagctacacgcacagggagcgctcactgtgttccgggcactgctctgagcacttttcacccattgactcctctaatcttctcatggcccttgtgctggacactcttcttatccccattgcacagaggaggaaactgaggcacagagaggctaagtgacttgccgagggtcacacagcttggacatgttccccagcagtcttgcttcagaggctgtgctgtcataaatatgtgcaaaaaaaggaagaaatgaacaagactcaggatgtggaggaggaaagaaaggcagggagctaatgttgactgagcatcctccatgtaccagcacatcactgatgtcttcagagacgtcaagggattcgcccagagtcacacaggagccaagggcatggctgggatttgagccctgggtgatttctaatcccctcctccccaccttatcccaccagctcaggcctcagagagccagcacagttcatcaagggccccctggacacccccagcagccttggaccacatagctgagttggaggcaagacaaggaattactcagtgaggccactcattaccaacgcgtttggttctaaccagccataggtgaggagtttagaggaaggagcagagccaagtgggcgaccttgaataagcccattgcccttgccacacctcaatttccccttctgtgcagtggacccagcaatatgcatcctgtccctctaggctgccgtgtaggtcttatgagctaacaaagctggaaatgacgaaagccaagctgaacaaaagttaagagctttgtaggaataaaaatacttttatttatgaacatctaaaggctttgcctaaaagtgtggtcagtggaccggcagcagtggcagtacctggagcttatcaaaaatgcgcagcccgggtcctcaggctccaccccagtcctgctgggtcagagtctgcattttcacaagcttcccccatcacccatgggaaacactggtctaggaatttcttgcttctcagttccccattcccggaggctgcctcttgggccttctttccatagcctacaaggggttcttggcaggaaattcccatctcgttggagaaaatgctgtggcccagccagacccctgccctgctcaactgcctaggagatatgagtgcatcagaattaagctgaagttgggcagaggctctaacagcctctgtcactccaacaacctctgatgagaccatttgttgggagtgcagctgccaccagaatcaacaaggcctttcagacctgggagagggtgcagggaggagtgagggggtaccctcagcctgggctcagtagggctaggggtttcttctgaacaaagggcatttgtaccagatattctccaccttcacccaggaaggcaaaaggttgaaaccgcagttggaatattccaggttagaaataagaagcaacgtcccaactgatcaggagcaagccagccaaggacactgaagactccatccccttaaatgtgtggccagtgtgtgtgaggtcaagaggcagagctggaacggattcccagaggccctctgcccaccgtcctgccctgagaccattttgacttcaaggggccaagggactcacctaaggtcacatagcaaggagccctgggttctgattccctgtgcctggggcccctcttcattgcaggccttcctggaggctggggagtgaccttgatgaccttagcaacctcccttgaagcagcctggaggttttgagcatgtcaatgggaggacgggaggggctggctttgtgagcctagcaactcagtgtgtctcactgtgtcttagccttcatggtacccaagatcattaggaataccccaggggcagaagtcctctgagacagatgcggtgagtcagggacaggaaacctggacccaaggggtccaggtagaggaagcaagtagaggcttgggaggcctgacattgatgaagagcctggggaccagtgctgtgtatccttaggccagttacttgcagtctctgtttccctatgtgtaatatggaggagaggttagacaagatcagtgattccatctcgggcttcacattagaaccacctgggttttttttggttttggtttggtttttggtgctagaaatttgaattcagtagatccagggtgggcctggccaagggcatattcctagctccccaggtaattctgacgtgcagctgggcaaaagcaccattgccaggtctgagatggtggggtgctctggcagctgtggtggctgcaggtgatcataaccacaattatcctcctgaggtcctgggaatgcaagattacaaggttccgggagactcccaaatgaacattccagaggttctagatatccagaggttccagatgttcaacctcagattccctaggtcatgtgactgcagctttattattctgagaagtgaagcttcccacaatggaggattctgacacttgagtgttctggttttgtgactttaagagtgtgagattctataatcattctgtatacctcaagtacgtgcttctgaaaccttccgtgtgtttctgtgttccaactgcagttattattcttctctaaaatgaagattctccatgtctgtaattccaacacattcattatcccaaattctagagactccaagaacttaagctattgtggcactaatattttttaaaattctaaattcagcaactctgtgacctgtcattccatctgggcagttggccgccaaggcttgggcccagactttgtctccttgagacaaggtggtgatcgtataagctgggacacgtgccccctcacctccttggcctggagagcctgtcttggtggaaggggtgagggtggggagaacagagaccccacggagctctcacttctttggctcttcctccaacactggctgtagaggactggaaggtggagcaagtgtgaggggcacatgtggccatgcggcaaggagggcagcaggtggacatacagctacatccccgaattgctgcttgtatccacccatctcacagcaaagctgtgaattctctgtgtcagactggcttagacattagaggctatcacatccgaagcacctccctaaactctctctctctctctctctctctcacacacacacacacacacatgcgcacgcacatataccctttttccacctaggaaaactaaggcccagaaggaggaggtgacatgcctgatagagctggcatccaaacccagggccctgaactcccggttgtcattgcatggtcctttccagctagtcaggcccaggtctggctttctgcacagaaccatcagctttctatagctgactttcaggtccctccaaggggacagggaccagcccggtgactcaggattacacatttaaagcctgtagcctggcggatttcactaggcccaggagaggctccccctgcccccgcatgacctcctggccgtttcctgcctgcctgaccacagtcttccgttccactcccccaggacgggtgcccgccttgtgccagtgcacatcaggctcagaggccaggaggcagaggctgggctggagtcaggcgtggggaggggtcccgccactcactcactgtgtgaccttgaaaaagtctctccacctctctgggcctctccatgctgtgggccggtggatggtaattgacagagttactgtgaggattaaatgagaccccaggggaaaacccagcatgctgggaggggaggggcagaggctggtcacatccaccgcccactggtcccctcagcactgaacccattttggatgagtggcttgtgtttgttgaaggtgtctgggtagacttccatataatccttcagagataaaatgatggattgcagactctcctgggctttcagaaggttggctggtagaggagatagagtccaaaggccttggacacctgagatttaggcagatgtccagaaaatggtgatgatgatgttgatggtggctattgttaactgaattccagccatgtgcttggtac

SEQ ID NO: 56 - DNA, 2478 bp, Homo sapiens
  source 1..2478: mol_type = other DNA
aggccagccctggggcgccttaaaaaccggagctggcgcttggcatcgccactctgggcaggatccaacgtcgctccagctgctcttgacgactccacagataccccgaagccatggcaagcaagggcttgcaggacctgaagcaacaggtggaggggaccgcccaggaagccggtgaggatagcgcgcgacctagggctcaggcaggggcacctgcgtggatgcgcaggcagaagcagcgggtcggcgcggtccgcaagttcctggaccggcagcttggctcggaaggctcggtcctccactgagacgcagggggcaggcagaacgcccaccccggcgagcagacagatggtgcccgcagggaggcagcggaacagaggctccggaggagccggagctgcgctgcgggcactgcgggagcccctccaaggaggccatgctggcgctgggcggcccgcccaggccctcaggagagggtgaaggtccaggacagggatcgggcgcggcccgccaccacttaaacccgcgcgcgccaccagaggctgccccagacctcaaagggctttgtttccatcccacccccatcgccgaaaagtaatcgtcgccttacctttaagtccccacctggcaaagaaggtccttagttcctccacctccagctctctcctccgtattctggaggtgacccagctgcggtgggggcgtgggagatgtcaggagaccactgggttggttcttcctgcacctagcccaggcttcgttaggactccagctccctgtcagtcctgcccatatcccagtcaggagacaatatccaaaccaaccccttacttcaccagtgctccaggggaggcccacagttcttcccttgagactgaaatgctaccaaggaagcctccgtgtcaggtcccttccttctgggcttcacttttccatctgagagctgggtgcaaaggatgggctgctttctgatgggttaatcgagacgaggttcccaggggcctctcagcacacttgcctgactaaccctttccggaggatgggatctgggtaaggcaggccctttcctgttcagcagcagggatgagttacagctctgtaggcgggagccacctgtcagcccccccggggctggtgactccattcccagcaggccgaaactctggtccagaggagatagtccggccttggaagttttgcctccttccttcatttgtctcctaatgtcttaagctgcctgtccacagaggcactggctttgcttgtgtgcccctccgggcaggccacaggagggaggaggcagtaaggacctggcaaaactgcaagccccagggctaagtgcatgaaaggtgggaattcaggcatctgggccaggcttctaggggagaagctgtaaaagggggcaagggtcttctgcgccatcaccagcattagccaacagtccagatgctagctgcagcctggccctgccctgccttccttcctctgtccaacattttctcagtagccctggagatggaaagggaagctcctcccccacagagaaggagctcagagttagaaataaacaaaaacatcccagaggcatggaaaggtctcctgcccctcgggctggggggccctgggccagggactttatctccatggcatccatcccttggacctgtaccaccgaatactctggaggacacagaggcatggcaatggtggggcacctgtagtcggtggtgcctcaacaggggctaaaagccacatctctctgttccagtgtcagcggccggagcggcagctcagcaagtggtggaccaggccacagaggcggggcagaaaggtctggtggggctggagggaggcgggcaaccccagcacacctcccactccccgccccatcccggctggggcccaggcacatcctctcctctgcagagccctctgtccacaatgccccaagcaggtcccccgggagacccaggccaggctaagcctacaggcactgtggttcccgggccctgcctgacctgccctctctcccgcccttccccagccatggaccagctggccaagaccacccaggaaaccatcgacaagactgctaaccaggcctctgacaccttctctgggattgggaaaaaattcggcctcctgaaatgacagcagggagacttgggtcggcctcctgaaatgacagcagggagacttgggtgaccccccttccaggcgccatctagcacagcctggccctgatctccgggcagccaccacctcctcggtctgccccctcattaaaattcacgttcccaccctgtgtccacttcatgattcctcgcaagctgggcccagtcctctcatcccaagagcagagccaccgtagccggagtcctagcctcccaaattcggaaatccaatccaacggtctcaggaatgttttccatcccgccacgcgcctcccgaagctcccagaccggaggctcagccccc

SEQ ID NO: 57 - DNA, 32744 bp, Homo sapiens
  source 1..32744: mol_type = other DNA
agagctgtggacctgccagcctgcgaggcggaggacgggctccatctcttagaaacgcctacggcgcatgctctatggggtcaactggggggctggcaagcggcagcgctggtctggggcggagtctccgaggcacttcccggtggctggctgctctgattggctgaacaaatagtccgagggtggtgggcatccgccctcccgacaaggcagaccaggccccctgcaggtcccctatccgcaccccggcccctgagagctggcactgcgactcgagacagcggcccggcaggacagctccaggtgagagtgccggcgccgcggcgctgccaggtgcgggtgcggcgtggaagctggtgccttcagcaaggggagggtcgcgccccgaggctctgccggccggcaagaccctctgcgtttggacccagcgagtcttgcctggggtgcctgcgggtgctttttctgcgggcgttggctcaaggcatctgccaatcaaccagggcaacttcagagagcaacttcagagagaagcccactctcttccctgggcgctgtccactttcctggacaggcgcggtctccggtcagtgaagctgcccagtgctcctggaccgcgaggacagcagggatgtctgattcctctctctgcatcctcgtgctctccccttagctcctccaggcatcccatcctacctctcttgttagccaacggcgtggtcgaaagcagacttgggcatcaatcctggttaaagtcccagcgatactgctttttaaacagctgacactttgcttccagtacttcagctgggtgaacctcagattcctgaaaaatggaattaatggtactgccatagggtcggtggaggagtaattgacagtagatcagaagcgctgcctgcggtggctggcgcctcgcaagagcttaaatgggagtcgtaataattgttgttattagaaagttaaatagcatgctgcgttggggccttttcttctgccactgaactgttggactgctcttatcttttttcagaatctgtactatgcatctaatatatacgtggcactttgcttggtcctgggggtacaaagctgagtcagattgttacaaagtctaaataactgagataaaggtgttaatacagcccagaaaagcacacttaattcagcctggaaggttttttttcccccctccttcgagattttcagagtatctccttcttagtaagaattgcttggcttagtatgttgagaaaaacatactaagtatgtagtgttgtgttggaaggaaaacttaactgggtgagattttcagctgagtagctttagctgttactctcatggaccttcctctgggcggttgatacaggttctgtaggaaaaccgctgaatgaaagcagctcctgcagatgctattctgttttcaattgtggtaattcctttaattttttccctttcaatttactccttattctctagtaataatggacttttgggaggttgcatttatgataaaaaatagcctggggctgtacaatccttcctatcatgaagaagtacaaagttgtaagtagaagcagtggccttgctttgccaatgcacactgaaggggataacgtttgctcctgttcagagttcacggtcgggcgcggtggctcacgcctgtaatcctagcacttttggaggccgaggccggcggatcacgaggtcaggagatcgagaccatcctggctaacacggtgaaaccctgtttctactaaaaatacaaaaacaaaattagccaggcgtggtggtgggcgcctgtagtcccagctacttgggaggctgaggcgggagaatggcctgaacccaggaggtggagcttgcagtgagccaagatctcgccactgtactccagcctgggggacagagcaagactgtctcaaaaaaaaaaaagaaagaaaagaaaagaaaaagaaaaagaaaaaagaaaaaagaaaagaatttcagagttcactacttcttggaaaaaaataatcccaggaggaattccatcaacagaagggagtcagttcacttttgcaatctcctgagaatcaatttcttaagacttgtggaatattcagtttaaacacaaaactaaaaacaaacagctgtattggagtattattgacatacaatagcatggcatatttcaattgtacaattgtataagtttttgcatgtgtacacacctgtgaaaccatcagtacattcaatattatgaacctgtacatcacctccaaaatattatttgtgcatacccctttgtgatcctttcttactgccccttctctccaggaaaccactgatctgctttctgtgaatatagattagactgcattttgtggagttttatatgaatgggatcagacagtacttttttttttccttattttgatctggcttcttttggcataattattttgagattaatctatatttttttgtgttccttcccttttatagctgagtagtaggtatataccataatttatccaatcatccatttaaagcatttgggtttttccagtttttgtctattacacccaaagctgttataaacatttatgtacaagtctttgtatgggcatacatgcctgcatctttttaagtgattctatttattttttaaaaatgtagaagttctgggatctagtcctaggtttttctctgaccacttgcgtgatcttaggagaggcatttaactttgccttcagcatcctcaaggtctttgctgtgattttgagtcatcactgccagaaaccaagatggtctttgttgatttgatggttagagaatttcagaaggagagagacgggtcaaatttttcctttctgtttcttttgaaagctctattttctttcatttcacttttttcccatgaatgacaaatttaaatgctgacgtataatttggggcaagaacagaagtggttagataagtaggaggaagagctaatagtggttagataagtaggaggaagagctaatagtggctgaacttaaacatgtctaaatcataggtggaaggcaagaggtgggaaataagcaagctcagaaattttgtgtctctttctttttctcaaactatcctcttctaagtcttgccttttgttatttctccatgaccaatttgtttttaactttggggttaggaggtgaatgggtatgctggactccaaaggtcatatatcaactggaggtggtgggtgggaggtttcttagttaaaagtaattcctttgggccgggcgcggtggctcacgcctgtcatcccagcactttgggaggccgaggcgtgatcacgaggttaggagatcgagaccatcctggctaacacagtgaaaccccgtctctactaaaaaaaaaaaaatacaaaaaaatttgccgggcgtggtggcgggcgcctgtagtcccagctacctgggagtctgaggcaggagaatggcctgaacctgggaggcggagcttgcagtgagccaagattgcgccactgcactccagcctgggcgacagagcgagactcagcctcaaaataaataaataaataaataaataaataaataaataaataaataaatataaaataataataataataattcctttgggaggcggaggcgggcaggtcacgaagtcatctgagaccagccttgccaatatagtgaaaccctgtctctactaaaaatacaaaaattagccgggcatggtggcctgcacctgtagtcccagctactctggaggctgaggcaggagaaccgcttgaacctgggaggcggaggttgtggtgagccgagattgtgccactgcactccagcctgggcaacagagcgagactccgaaaaaaaaaaaaaattcctgggcaggcgcggtggctcacgcctgtaatcccagcactttgagaggccgaggtgggcgaatcacgaagccaggagttcgagaccagcctagccaatatggtgaaagcccatcgctacaaaaatacaaaaattagccaggcgtggtggtgcgtgcctgttgtcccagctacttgggaggctgaggcagaagaattgcttgaaccaggaggcagaggttgcagtgagctgagattgcaccactgcactccagcctgggtgacagagcaagactccatctcaacataaataaataaataaataaataaataaataaataaaataaaaataaataaataaaatttaaaaattccttattctcctttcagatatggctggagtcatttgtttcatattttcctttcaccttttacttgccctaaatctggttcagaactttttgtgggagcattaagttaccagaatatttttgtgtagtaaaattcaagcaaataataatagactgttttattatacagaatgaaaatgcggttcttggggttggtggtctgtttggttctctggaccctgcattctgaggggtctggagggaaactgacagctgtggatcctgaaacaaacatgaatgtggtaagtttctcaaagttatgtacttttaaaatgcatctatttccccgatccagttatgtgagctacatgaagccatacccatacattcatctctttataactcctttgcttttcaatttctctgaattttttttttttttttttttttttttttttttgaggcagagtcttactctgtcacctgcccgcccaggctggagtgcagtggtgtgatctcggctcattgcgacctccgcctcaggggctcaagtgattctcgagcctcagcctcccaagtagctgggactacaggcatgcaccaccatgcctggctaattttttttgtatttagtagatacagggtttcaccatgttgcccagggtggtcttgaactcctgagctcaggtgatctgtccacctcagcctcccaaagtcctgggattacaggcgtgagccaccgtgcccagcccaatttctctgaatcttagattcaatttgctaggcttttctcaccaggtaatatgtagccaacaaacctcagtttaatgttatatatacttcttaataagataaattatgattttttattaattcatttcatttttaagtctcactaagtttgtttaaactataaaaaagtatttaaactttgcaagaacattaccgctattgagagctggttttagaatacattgaacaaaggttgtgattaagaatgtccagggaacatatttctatacagaagtcaaagtatctgagctaaattttgttagaaaaaatatgcaaaaataaccactcgactaattaaaacatctgaaagttattaatcgtaagtaaacaataaaatctggaaatacctcatttaggcacaaaatatcagtaaagtacaaattattaaagaaaacagcaactttaaaatagatgttgcagtgacccagctgaagaatcaggcaagcttagggactcgcagagaaattcacagtgagccaggagagtatgacctgataacagggtcttaaagttaagttttacttcttagctcaaagcttttcttttgcctcccaatttttccaacttttaaaataattttttaaataagaatgataaaattaaattctttcaagtacttatggtagagagggtatgtgcacttatttacattaaatcccctggataattgaattatccatatcccactgagctcctgattaacaattgtcccatgaatccttccttatagaaaagtgaatgtgaccataattccctattttgttcaacttttcttccatcccaccttgacattctatgtaattattttagtccattgataaaaacaagttaatattttttatactttattggccagcaggggatctctcaaaacaaagaaagtgttttatacattgacagttctagctgggatatttagaaaagaaagaaatgagcatttatttgtgcccggtaggcaggatggaaacaaagaggcccaagatgtggtaaagttaggcaaatttggtataaaacatgctagaatgatgaaactgaagtttaaccagacaccggtaggtggaacacaagcgtgaaacaagggaggatttactcttgtgatgagaagttggctactagatttagcagactaaaatttcaatgacaaatgctttcttaaagcctggagaacatagtttatctgctcctttgcttgttaatgtgggagactgtttcagattctgtccacccaatttccatcgtcctttttctctacagagtgaaattatctcttactggggattccctagtgaggaatacctagttgagacagaagatggatatattctgtgccttaaccgaattcctcatgggaggaagaaccattctgacaaaggtatgggaaggctcttaaaagtaaaaaccagaattcttctgggttttgtgttagtaaccaagttcagatttaacttaaaaacattgaaatgggattatttttagacgaaagcactaactgtgttgaggtttgcaaggcaaagaaaaataattttcttttaaagaagtaaggacaagagtcatctaattttttgttcaaaggccagattcatttgaggatatgctaaaatctctgaggctttgtttttttaaggaagtgtatttaatgaaatgttttgagcattaaatagatggcttttgctatttaaaaattatttaatttttttgaattcacataatctaaaaatcagagaattagaagacatacagtgaaatgcctcccttctctctcactccctacttcctgcttttttgtgtatctttttgaaataacttcattttaaaatctttttatttccaaaaatctcattagaaacaaatacacacacagattcttatttttcccttgcctccatttgaatgcaaaagatggcactattttgttctttgaattttttacttaatatcttggagatctttccatacaatacataaagcacatcttccagaagtgcatgatatttcactatatgactgtatcattatttatttaccaagtgtcctattaatgcatatttgtgctatttcagtcttctgttaacaaatattgctgctgtaaataagcttttgtgtgtgcaagtttatttacatgatacatgtccagaagtagaatttttggatcacaggatatatgcatttgtgattttgatatatattgccaagctgattttcatgtgcatgtgtcctgataattactatcactatgaatatatgaaagttcttgtagctttggcttaaaaagtatatatatacatatatatgtatatcttttttctctctctcattttataactcaagcaaaactgcagtttccagtgcagataaaggaatttctagacagactgattgaaattattaagcagttatcagaagaaggatctaatctttattcaattatctctccagatgtagcttatttatttatttatttttttgagacggattttcggtcttgttgcccaggctggaatgcaatggtgcaatcttggctcactgcaacctccgcctcccaggttcaagtaagatgtagcttattctctaacatttttttgtttctggagacttttcttggggaaattaaggtttagattaaggtagttagatagctatttattcttcaatttaagtgttatacgggcaaaagagccacctttgcctcaattcctgcccaaattgttattcaaagcaaacttaaacaccctttgtgttaatgtgagcattgtattattatttgctttgttttttcttaatttatcctagtttaacttttttcttccatgtgttctagctgtaataagattttaataatgtttaggtggccacgacaaccattttttttgaaatttgatttctaactcttgagatttttatgctttacagatatatgccattaagcttcctttttataaatatgttataaaatgagtgatgagttatagtgagagcttttagtttttcctgtgctcaaaacactcaaaacatatattttatgctagagcgagcatatgatcttggtttccttccttttttttcccccaaagaataacccctgtatactgatttcagacactgtataaagaaaaatgctttatattatttttcttaaaattatagttgattaattagtaacgtgaatcactgttaaatgatggtaagcatctcagtaaaacttgctgagagctctcctcctatatccagcttcagacttctctctccatacagtggttaaaacactcagagtcacatgccctacctgtgtgtatcacactgttgcaggggaaggtgcagtgccctggaatatgaagaaagtgagcatgagtcttgatatgctcccaggtaatagaaaggagacttatgggaccttggtgctacacctgggtttgcccctgacttcttgtgtgctttgttttttcttttttttttttaacctctgtgggatatattatatatactttattttatttttggcaagagggttggggattgggagagtggagagtctaggtctttagaatgggggaatatagactgaaagtatttactctaagctaaatctgttcatagcatttggtcctcatgttctttctctattctgagaggccctccctgtaggggatcactgatgtgtatgtcatacctgctatgagctaacctcagtggggagtcttcaaggaagtctacagtgaacaactcagttctctaaaggaattgtgattttcctaagaactgcataggcgctttcctgatggtttgcatttccacattctaaaacagagcatggacagaggctctttactgtccttcactcctattcaagagcaaggttgttgccactggtgttatttccggtgtttaaaggcaaatagataaaaagaatggagaaggcctttcacacccaaagtgaaacgcgtcctcttctcatgcatcccgcttcccctcctgacttcctcctctattattaatagcaccagcatcctcctaatgacctagcctggaatctgcagaatcattcttgaccacgggtcctctctaggccacccacgttaaattgcttcagttcatctttttcttctgtttccctgaccaccagcctacattaggctcttgttaccacttaactgggcgcctgaaataagctcagcagctgagagagtcttgagccatttccattttcaaggctcctcgtatactaacagaaagaaagaatttcaagacaggattatggaaattcagtttgcttatatagtttaagaaattaatgcttttaatacacacaaaaatactgctatacattcatactatttacaagtaattacaaaatgtattaaaacattattcattttttggtaccacattccttgtggaacctgagtctacagctgaatggtgagcatctttcagtcctgttgccatgggcctctttgactgactgtgtagcctcacttggagatcaggttttttttatgaacacagggcttggccacatggcttctctgctcatgtttgcttaaaggctttacctaactgctcttttctctgccaggcttcctgttctcattcatcctatgtggttttgcaggattaagtttcttaaagcttagctataatgatgtgaaattgccattcagcaatctttaggggtctcagaaatgaagatacacactgttccttaaatattctgtccagctggtatttgtacctttcacctccattctgcacagtagtagcccttggctactcgtgcagtatgtgcatgctgtttcccaccattaagcaaccttcttaggaagtgttgagcaatgctttgctcctgaagggaattgaaattcagaaattacacttcatagggaagtggctctgttttcatctgctcagccttatttcagaaagtcatggggagttagcactggagggatctcagattcctgcctgggctagggatttttgtttttttttaaacacacttcactggtggattccaaggtagaattcttggttttggcaacctgtgttctagactaacatcctcattttgttggataagacagccaggttcaaatagggaaatgaatttgtctcagggcagagggtcatgtcctgacctgtctgactacagattcagtgatctttgaactggagaatgtggccttacataataaatattaaccaagttgatgccatgataggcacaatatatattttatatatatatacacacaccaagagtggcacatttgtatctgaaagttatgcatctgattgccgagtgggtgaagtggcactctagactgtgaaagcctggaatgactgccttcagcatgcagaaacaggcttttcaactgtggcctcagcaaagattccccaggggttgtccattgagctattagagtcatagctgaaaattcacagcgtggcttgtgagttaagtctttagaaggagaccatcagcttgtattttgctttgattgtttattttagaattctggttgatttctagatttttctttccttatagaaaaatccttcacttctaaagaaactattttttgaatcactgcagtgctctaacgggctacacataggcgttggtaatctgggatgtaattcctcacccctggtggtgccgaacagacatggtttcattaatcaatgcctgagcttggtgacttgggctgagctcaggctcatgtagcactctgatggcgcattgggtaggggattgcattcagaacctttgcctaatggagcagcataagtgaggtcagctgtacagcttatctcatagacccaggttgggatcagagcagaaagccaagtggaaaggaagatagtgctctgccctgtccccttccctcctcttcctcctggttaaccgctctgacctgtcctctgttctcaacctaattttcacatcttcagggaggatttcctcagcctctcacaccaggtcaggcccctggctacatattcttatagtcctctgtgtttttctccatcgcaattaagacaataaacaatatattattatgtaggtgatgatgtgtgtgacctctgtcatccccaccagactctgcggggatgaagacttttctgattctctttacttggtaaattgctttagctccaggctgcagtctacccaagcatgctcctgcagccctcctgtgacattgcgatttaatagtgtcccctgctcaagggcacactgcatgaaggatttcctactcctgggctcctaggagtccacgaacacaacttaaatgcttcctgtggtgggtaaaacttgaagctgtattgcctcatgattaagctgagcatgtgaagagccaccagtcatgggtgtaagttctggctctactatttaactggctgtgtgaccttggcaattttctttacctcttgaagttttgacttattcaattattaaacaggaagaataatactggctacttcgtaggctgttgtgaaaatttgataaggcctgtgaaatatatgcagtatagtaagtgcaggtgatacaatttcttttacaacatttatttatttaaaatattaatgaataaatacataaatattttaaaagtctcaccgtgtctcccaggctagaatgcagtggtacaatcatagcttactacagcttcaaatgatcctccctcagcctcccaaagggctgggataacaggcatgaaccatggtgcccagcctctgtttttaattttgaaatgtcaacatggatttgatggtggtctctgatattgacttcttcaggattaagccctccatgacagggatgtattctaaactgtgtggacaggaggaagatgcatttgtttacaatggacagaagtaagaaaagtaagaaatgtcatagaactatgtctgggggtcaggtgacaagcactgtgtcatttctagccctgtgtcccctgcaggtgctttcttctgtggaccctctgctccttctgttgagggagaattttggatgagagctggataatttcccaaaattcgctcaactgtgaagctctggaactcaagttgctgtgctgcaaagctgtctgaggacaggccgtggtggcagagaggggcagggaagacaggcaatttggcatggagatgatgggcacatttgtcacatgacctgggtttgattcccagctgcatcgtatactaattgtgtgtcctagggcaaatgatttagtctctctaagcctcagaggccccaaaggaggaagaatgatgtaaatggcccagcaccatcctgggtgcgtggaaaactctaattatgataatgtcctggaacgttctgcagtgaacaagacagaccacattactgccttcgtgttgcctggtgatcagagtgattattgctggttttggggaaaacagcattctgaggcatggaacggttttcttccctgctctgtgatgcagggtgctcttgttgtgttcactcctgcaggtcacctgctccccagcagggtgacagtgaagtgtgagtgcagtggactgcacagtggcaaaggccacatgactcctgaatgcatcctgtggacaggccaagcgctgtgccctgtgtgaatcatcaggtgaactctcatacaattctagggtgtaagaactcctattacctcctgttttacagatgaggaaaccaaggtttatagggttaattaacttgcccaagataaagcagctgatgggtagtgaaggcaggagtcacacagcccgtgactgtttctgcccacttggccctcttctcaggctagagaacagctatgatgtccctgataaagtcacactgtggaaagtggaaagtatctgacttagatgtcctgcatctgctagatgtcctgcttgtgcctactacagcaactcagagagctgttaggtgacttatctgagataatgcgtgtaaagtgcttaagtgcttagcatggtgcctgtcacattgtcaacacttagtatgcgcttgctgttactatgattatattacctgggccaaagaatgccacttcactctatccttcttcatagtggttatgttctaataatattttattacatttacagttaactctttaacaacatgggggttaggggtgctgtcccccagagttattgaaaactgcatataacttttgcattccccaaaatttaactaatagcctactgttgaccagagggcttacctgtaacgtacatagccaattaacaaatattttatatgttatatgtattatattccatatatacaataagtaagctagagaaaagaaaatgttataaggaaatcataaggaaaataggatgtatttactattcattaagtggaagtggatcatcataaaggtcttcattcttatgttggaacaggctaaggaagaggaggaagaggaggagttggtcttgctgttgtaggagtagcagaggtggaagagggggaggaagtggaaggggagacaggagaagtgggcacattcagggtaactttatgaaaatacattgtaatttctgtccttttttcatttccctagaaatgtttctatagaatagcaattcttccatcatttgctttagtttcagtgcctgtgtcatagaagcgtcagtgttgtaaaggaagtcttgaataattgcaattgccacccttctcctgaattgtctaatatcagtttgttttctagcactgcatctcccatgtcttctttcccatcgtctggtgctgttttagaagcactcgtctccatcaaatcatcttctgttaattcctctggtgtgtctattagctcttgactttatttaagatgcatatattgaaactatttacctgctcccaccctccacctttttgccatatccacaatctttttcttgatttccttgattggctaagtcatggatatggatactgtgaagtcatgcacaacatctggatacacttttctccagcaggaatttattgtttcaggcttgataactttcacagctttttctgtaacaacaatggcatcttcagtggtgtaattcttccagaccttcatgatgttctctctgttggggttctcttccaattcaatcctttccatagtgtatgtgtgtaatgagccttaaaggtccttatgacctcctgatttagagactgaattaaagatgtgtttgggggcaagtagaccacttcgatgcctttggtattgaattcatggggttctgggtggccagaggcattttcctatatcaaaagaactttgaaaggcagtcccttactggcaaagcacttcctgacttcaggaaaaaagcatcaatggaaccaatctggaaaaatagttctcattgtccagtccttcttattgtacagccaaaagactgacagctgatgtctatattttccctttaaggctcagggattagcagatttataggtaagggcagacctgaccatcaaccctactgcatttgcacagaacagtagagttagcctatcccttcttgccttaaatcctggtgcttgtttctcttccttactaataaacgtcctttgtgggatatatatatatatttttttttgttagaatggaacactttcatctgcattaaaaacctgttcaggcagatacattttcctctaggaatttatatgcagcctcttggttggcaggagctgcttcttctgttatcttgacatatttttaaagtttttaaaatttttaattcttaaaattaattaatttttggttttttagagacagcatcttgctctgtcaccaagctggagtacagtggcaccattatagctcactgtaacctcaaactccttggctcaaccagtcttctcacctcagccttctaagtagctaggactacagacatgtgccaaccatactcggctaatttttaaaacaatttttgatagagatggggatctcactgtgtttttcagactggtttcgaacacctggcctcaagaggtcctcccactttggcctcccaaaatgctgggattacaaacataagccaccgtgcctggtctatattggcattttaaaagccaaacctctttgtaaaattatcaaagcatcttttattggcattaaattctccaactttagattcttcaccttcttttttctttaagttgtcatataatgactttgctttttcttgaatcttagagtctagaatctattcttgctttatcttgaatattagagtctagaatcatattagagcaatcctgcacccacataaaagctgcattttcaatatgagataaaaggtatttcggaaaaagtgcaaggttttggcacttgctgtcatagctgcaatgacaaatggcttcacaaattttctttccctttttttttaacagtcatctttatgtgtcatttatcttgaaatgaagataattgaagctgcagacctcaatctatgacacatatcaagcaattcaactttttcttgtctggacttttctctgctttttgggagcactcccagatcactattagttctttgtatgggtccaatggtgttattcaaggtttatgatatcgtgctaaacatgatgaaaaacatatgagaactgcaagagatcactttttactgcaatgtgcaatttactggagaaactgcttacgtggagatgattagtgtcatgagaaatttaagcagatatttacaatacttgagcaacaggaggcggctacaaaattattacagtagtacacaataaactctagttaattttatgcagttatgatttaataccacatctttacatttgtttacatttctcttaactgtcaatggcaccatgtttggtctgtaagtgtgtgtctaagttttgaaaatgttaactttttatactttgtgtatatttatggtaataaataaaaaaggccaatatctaaatatattttatgcattcatgacatacttaaccttttagtaactttttattatttccagactacagagttggtctgttagtttttctcaaattgttgcaaatctccaacaaatttttcaatgtttattgaaaaaaaatccatgtatgagtggacctgtgcagttcaaacctgtgttgtttaaggaccaactgtatagatttattattgttactatcagggaccattatttattcagctttactatgtattaactacttcgtcattctcactttagaaaaggacacctatacttcagagagagttgagcaaatcctacaaagttttgtagccagtaagaactgaggtctgcttcatgctaacgccctggtgtctgaccacctccttgttctctgttttggttctgccctggccctcagctgatttctcacatgtgttttggagtgtgacggagtcctgtccggactcagcatcctggcagagaaggccagtgccttgggaggcaggaggaacttccccacctacccggtcatcttcctcctgcgggactgtgggctcagcacattcagtttcggagcttgagtaatcgcctcctggcttccacccacactgggaaggcagcgttgtcgtggactgccactgggctgcttctttgtcagctttgtcctatttagggccataatgaaatcacttgccatctccaggctgagaaatggtcctttagtcttttcccttaatccccagccctcctagggcttctttttcttcaagttgcatttgcacagaactcccagagccacccgtagggcatagctggggaaggcagcccttgacctgtcatgctggtttgtcactctgacaaacagggcttcagggtgcctgagtgcattgagcaggctgggccttggaggagctgcctgaccaggcgaggctgagtgggtgcccctcctttcattccctatccccctccatctactagagattactttcttcaagcactttgtccacatcctttcaaaaatagctttctgccttcagccggaaggcctcagtgtgttctagagacttctctcttgttaaccttctttccctagcaaagcactgaaaagcatggcctgtggtgtcagacacacctggttagactccaaccctcacgcttcctagctctcgttcagccttgggcaagttacttgacttctttaccacaattccctgttctgttaaatggcagtagtgccaacttcaaaggattttcagtacagtacctacagcatacaagcgtgcaatcggcgctagctatcatttcaatcagctgttctcagcaaggtgaagtgaaatctgaaatagttcactggaagatgtgaacagcaataggttttaccttcccagagagaaacatcctttgccagtcaatccttaaatccttctttggtggtgggatgggaaagaaccacattgtaccttcctttcttccccctggtgggagcaggtgagagaagctggcaacagttggctgggcctgcttccagcgtccagtcttttccattcccttttgtattcacccaatgccagagggaaggggcaagaggtttggaagccatttttaaaggtttttcacccgaggattcgatactattttctttgctgaggatccgtcatgcctaatggaactgccatctctagaagttcagtaagttatatcctctgcatctccctcctcagaagagacttttttgttctgggatgaaaggaaactggcccagcctggaaagatgtgcaccccatgaagtccttcctattccctgtgtccccaggtcagacaaggcactggacttttcctagtggttccccagcctggctgcgcgtcagaatcaggcagggaggctttcatgtgcacactggtcccatctggccaaggcctgggtgcagtgtcagctctttattcatctggctcctatgttttctccagaaccctttgtggaaacatctgtctcttacttagaatccaggtcaaatgtttgtcccactggccaagtaactttctccttcttctgggacttcctgagtggtgttctagccttcttcttgctgggttagacagtcatcgtgtgtctgactccctcgaggatggagctccctgtgggagggagtgtgggttacccatctttgcattcctagcatctattagtttggggcaaaagtaattgtggtttttgccattgcttttttattttgtggggggtgggggtaaatggaatccctctctgtcacccaggctagagtccagtggtgcgatcttggctgaccacaacttctacctcttgggttcaaacaattctcctgcctcagcctcctgagtaactgggattacaggcacccaccacgagggtttcaccatgctggccaggctggcctcaaactcttgacctcaggtgatccacccgcctcggcctcccaaaatgctgggattacaggcgtgagccaccgtgcccggcctgccattgctttttaagggcaaaaaccacaatgacttttgcaacaacctaatagcagtggctggtactcagtaggcaccactaaaggtttgcacgaaacgtaatgtatgttttcaaatcacttcttgatattttaccttctagtgcactgcttaagatacagcagatttccattaaaaacttttcacctgaatgtggaggacacagctgagtggcctccattctctaaagccatgccatttgtcagacgtttacctttcttcatcagcccttttcctcatctgccagcatttcccatgagaaaacagtgtggtctgcagtaccctttgcagtgcttggcccagattctccagatttgaaaacatttagcttgtaaagaatagattcactgtttccttcccatctgctgcatcttttgtgcctgttgttcattgagcttttgtattcagcttgaagtaggggatggaagaaccctaacaaacaaaaaaggacaattagaaaaatagtgtctttgacttattctctggaagcctccttcaaaggataaagtaattccctgagaaaagcgttgtgcaggtgtgaattcggtctgggtggaacaagggtatttaccgatgttcttagaagctgcacagccaccttaggcgtggtctcctgggtagcacatgctccagctgtccacaggccattcctttcttcacactcacctcccaggaaaactgcagcagctcctcattgcccttgggaatccaggagttatttattggggatgtttaaagactttcctgatgtatcttcaacttgtcagcttccacatttccccattcaaagctctagaggttacagagggaagtacagagactttagggaaattttaaacattctccatcgagagaaggtggggagctgagtcctggtcccatgtgctggccaacatctccccttccagcctctgtcctggcctggctgccacatatcaccctccttctcctctctcaattatccttgccccagggccctctttggtttcaaaccattcctgcctttctctggacactctcccctgaggagtagactaggcagtcccatgttttccgtgttaactacagaggcacagattggaacaagtgccaaggaattaggccacctaccgagccttcctcttgcctctctctgactctccatcctgagggaagacgattgcagtcgtttttgttggaaatgacctgacctgtgggagcagcccgttcctggcctttcaaagtcaagtcaccttactcatggcctagctcctgatcactcctggtgggtgaaaagtgcctcaacatacctaaagagctgtgacatgagcaggaaagcccctctttctagaaagtgttgggcaccatcagtacagcagagccactgcatcgtacagcgcccggtcaccattctcacgtacagttaccatgagatgatgatggtgcctgtagttacacatttttcaactataatttaatgataaattaattttggtaattataattgtcacttacactgcagtttataattttggatttttaatgatcaattttcatattttcccagctggattatcatcctcttcattgaagccaagaagcctgtgcataagacgctgtatctaccacaatgccttccacttacatttttcgtagtaaatttagtcttgttaatattgcattaaaatgaacctttgaaggcaaagatgagcacataaagcagccctaatcttgtccagtttgctttctattttctccccatgggtagaagttcacctgcatggccctggcatttctattttgtgattagaaaatcacaccagccatacatgatgtttcacttctgtaatccccgcactttgagaggccaaggcgagagaatcacttgaggccaggagtttgagaccagcctgggcaacatagtaagacctcatctctatgaaaagttttttaaaaaattggctggatgttgtggtacacacctgtaatcccagttcttcaggggcctgaggtgggaggatcacttgagtccaggagtttgaggctgcagtgagcagtcatgccactgcactccagtctaggtgatagaatgagaccttttctctcttaaaaaaaaaaaagttatgggaatcattttatactcttggcctggggtcctgctattttaacaacacgagggtatagcacccccaggttgtacaactccagggagtaccatgtatattttcatgtatgtgagcagtgccttccggagtagtctacggaagctaccttgcagcagaactgtcatttaaaaacaatttgctagttatcaaatctatattaggacattagcagaaatgaacatttgtcaattcacttatagtcttatcatctggacaaatcattcttctcatttttccttggtattttacactcctctttggtgtacattaattttgcacagctgtaatttagagtagtctataattttgtattttgcttttttttcctttgcaaggtataagcttttctatgctgtcactgtccttgtcatggttgatggataattattataccaagtggatttcaatgaattatttgaccacttgacaattagcttatttccagtttttcactgttataaagaatgagcagagggcaaaggaagctctcatttgttcactgtgacccgtgtgtcagtcactatactggatacttacctcacttattcctcttaacaattatttttggaactgagacgcagactggttaagcaacttaatagtatgagttgatatatagtgaactcttactgtgtgtcagactctttgctacctacttttcatataatatctcatatctcactgtgtcctataaaatgtgtattatcatttctactcttcagggaattatattaattttaggagatgtttccccaaggtgtcatgttagaacttggagaggacagagttgagcctaggtttgtttgagctgtctaaaactcatgatcgggctgggcgtggtggctcacacctgtaaaccccgcactttgggaagccgaggtgggtggatcgcttgagtccaggagtttgagaccagcctgggaacatggtgaaacactgtctctacaaaaaacacaaaaattagctgggtgtgttggtgcacgcctgaaatcccaactactcaggaggttgagatggaaggatcacttgagcccagaaggtggaggttgctgtgagcagagatcacgccactgcactccatcctgggtcacagagcaacatcctatctcaatcaatcaatcaatcaaataagtggataaaactcatggtcagtataatgtcagctccatggaggtactttttttcctcttgtttttgttctctgctgtgttctcagtgctgagaagaaggcctggcacatagttggtactcaataaaggcttgtttcatgaataactgaatggtctcagcgttaggtaagcagcttgaggtcaggtttctttggctcccacatctttgttttttctgctatatcactgtctcgggtacaggtgagtagaaaataaattctcacaggcagacacagacacatatatttatgaatttgtgtgtgtgagcctttttatctatttaacttttattcagctttaaaaatttttattaaattttattttttaaagcagttttaagttcatagcaaaattgagtggaaggtacagagatttcccatacaccctctgcccccacactcccctgttatgaacatccctcacagagtggaattgtaattgttacagctgatgaacctacattcacacaaagtccgtagtttacattagggttcccttttttttttttttttgagactgagtctccctctgtcccctaggctggagtgcagcagtgcaatcttggctcactgcaacctctgcctcccgggttcaagcaattctcctgcctcagcttcctgaatagctgggattacaggtgtggggcaccacacccagctaccttttttgtatttttagtagagacagggtttcgccatgttggccaggctagtctcgaactactgacctcaagtgatccactcgcctcagcctcccaaagtgctgggattgcaggcatgaaccaccacacccggccactacagttcactcttgatgttgtatattctatagttttggacaaatgtatgatggcatgtgtctacctctatagtatcatgcagagtagtcttactgccctgaaaaatcctctttactctgtctatgaattccttcctccctcctaacccctggcaaccaggatcttttttactctctctatagttttgtcttttccagcatgtcatatagaatgcagcctttacagatcttggtaatatgtatttaaggttcctctacatctttttgtggcttgatagctcatttccttttagggctgagtaatactccattgtctggatgtagcacagtttagttatgcattcatttactggagcacatcttggttgcttctaaattttggcaattatgagtaaaactactatagacatctgtatgcaggtttttgtgtagatgtaagttttcaactcctttgggtaaaataccaaggaatgtgattgctggattatatggtaagagtatgtttagttttgtaagaaactgccaaacttttccagtgtggtgctaccagtttgcatttccaccagcaatgaatgagagttcctgttcctccacatcctcttcagcagttggtgttttcagcgtttttggatgttgctcattctgatacgtgtatagtgatgtctcattatgtgtgatctttttctttccttttgtttattttgttaggaattattgtgagaaatgcaattacgaaagcaaattgtaaaaacattttataagaaaaaaattgtaaaaacattttataatttcttaaaaatatattgatttttgtttttgctgcttacataagtgtgtcttgttagtggacatgcaaaaaatggtccagtttcactgctaccttgccagtgctgttttaaaaaaattctttactaacattatatgtgagtacatcactatgtcaatctttcaatttatttctagttcattatttgcttatggatcttttacgaatgttctatttagcaagatatcatatttgttttgaagcttggtgctactgcctcctaaacaatgaatgtttttcaggtcccaaaccagttgtcttcctgcaacatggcttgctggcagattctagtaactgggtcacaaaccttgccaacagcagcctgggcttcattcttgctgatgctggttttgacgtgtggatgggcaacagcagaggaaatacctggtctcggaaacataagacactctcagtttctcaggatgaattctgggctttcaggtatatatgaattgataatggcatggatgtatttccttagtactcttaaagcagacaacaggcttccagcagaagaggtagataggtggtaactctgaagttgtatgagaggggaagttagtgtcttttgaaaggttttaaatgttgctaggaatttaatgactagcagtaaggtaaattataagtaaatgattacattaagatttacatttagttaggaattcttaagttacttcggcatttctggtggtgtgggtgctgctgggtaaacgttattccataactttcctcctttctccataaatatgtaatccagatgttcacttttcttctttccagaaattatcctttcctccctcttccttctggctccaccagttaattgctgtatgacattggacatcttacataagcctcctgtgtctcggtttccttatttgtaaaatggagcgtaataaacacctacctcataaggtcactgggggcttaaaggagagggtgcagagaaggaacctccacagaacctggcaccttgtatgaactggctaggggttggctcttctcctgccagtggcaacatgcgcatgcatatacccatacgcacacttgggttttggtctatgttttggtaccaggtattagagaaagtcagcagcactatagcagcctccgggcttgcttcccatttttaaaaccagaggcacctctaaggacatgaaacacaagaatgagagcttttaacaaaaggcatatacaagaattggtttattgtcacgctatttgtaacaacggaaaacaggaaactacccaaatgcatgtcagcagtgaatggataaagtgttgtatatttatatagtagaataagaatgaacaacttacaattatatgcagcaaaaaatggattaagccagatacaggagaatacacattgtataattctacttacagaaatatttaaaaacaggcgaaactaatttctggtgtgaaaaatgaggacaatagttacttttgggagacacaactggaagagagcccaagggggcttctgcagtcctgctggtgttgtttcctggactcactgctggttttcccagctgtgtttagtttgtgataactcatcaaactgcatactcagtatgtgtgtgctctattttatgtactatttcaatgaaagagttcctttcttggattacagttatgatgagatggcaaaatatgacctaccagcttccattaacttcattctgaataaaactggccaagaacaagtgtattatgtgggtcattctcaaggcaccactataggtatgtatgtaaataagatcagaagttgatataaattcttcattacagagtttgtacttttcttaaaagtgaaatataaaaagatgttagttcaaattccatttatttttaaatgccaaacagaaataatgaataagataaggaatgttggtaacatttagtcttctatgaaaattcatgtatatggttgaaattgaagaaattaatgtaagccacaatatattacatgttttcctagatgaagcaagatagggatgtgagagagtagaaaacaagtagtttctaagttcagagacttacataaagaaaacaagaaaatatactgccttctgaagttaagtggaatataactaactacaggtacatttggtttacaaaaaattttgaaaagttatatgcattttaatttatgctgattatataagtaatgcatgttcactgtagaaaaacagaagaacagaagatttagcaaaattaaagaaaataaaaattgcccataattctagtcagcaagagtttttgtaattagggactaggaacctgtcctataatttatttaattctcccttttaatgtttactatgactaacaccttagtgttcccatcacatgctttccttacaatatattcctagaaggagccttactatatgaaaggtatgaatgttttgaagggtctcaaaacatgtggttatattgccaggaaaaaaatggagttaggcatttttctttatttatatttcttctttcatgacttgcctgcttgggacctttgccccactgcttcctaaagtgacattctggggccaggtggcaagacgtcagagagggttgtattaattcgttttcatgccactactaaagacatacccgagactgggcaatttataaagaaaaagaggtttaatggactcacagtttaatggattgtgagctagggaggccttacaataatgacggaagagcaaggaacatcttacatggtggcagacaagagagagtgagagccaagtgagggagtttccccttataaaaccatcaaatctcaagagacttactcactaccacaagaacagtatggggggaaccgcctccgtgattcaattatctcccaccaggtccctcccacaacacatgggaattatgggaactacaattaaagatgagatttgggtgggaacacacccaaaccatatcaagggttaaaatatattttaaagctaggggattctaaatgtgtgagttcctttgaaatcattggtggtttatttcaacgtggtgtctgtaaattgttctttgggggaggggcatgggggagataaaggtgatggggtgaggctcttggaaatagtctgttatttacattgtaaaaggaactgggaagattttctgattctcccagactggatttcttccagtgcttatctaggttgagatttggagcaagcattaacaaatgcttgatttactagtttaaccaaattcagtgttagggcacacggaagttcagagtgccccatgtcaagtgttttggctcctgctggtggtattgtttgcgtgggtctcaggcctccgcgagagggcgtcgcgagtgacggcctttgtgttttctgagaaggaaatcccagatgatggaattcctgttttctgtcctttgttctcacaggttttatagcattttcacagatccctgagctggctaaaaggattaaaatgttttttgccctgggtcctgtggcttccgtcgccttctgtactagccctatggccaaattaggacgattaccagatcatctcattaaggtacttggacccctcccatccctctcctctccccgcagatttcctcctgagatctgaagaaatggcaaggggagggataatctgtgccttcctcccctgcgttttgatatcagtggagcagtgggcttttctttttccgtttacccctccttccagacccaggggtggccggggacgcctgtcgtttcctgcacactggtgccacgtgtactcatggttagcatgtgtcagtacagctctgcccacctcacagggagagcaaggagagtctgggagaaaataatttaagcatttgtggagttgccctttatcccatgaggtgagcctgtgcacagaggatgtaggagatgggagataggaaatgttcccaaaagcccatccctagctacactgagggtgacctaacaacgctatcattattgtattttataatatggctcctaaacacagccagtagcttcatcagggctctgccctaaagctgtggcacccgaacctctgttcagggaggaaatagatttcatgaaaaagagttttaagctaggtaagaccagatgttctattatgcatgcattatatgtcttttatgaaatatatgttcacacacacacatatgaaatcctgtatagaaatatatacatgaaatgaggtataacgtctctcatgggccatttagaagacttaaataggaaagatggaatctcctaggcttaggcagtccttctgccttggcctctcaaagtgctgggattacaggcatgagctaccatgcctggccaataaaaaaaattttaaaaaacaaaataaaaaagcaagcgatgggctggatttggcctgctggccagtagcattgaattagatgggcacacctctggcagacattactgatcaatcacagccttgactgtttcttagaagtaaccaccgatccatcagagtcagatgaaaattacttggggatggccctgggaggggtgatcattaaggccctttcccactgtagaagtccgctgaaaacttatttgattttctgcctccttctcttcatttggagaatttaaatacacctctgtagtgtgtgatttttgctttggtaaacttgtgcaaaagcatcctgatttgatgtccactggttgccattctctcctgaggccattcgtggagacattgggtacttgtctctgcttctgaggtgagtcacggagacttatgcaccagagtgaaatgctgagatgttcttgggtttctttttattttgtaggacttatttggagacaaagaatttcttccccagagtgcgtttttgaagtggctgggtacccacgtttgcactcatgtcatactgaaggagctctgtggaaatctctgttttcttctgtgtggatttaatgagagaaatttaaatatggtatgcatgtttatagtaagatttgatttttttttttatctgtgaatgtgcttatttgtgttgaatgatatgggagaggtgggaatgacctcatcagaactctaaagagtctttcatttgagaggcacaagcatgaactttggccaatgcctagaatacggtaccacctgctgccatcctcaggctgactgtggtcaccttcttatgttgtacctagatggagattattgaatgaggagatctgtcacaaattaagctgtaatatttataattactctagtgatttgtttcttttagaaatcattataagtataaacataaagatgggaacaatagacagtggggactccaaaaggaaggagggagagggacaagggctgaagcctgttgagtactatagccaatattgagtactgtggttatgggatcaatagaagcccgcatctcagcatcatgcaatccacccttgtaacaaacctgcacatggaccccccgaatctaaaatacacaaattttcaaaaattactataagtatttaaatttggaacggccatttacatacacataagtgtatgcttgcagtgtgtgtgtatttataaaagtacattttataaaatgtaaacccattttattttataaaatataaacccttggccaatactatgcccgtgtttctaaatatgtttgttagtttgtcatgtggcattttgaaaaaaagggttaaaatcctggaataaaggccctaaggaatttcagtgccatttttcttttgtctgataattaaagcaaggtgtgattgttatatgaaatttgggaaattcaggaaagcatgaagaacaaaatgaaaatgccctgtaaacgaaacccacacagtcccgtgcttaccatgttgttgcacctccttcatatggactttgtatgtggttgtatgtatttttatagggcagatttttagtcaaataatttttttctacctctcatctcacatacttgagattatggctctagtttttagtgctttgaagggcaaaatacaatgtttattatcaatgccaccttaatgctgttttcattcttcatttcaatgtatttattttgcagtctagagtggatgtatatacaacacattctcctgctggaacttctgtgcaaaacatgttacactggagccaggtaggcattccaggagtgcatttggggttcatgtaaaatcaacatcagaaaggtctgggcatgcaaaccctttccaaatagaaagacaacctgcttacaaatctgatctggttttcttccccagagtcctgggtttttgtcatcgtgcttgtgttgcttttgatacctgtggtggggcacactgtgttatacgtgggttcacaaacagctactggggttgacatttttcttttccctcctctcccttcctcaagtctcaggttaatatattctctccctttccttctcccccagctttcttttcctcctcctgtttcctcccctccatctgcttctcattgagtcctagattttttttatttctgtgttgcttcataaagagtgattttaagtccgttttggagatagaaaccgctgtttcaacactaacccctgatcacaatatgcttggaatagcagtgaataaactggagctaaaccaatgatagatgtgaatgggggcccctgacttttgaaatacagttttgattattttatcatgtaaataagtcatgttcattctagaaaatttagaaactacatctagaaaaaaattatcttaaaatgaaaataaaatcattctataaccctagacagagaggaaatgcatatccatagatattgaatgtctctgcattctattctatacctcttttcaaaaagatgctgttaaagacatggatagaaatagtagatgtagaaatagattgatttttctcctgcttactgttttacagcttgcttttcttttttcacctgacaatatgtcagggacttctttctacctcaggacataattttgtgccatttatttttcagctaacttcatttttaatatgaaacaactcaccatttaagccctaaaccaagacactgtaggtgtcttgaatagtaatttccaaacacctggcagtcactgcttgcatcagaatcaccaaattgctttaaaaagtacactatttaataaatcattgcattaaaaaagtaatgagagttggaattatagtggaattcttggattggctaccatccaggcttataaaacaaatactcctgtgtcccaatcatttggactagagaatctgtacttttattttttcgttttattttatttttttgagatggactctcactctgttgccaggctggagtgtagtggtgcgatcttggctcactgcaacctccgcctcccagcttcatgtgattctcctgcctcagcctcccgagtcgttttattattttaaaaaaaaattttttattgaggtataagtgacatagaatatttaaagtatacaatttgatatatttcagtgtttgtatacacctgtgaaaccatcaccataatcgacacagcaaatatatcatcatcctaaaaggtccctgctgcccctttgtgatacctccccccatccctcccctcaatcccactgatctgcttcctgtcattgtagcttagtttgcattttctagagcttgcatgagaacagtcatgcagtttatacttgtttttgtctggcttcttccactcagaatacttgttttgaaattttcctatgttgtgtatgtcagtagttcattcctttttatttctgaggatctgcatttttaaaaaatctgcctggtagattcttttgctccaccaggtttgggagcagacctgttcgggacatcctgatactttcatctccttcttcagttgccccaggaactctaacagtgctatagttctcctttccctggggctcgtctctaaggaactaggaagagcctggcctgaggctcctggtcctttatagtaactagaaggctgagagttaaatgtcagttcctcaggggcagagtttgttgtggcctaaaagaggggcatctggaatgcaaatagttcatgacgtgctgaacagcacatgcttaccacttaaggaatgcccccaaaccttcaaaaatcctcaaattcacaaagattgaggattttcgttcttggttcaggtctctgcttttctccttggtcacatttatgcttatagtcacttgttttcttcatataccctgtcactagaattcccctacatttttgaggatgcctaggacctcttacctaatggacattttcctaaaaggcccaatgtctgtcacctcatcagttattgcacccccagagatgatggagggtgactgagctggctggaggcagatcctgagctttcccaccagcttagtgactgccagcagcccacacacagtacacgccaggcctcagcaaagtacaaatggccaccagacctgggatgtcagaggcccttgggaatgttgaaaccaaggctgtcctaggccaactctattttatattacagacctgtgttgcttcacccttctgtgtcttgggcctccactgggcatggggtttgcagtagagacattggatcggctatcatctaggctactggtcttgttccagccctcttatccagcagcttgccagggtcaaaggctgcagggtgagggccagagcactgctctgtgccccatttgtgacctggtgactttagattctaactaccctggaatatacctccagaatatttgcaaagcccagatttgctgtacaaggcagcctgggcctttgctcttctacccgctgtaccatcttttgtcagtaaaatggttggttgctttgtgcagccattgtatcggatcttccctttggctttccctcctctgggctgttggccaggggctgccactggtgcaggctgcaggctccaagaggcagtgcaggaaaaggcttctgtggaagctgggcaggcctggatgccgggcaggctggggctagaattcaggtgtggcattagagggctcttatggtatgagtttggggttgaccttaaaggccattttgtttacagtccattcagaagtttactttttgtttaaataattaggattaacttgttaataaattccataccttgttctttagcgggattttaaatatagcatactcatctttccattctccttataaacctgatgaatttcggagctccccagagccaagacttgatattacttctcactttctcactggccctgcccagagcccaggtactctcacctgtttgaagaaggccatcccagtgtagttttccagtgttgttctgacctacctaaggtgctat

SEQ ID NO: 58 - DNA, 32744 bp, Homo sapiens
  source 1..32744: mol_type = other DNA
gcgcagccattggtccggctactctgtctctttttcaaattgaggcgccgagtcgttgcttagtttctggggattcgggcggagacgagattagtgatttggcggctccgactggcgcgggacaaacgccacggccagagtaccgggtagagagcggggacgccgacctgcgtgcgtcggtcctccaggccacgccagcgcccgagagggaccagggagactccggcccctgtcggccgccaagcccctccgcccctcacagcgcccaggtccgcggccgggccttgattttttggcggggaccgtcatggcgtcgcagccaaattcgtctgcgaagaagaaagaggagaaggggaagaacatccaggtggtggtgagatgcaggtagggagagggctgacaggattccgagcgctgcggcttcgctgctgggccccctactgcgcggtccagggagagggattttatttgcatttcctgagggtcccagtttcttggttctccgcgttctgttcaataaaaatgacacccggttgctgtgtgtatgtggtttttaggagaaaataacatgtttgatttgatcactgttccatactgaaaagtgcgttcttatgtttaaactatagtcaataaagatgtaggtgtcacttttatatgctacttcatgtagtttgtcagtttggaagtaagactgaatacctattttgcagatggttaagcacttacgttggtattattacctctaaaaagcaatcaatcactgttctctttattctagatgcaatattttctgcatccctactaaacaagtaaacatctctgtctttaaacattaaaaattaataaagtgagtttatgttttttaaaagatcaagacaagttaagctagtgtaaatttctgattgtgctgcagttttccctttcatctgcgtgtttgttcatagaccaaactaaacggatatttcgagataaagggatgtggaggggtgttcggccctcccctgactggtttccaaataacttcccaattttaaaataagctagaaactgctgcttagttagaattgatttattcaactttttagaggctctccacagtttactgagtatgtgtgttttgtgtgtccgtttttgtggctgttaacagttgctgttgcaacttttctgtaaaccccaaagtattctaaaattaaaaggttattttttagaaaaacttgtatcaacaaactttcttaggctattgtttactcagccctggtaacttgaattgtggatatcgaaggtgatgactaggtttctaaacaaggtgtcagagaggaaattgggtggcaatcttaagtctagccagtgacacttactagttgttgtactctggggcttctgttagtagttagttgtttgaagatttttatttaaaaatgcagtgcatataacaagtgcaaattttaaaattattttggttgtttaataaaaccaggcaatattaccttttccgtatgcatttatttaatttcttttttaatgttagttacaaaatatttcagacttacaaaaagttattaagaacaatgtaataaacatttgtatattcatcacccagattaagaaacaaaacaatcattgctggagccccccttttccctctccatcccttttcctccagccactgttaaccattatcttgaacttgatgtttatgatccgtatacatttcaagtcttagaagagatttactttatcaccaatgaatagaatagttctttgcttgtgtctaatatttacaataatttttgtgtaaagagattttttttttcagattagcctttttctttcaaatagccttcctggtgcgtctgtcattaagcattaagctttagtaaataggcaacttatgagttgcgaggtcctcaggggttggtaagccttttctgtaaagggcccagagaaataaatatttattttatttaaatactttaggctttgcagatcacatgtggtttatcagttttttttgagacggagtctcgctctcttaggccgtagtgcagtggtgcaatctcagctcactgcaacctccgcctcccggattcaagcaattttcccacttcagcctctcaggtagctgggattacaggcgcacaccgccatgcctggctaatttttgtatttttagtagagatggggtttcaccatgttggccaggctggtctcgaactcctgacctcagagaatccacccaccttggcctcccaaagtgctgggattataggcgtgagctactgtacccctttacatgtggtttctgtcacattattttctgatctttttttttttaagaacactttaaaactgtaaaaatcattcttaaatctgtcagggcaggggccaggtttgacccacaggttaaagtttacagatccctacataatgcgctactggttctctttcttatgtccctcctattccatcccctatttttttcccaatttaaaaagtcattttcaaacacacataatataaaatttaacatcttaaccacttttaagtgtacagttcagtgatattaaatacataatattctgcaacaattactaccatccatctccataactcttttcatcatgaaaaactgaaactctatacacattaaacaataactccccatttccctctcccatcaacccgacacctaccattcgactgtcttatgattttgactactctaagtacttcataaagtggagtcataatacagtatttatccttttgtgacttgctcattccacttaggcataatgtcctccaggttggaccatgttgtagcaaatgtcagggttttcttcctttttaaggctgcatagtatttattatatgtatataccacattttgcttgtcccttcatatgtcaatggatacttgagttacttctttttttgttgttgttgtttttgagaccgagtctcgctctgttgcccaggctggagtgcagtggcgcggtcttggctcacactgcaagctccatctcccgggttcacgccattctcctgcctcagcctcccaaggagctgggactacaggcgcctgccatctctcccggctaattttttgtatttttagtagagacggggtttcaccatattagccaggatggtctccatctcctgaccttgtgatctgcccgccttggcctccctaagagccgggattacaggcgtgagctacggagcccggccttgagttacttcttacttttagctattatgaataatgttgctatgaatatgggttttcaattcttttgggtatttacccagaattgtaattgctggatcatatgataattctattttaaagtttttgaggaaccgacaaactattttccacagtggctggaccattttacattcctaccaacagtgcataagggttccaatttctccacatcctcaccaacgtttattttctgtttcttttttttttttcaagtagccatccattgggtgtgaggtgctatctcattgtagttttgatttgtatttccctaatgattaatgatgttgagcatcttttcatgtgtttactggccattttgtgtatctttggagaaatgtctgtttaagtcctttgcccatttttaaattggtttgcttttttgttgttgagttttaggaattttctatatattttggatattttcagatacataaacggcaaaaattttttccccattactgtggtttgcctttttactcattgataccgtgtggtcttttcctttctttttctttttggaaccagtgcatggcctctttgttgattctgtgtttggccccagtgcagcctgttctgtgctatgtgtctgcagtgctgaaaccaggcctacccagcaccatacagaagtccaggctgtagataccaatgcatgggtcacatttgatacccaaatctgtgtgttcctggatctccaaaccaaagtttccagtatctgagaagttgttctttcttgattcacactcctgcatctttagacctttcttcagggtttcttctgctttggccctttgtgcagtgggtggcaatcttcacttctcctgatgccaaaggatctgacaatgtatttgactttggagaacacaggggtctggcctatgagctgctccaacaccttggctgctggggtcagtcatctccagtctcctccatacagatgttgagacagaaaatcgttctgtcacccaggctggagtgcagtggcacagtctcggctcactgtaacctctgcctgtcaggttcaagcaattcttatgcttcagcctcccaagtatctgggattacaggtgtgcaccaccatgcctggctaattttttgtatttttagtagagatggggtttcgccttgttggccaggctggtcttgaactactggcctcaagtgatccacccattttggcctcccaaagtgctgggattatgagtgtgagccctcatctggccagagttctcttttttttaccttgatcttgcactatgatggagaaaaggaagataaagtctttttttttcccttgggtttgtttgtttgtttgtttgtttgttttttgagacggaattttgctctcgttgcctaggctggagtgcattggtacgatcttggcttactgcaacctccgcctcctgggttcaagccattttcctgcctcagcctctagagtagctgggattacaggcatgcgccaccacgcctggctaattttgtatttttagtagagatggggtttcaccatgttggtcaggctggtcttgatctcctgatctcaggtgatccgtccaccctggcctcccaaagtactgggattacaggcgtgagcccgtgcctgggctattttttttttctcccctttaaatatagtatcttgctttattgcccagacttgttgtgaactcctggactcaaatagtcctcctacctcagccttccaggtagctgggatcacagggatgctgtcttttgatacacaaacattttaaatttttatgaagtccagtttgtctttttgtttttgttccctgtatctttggtgttatatccaagaaatcattgccaaatccattgttgtgaagcttttgccttatgttttcttctaagagttttatagctttaggtcttacatacatttttgatccattttgagttaatatttgtatattgtgttagataagggtccaacctcattcttttgcatatggatatttagtttcccagcaccatttggtgaaaagcttgtctttttctgattgaatggtcttggcaaccttattaaaaatcatttgctcatatgtaagagggcttatttctaagtgctgttatgttccattggtctataagtctgtctttatgtcagtaccacatggttttgattattgcagctttgtagtaagttttgaaatcaggaagtgtgagtcctccagctttgttctttttcaagattgttttggctatctggactcccttgggattccatatgaatttgaggatgaatttttctatttttgtaaaacacgtcattgggattttaatagggattacattgaatctatagatcactttgggtagtattggcatcttaacaatattaagtctttcagttcatgaacaagggatgtgtttccatttatttatgccccttaatttctgccagcagtttttttttgtttgtttttgttttgagatggagtttcgctcttgttgtccaggctggagtgcagtggcacaatcttagctcattgcaacctccacctcccgagttcaagtgattctcctgcctcagcctcctgagtagctgggattacaggtatgtggcaccacgaccagctaatttttgtatttttactagagacaaagtttcaccatgttggtcaggctggtcacgaactcttgacctcaggtgatccacccaccttggcctcccaaagtgctgggattataggcgtgagccactgcgcctggcctcagcagtgttttatagttttcattttataagtctttcacctccttggttaaattaattactaatattttattctttttggtgctattttaaattgagttgtttttgtaatttcctttttagattgttcattcttagtgtataaaaatgtaactggaggctggacgcagtggctctcacctgttatcccagcactttgggaggcaaggtgggcctcccaactcctgatcacgagatcaggagttcaaggccagcctggccaacatagtgaaaccctgtctctactaaaaatacaaaaattagccatgcatcgtggcgcgtgcctgtagtcccagctacttaggaggctgaggcaggagaatcgcttgaacctggaaggtggaggttgtggtgagccaagatcgtgccactgtactccagcctgggcaacagagtgagactctgtctcaaaaaaaaaaaaaaagaaaaaagaaacgtcgctggattttgcttgttgactttctatccagctactttgctgaattcacttattagttctaacagtttttttttgtgtgtgtgtaattttagagttttcttttctttttttttttttgagatggagtctcgctttgttgccaggctggagtgcagtggcgcgatctcggctcactgcaacctctacctcccaggttcaagcaattctcctgcctcagcctcccgagtagctgggactacaggcacacgctacgacgcccagctaatttttgtatttttagtagagacggggtttcaccatgttggccaggatggtctcgatctcttgacctcgtgatccacctgcctcagcctcccaaagttctgggattacagccgtgagccactgtgcctggcttttttttttttttaattaactattgaacttctgtttattattattattattatttatttatttattattttttgagatgaaatctcggtctgttgcccaggcgggagtgcagtggtgtgatctcggctcactgcaacctccgcctcccgggttcaagcaattctgtgcctcagcctccggagtagctgggattataggcgctcgccaccatgcccggccaatttttgtatttttagtagagatagggtttcatcatgttggtcaggctggtcttgaactcctgacctcgtgatccgcccgcttcggcctcccaaagtgttgggattacaggcgtgagccactgcacttggccttatttttattatttttttcatcaacttttaagttctggggtacatgtgcatgatgtgcaggtttatcacataggtaaacctgtgccatcacagtttgctgcacagatcaacccatcacctagctattaagcccagcatccactagctattcttcttgatgctctagctccttttgccccactgaattttagggttttctttcttttctatttttttttcttttgagacagactctcgctctgtcaccaggctggagtgcagtggcacaatcttggctcattgcaacctctgcctcctgggttcaagcgattctcctgcctcagcctcccgagtagctgggactacaggcatgcgcccatgcctagctaagtttttgtagttttagtagagacagggtttcactatgttggcaaggctggtctcaaactcctgacctcaagtccccttggggttcctgaagtactgggattataggtgtgagccaccacgcccggccagattttctatataaaagatcatataatctgcagacagataattttactttttccttttctttctttttttctttttttgagatggagtctcgctctgtcgcccaggctggagcgcggtggcgccatctctgcttactgttacctctgcctcctgggttcaagcagttctctgcctcagcctcccaagtagctgggattacatgcacatgccaccacgcccagctaatttttgtatttttagtagagatgggagttcatcatcttggctaggctggtcttgaactcctgacctcgtgatccatccgccttggcctcccaaagtgctgggattacaggcatgagccaccgctcttggccctcaaccttttccttttcaatttggatgccttttatttttatttttcttccttttttttttgagatggagtctcgctctgttgcccaggctggaatgcagtggtgcaatctctgctcactgcaacctacgcctcctgggttcaaacgattctcctgcctcagccttccgagtagcttgtactacaggcatgtgccaccataaacagctaattttttttttttctcgtatttttagtagagacggggtttcgccgttttagccaggctggtctcgatctcctgacctcgcgatccgcctgcctcagccttccaaagtgctgggattacaggcgtgagccaccatgcccggcccttgtttttctttcttgcctaattactctagctagaacttacagtattatgtcgaatggaagtggcaaaagtgggcattgggcatccttgtcttgctcctgttcttttatttgttagtttgtttgagatcctcctgcctcagtttcctgagtagctgggactatagacacactactacacccagctaattaaaaaaataattttttttttttttttagagatggggtctcgctatgtttcccatgctgatcctgaactcctggcttcgggtgatcctctactcttaccctcccatagtgctgtgattacaggcatgaaccactgtgctggccctgttcttgtttttagaggaacattcttcagtctttgaccatcaattatgtttgctgtgggtttttcatatgttgcttttattttgttgaggtagtttcactctattcctagtttgttgagcatttttatgactaatgggttttgaattttgtcacatgcttttcctgcatcgattgacatgattctgtggtttccttcattctgttaatgtggtatattacattgatcaatttttacatgttggaccatccctgtattccaggaataaatcccacttggtcatggtgtataatccttgtgctgctcagttcaatgtgttggtattttgttgaggatttttttttatcagtgttcataagggatagtgatctgtagttttcttgtagttgcctttgtctggctttggtatcagggtaatgcttgcctcacaaaatgagttgggaagtgttctctcctttgccagattttttctgggaaaagattgagaagaactggtattagatcttcttgaaatgttttatagaattcacctatgaaactatcagatctagggcttttctttgtcaggagatttttggttagtgagtccatctctttactggttatagctccattcagaatttccatttctttgtgatttagtctttgtaagtattgtgtttctaggaatttgttcagctgggttatccgatttgttggcatacaattgttgaaaatactctttcaacaataagagagaagacacaaataactagttcttttgtttccagttccttaagttgtaaagttagggtgttgatatgagatctttcttgctttttaatgtaagcattcatagctataaatttcccccttagcactgcttttgctgtgtcccgtaagttttggtatgttgtattttcattttcattaatctctaaaattttctaattttccttgtgatgtctttgaaccctggttacttaaacacacacacacacacacgtgtgtgtgtgtgtgtgtgtgtgtgtgtgtggttttttgtttgttttgagactgagtttcgctcttgttgcccaggctggggtgcaatggcgcgatctcggctcactgcaacctctgcctcccggttcaagcgattctcctgtctcagcctccagagtagctgggattacaggcgcctgccaccacgcctggctaatttcacacacacatttaaaaaatacatctacctgcttttacttcagaatctttgcaatttctgttctctctgcctgaaaattttttccaccaaaatatctacagggcctggctcccttgctttttaggttctgcttaaatatcacctgcgtagaagcattccctaactaccctaaaatagcaaccaactatcttccaccctcaacacttcctatcccccttaaactgctttcttttcttttctttttttttttttttttttgagacagagtctcgctctgttgcccaggcctggagtgcagtggcgcattcttggctcaccgcaacctccacttcagcctcccaagtagctgggactgtaggtggctgccaccatgcctggctaatttttttttttttgagatggagtctcactctttcacccaggctggagtgtagtggcacagtctcggctcactgcagcctccatctcccaggttcaagtgatttctggctaatttttgtatttttagtagagatgaggtttcaccatattggccagggctagtttcgaacttctgacctcaagtgatctgcccaccttggcctcccaaagtgctaggattacaggtgtgagccactgtgcctggcctaatttttgtatttttaatagtgatgggtttttactatgttggccaggctgatctcaaactcctgacctcaagtgattcacccacctcagcttcccaaagtgctgagattacaggcgtgagccactgtgcctggcctgctttattttcatttctaatttatcagcatctaatatatttattcattttatagtcatctcttccttcaactaagttaaaagctccctgagcacaggattttggtgtttttttctttcctttaactttgtattgttcattgctgtatctccagtgtctagaaaattacctatcacatagtaagtacttgatgaatatttgtggaatgagttaatttagcacttctccacaggataggacttaggtttttttaatcctcaatctcccttccctcaccattttgattgtttgaatttttatataactatggtgaagccaacaaattgatggatttgttagtgtgagcagccgaaactttgcaatttctaataagttagagaagtctgggtaggaaactaatgacttggcagtactctttcttagagtacacatagtccctaaagcttctctgagaattttgataactttgaggaatgtgtgatctgtatgaatttcctatcacttagtcctgacaatgtgaatggtattcatttggtaacttaattttatacgtccaggcaagatactagtttaggggatgccaaaaataatagactaattggaaaagctttagccacatgagagcaattcactccacttgatgctcttggcctacctcagtataagttggttctaccttagttttgttgaagttttaataatactgtacattcatgttggttatatgcattgtgtaagttttagtatagttggcaaatgaaagcattaccagatactacctgggagttaagtttcctaggatcacagatttggtcttctgatcacttggaagtatacttagagtgggctgtgccaggggaagttgaggtatccttcttaaataagtagcaacttggtttatctagtgataagggggaaataatttcctgtttggcactttctccaaaatatatgatactcaatgggaaaaatgaactcaggtcaagattatgtctctccctttggcccagacatgtattgagtatataattgtcttattgatgctactctgtggactgtgatattagttttcccataattcctcttaggatgacatttattaggcaatgtagtttaacagatatttaagaacctactgtgtgctaagcatggtagttgttgctggggaaacagtaaactagacagtatttctttctgtagtgatctgaggtttagtgggtaacacattaaaaaaaaaagataagagaggtgatgtttagaaaaggtgtataaagggtgctgtaggaatatatagcagacatttaatgtggtcttggttggagcaggtgggggaggcacataggatagaaaggacttcctgaggaaataatcatttcaactaaatacctactcaggcatttccgtagaatgaggactcttgatccagtcggcagtgtagaccttctgtgtctattcactcatttaaaaatggggctaataatattaccaacctcacagtgttgtgtggacaaactgagtgagcacaatgcaaagcacttgaaacaataagtacctggcacatagtaagtactcaacttattagtcattatttttatgtactttttattttgtgccaggtatctactggcagattagtattttgaacacaaatttgacatgtttttttctactacatcataacctaatttgatcggatttttttttttttttttttttgagacggagtttcgctcttgttgcccaggctggagtgcaatggcgcgatcttggctcaccgcaacctccacctcccaggttcaagcaattctcctgcctcagcctcccgagtagcagggattacaggcatgcaccaccatgcccagctacttttgtatttttaatagagacagagtttctgcatgttggtcaggctggtctcgaactcccgacctcaggtgatccgcctgcctcggcctcccaaagtgctgggattacaggcgtgagccactgcgcccagccttgatcagattttaagaataggagaaatggaattctgaaaaataagtttggcatttttacaagttaaaacctgttagtggctgggcacagtgtctcacttctgtaatactagcaccttgggaagctgaggtgggataatcacttgagcccggaagtttgagaccagcctgtgcaacacagcaagaccccatctctaccatcaaaacaaaacaaatctattcgtatctgctctaagaagctgccagaattgtaatgtcttaacatatctttgaacatttaaaaaattatatttgtgaaacttgagacacttataattttactgtctgctttagcaatatcacttagtcctgatttaatctccatcaccaacaatgtggtcaaaatttcgcatttttcttgacaaatgtagttagtgaaaatgtcattgataacctgagaactaagagctcttgaatgactttgtgtatttctttttatagaccatttaatttggcagagcggaaagctagcgcccattcaatagtagaatgtgatcctgtacgaaaagaagttagtgtacgaactggaggattggctgacaagagctcaaggaaaacatacacttttgatatggtaacatatggtgcaatttctttattatccactaatgtaaaataattttaatatacatattttacctggaaaatggtgtatacttagaaatttcagttgtctctgaattgtcagatggcttctagtgggctgaattatgaattagttaacatacgaaaaacaaaattattaaaatgagtaattttgaggttgatttttttttttttaatttttttcgttaggtgtttggagcatctactaaacagattgatgtttaccgaagtgttgtttgtccaattctggatgaagttattatgggctataattgcactatctttgcgtaagtaaaagggtgttttttctgatttatgaaaaagcttaaatgcttgtgttttttgttgttgtttgtttgttttttgagacggagtttcactcttgttgcccaggctggagtgcaatggcgcgatctcggctcactgcagcctctgcctcctgggttcaagcaattctcctgtttcagcctcccaagtagctgggattacagctgcctgccaccatgcccgctaatttttgtatttttagtagagacgtggtttcactgtgttggccaggctggtctcgaactccggacctcaggtgatccgcccacctcggcctcccaaagtgttgggattataggcttgagccactgtgcctggcttgttttttgtttttctagtctatcactaagagtcatatgggtgcatgtttctttttgatttaacacttgttaatctttacaggtatggccaaactggcactggaaaaacttttacaatggaaggtgaaaggtcacctaatgaagagtatacctgggaagaggtatttattgtttataacatacttttatctctaatgtgactgaaatttaactgtataaaacttgtttgagggcctctgtcttggaatagagatcagagtacctatgtcaaaatgaacttaggataaaccactactacagtaaaattaaagtgcatggtatgactcctgtttaagaaacagcctcaatggaagaggaaggaccaatatatatggcacagttatatgataaaagaggagtctatttatgacagaatggttggagcagaatattgtagaaaagttggaatatgagtgaagcttgaaggcagggagggctttgtattgaaggaatgggtctcagaaagttagcatggccaggggaagtatagtactttattcatgatgatcctaagtgttcaagaaattaagatgaatgtattgtttaatattgcagaaagcatatactatgttttacaaagatttccatgaatttaagtgagtttaataactaagagagagaaccaatactggaagaaagttgaaagaagaccaagacaagttgaactagagctgaagtgttaaaacttttaaaaaaaagtttagttttaaatttagtaatgtgtttaaatttaaatgagtttaataactagttaattggtcgggcacggtggctcatgcctgtaatcctagcactttgggaggctgaggcgggcagatcacctgaggtcagcagttcgagaccagcctggccaacatggtgaaacccggtctctactaaaaatacaaaaattagctgggtgtggtggtgcatacgtgtaatcccagctacctgagaacgagactctgtctcaaaaaaaaacaaaaaaacaaaaaaccaaaaaactagttaatttaaaaaaaaaaagaattttttttaatttttttttttttttttaaattttaaagtgatggggtcccactgtgttccccaggccagtcttgaactcttgggcttcaggagtcctcccacttcagcctcctgagtagctgggattagaggcacatactaccttgcccagctaattttccaaattattgacagttgggtagaacctttcttctagtggttacataattgagtcattaacttactttacatatatagataataaagttatgaaattgttaccataggagatatggaataggcttaaagcatagtttcgctgggcagaattattgaacttggcgttttttttttgagacggagtctcgctctgtcgcccaggctggagtacagtggctcgatcttggctcactgcaacctccacctcccgggttcaagtgattctcctgcctcagcctcctgagtagctgggactacaggtacataccaccaagtccggctaatttttgtatttttagtagagatggggtttcaccgtgttggccgggatggtcttgatctcctgaccttgtgatccacctgccttgacctcccaaagtgctgggattataggcgtgagccaccgtgcctggccgaacttggctttttaagtagataggttccattggtttctatgtaatgctcagggatgaagatggctaagaagtgtgacaggtttatggagggtgtgaagactactgtagaacagactgttgtaaatgacttctctaacattaggttagttgtttctttttttgttttgttttaacttgctttgccatacttatgtttaaatatattataaaggaggcccatgtattttaactgccacagtaaatggcattcttcctttatattagtccttattataatttcaggatcccttggctggtataattccacgtacccttcatcaaatttttgagaaacttactgataatggtactgaattttcagtcaaagtgtctctgttggagatctataatgaagagctttttgatcttcttaatccatcatctgatgtttctgagagactacagatgtttgatgatccccgtaacaaggtaattcagtctttgagaatgaaatgtctctgaattttaatgtgtgaggctttgagaagtcagagagagagagagagagagagagagagagagagagagtgtgtgtgtgtgtgtgtgtgtgtgtgtgtgtgtgtgtgttttaaccaatctaatggatgttcttttggtattttggtcagagaggagtgataattaaaggtttagaagaaattacagtacacaacaaggatgaagtctatcaaattttagaaaagggggcagcaaaaaggacaactgcagctactctgatgaatgcatactctaggtaagaaagccatagtctcttccctagccccattttcttttaagaagaattaggaacttggagaaagtcaaattggggtgggtcagggtatgtgggtcacgtacctagagtttgtgttataaggaggggtcattggtaattggcttgagatttatatggaaggaaccaatattggaagaatgttgaaaggagaacaaagataagttgaaccatagctgaagtattaaacttttttttcttttttgagacgaattttcgctcttgttacccaggctggagtgcagtggcgcgatcttgactcactgcaacctctgcccaccgggttgaagcaattctcctgcctcagcctcttgagtagctgggattacaggtgtctgccactacgcccagctaatttttgtatttttggtagagatgtggtttcaccatgttggccaggctggtctcgaactcctgacctcaggtgaaccacctgccttggcctcccaaagtgctgagattacacgtgtgagccacggcgcccggcctaaacttttttaaagtagaagaatccttttattctagtaacatgatatatggaagcccaggataaaatgtggctgctatagttgattttggaatgggacgctctgaggcttacctccttagccttatgaaggggtccctgaggcacttttgtggagccccctactgatattagaatatagtttgaaaacccttgcattgaataaggattagaagttaggtcttttaaaatggctttattttagtgtgggagacagatggtcactaacactggctttcatggggtgaaagggatgatttttttcgctctaaatatcttttaccgaaatataaaattcctttttaaaaaattgtttattttcctctcttaccactctattcattgagatataaaatccctgtcataaatttacgtaagttagaaactccttttttcttgtaaagacccgtacaggacaaattccaaattctacagatatagtttactaaaacagaagtggtttttttgtgtgtgtgtgtggtctttaaacctcagaatgtaatagaaaaagcaatggattgcaattagatatttgcgtgtagtctcagtttcgcggttaattcagtatgtgactttttgtaaataagtgaatttatctgcttatcagtttctctgagctacaaaattattgttaggattagaagtcttatttcttttctggcttgtagttgaaaatttctataaaatgccataacaattacagttgcaactctaaaaaagtttgcatttaaagaaagaagaaaaatataacataaaagtgattaagatcatggaattttggatgatttcaaaattttaattaaattttcacttaatggctttccaataaaatggaaattttattctgtggttgattataacttaatttcatgtagaattttgagaactgaactaaagactaggtaaaatttctttaggtacatttcactaaagtataaaatttctatttttccttttttcttgtatgtagacttgtataaaggtcactttttatgaaggtatgtgacaaagaggagaagctaattaattcagttttcccaaattagagctaacttcaatgcttatttgtattaattgcctaatctggattaggaatgggtagataatggtagaaaaacatgagatgaatagtattattattattattattatttttgagacagagcctctctctgtcccccaggctggagtgaagtgatgcgatctcggctcactgcaagctctgcctcccgggttcacgccattctcctgcctcagcctcctgagtagctgggactacaggtgcccaccaccacgcctggctaattttttgtatttttagtagagacggggtttcactgtgttagccaggttggtctcgatctcctgacctcgtgatccgtccacctcggcttcccaaagtgattacaggcgtgaggcaccatgcccggtggagatgaatattataattcagatctatagtttacatttatgtttttccttaggtcttcctccttttctgtaattttaaataatttaaataattttataaaaatgatacttggctgggcgcgatggctgacgcttgtaatcccagcactttcggaggccaaggtgggtggatcacttgaggtccggagttcaagaccagcctggccaacgtggtgaaaccccgtctctactaaaaatacaaaaattagcttggtgtggtggcgtgtgcctgtaatcccagatactcggtaggctgaggcaggagaactgcttgaacccaggaggcagaagtttcagtgagctgagatcatgccattgcactctagcctgggcaataagtctcaaataaataaataattaaaaaagatacttaattttttttttaagtaacatgaaagtacaaagaagaaaattgaaacttaccagattctctgtcaattgtcagtgatattaacaaacataataatgttcaccaaatgccattggatacagaaagaatgtctttggtcatctgtataattttttttccccctaagataaaaagcacagtatttgttttgttttttgtttttttgtttgcttgtttgtttttttgtgatttttttttttgagacagcgtctcactttgtcacccaggctggagtgcagtaactcaatcatggcttactgcagccttgacctcctgggctaaagtgatcctcccacctgagcctccagggtagctggaactgtaggagcgtgccaccacgcccagctaatttttaaatttttttgtagagatgatggtcccactatgttgcccaggctggtttcgaactcctgagttaaagtgaccctcctaccttggcctcccaaagtgttgggattacaggcatgagctaccacccctggcctgaatatcagtatttagcataaggtagacttttgaacattttataatctagcagtgattatcttgtagtgttttagtaatcatgctgtttactatttctgctgttaggggataggagtcatctatttctgatgacagtctcaaagcagagaagtgtacttgtgcatgtacacaacagctgacatggatgggaaggtggaagagtaaactaatgccttacctggtaccatttgaatttatggtaatgacatatttcaaatggttcttatgaatagaagatgattacaagccatctcttcttgacataccaggcaactgtttcgaccccacccacatccagctttcagaggtgcctcaggattctaagtcttttagagagcttcttattgatgcctcttttgcaggcagtagatatgagaaaacaaaatcctaatcactgttctatctatctcctatcttccaaaatattcttgatatctcctgtctgatgttatctttctctactcatgtggatttagatcttctttcctgttttcagtatttcagaagcagcaaatgctattttacattataatgactgggcaacttgatattgttttctagtcgttcccactcagttttctctgttacaatacatatgaaagaaactacgattgatggagaagagcttgttaaaatcggaaagttgaacttggtaagcatccaccttaatactactgtttcactcttaaacaccttatagagcagcttgaaattttgtccttgagacaaaatttttgtggtcactgggtgattagctttgtagtgggagaagaaatttgttaattacagaaaaaattattttgctggcgatttaatacattatgtatcctgtgagaatgaaagtctttgaatccaaatccaatagactcactttttatttttatttttaaaattaaaggttgatcttgcaggaagtgaaaacattggccgttctggagctgttgataagagagctcgggaagctggaaatataaatcaatccctgttgactttgggaagggtcattactgcccttgtagaaagaacacctcatgttccttatcgagaatctaaactaactagaatcctccaggattctcttggagggcgtacaagaacatctataattgcaacaatttctcctgcatctctcaatcttgaggtaagccctttgaaaggaagctgcaagtgtagtagctgtaattcttatttggctattatatattttaaaagttcatttactaggatggacacagtgactcacacctgtaaacccagcactttggaagtccaaggtgggcggatcacttgagcttaggagtgcctgggcaacatgccgaaaccctgtctctaccaaaaatacaaaaaattagctgggtttggtggtgtacaactgtggtcccagctacttggggggctgaggtgggaggatcacttaagcctgggaggcagaagttgcattaagctgagatcatgcaactacactccagcctgggtggcagagggagaccccatctcaaaaaaaaaaaagtatgtgtataaaaaaaaagaaaagtatgtgtatacacacacacacacacacacacacacacacacacacacacacacatatagtagggaaaaaaagttcatttagtagcttcatttttttttttttgagacaaatcccactcttgtcccccagactggagtgcgatgacgcgatctcggctcactgcaacctccacctcccaggttcaagcgattctcctgcctcagcctcccaagtagctgggattacaggcacctgccaccacgcccacctaatttttgtatttttagtagagacgtggtttcaccttgttggccaggctggtctcaaacccctgacctcaggtgagccgcccgcctttgtctcccaaagttctaggattacacgcgtgtgccactactcagcctagcttcgttcattctatgctataatgtaaaagaatctggacattgcatatgaatatatacaggaggacactcctgaagaagttatctttttccttcctggcagagtttttaaccttaaaaagccagtttcttaatggctttttccacacagtcttcaaagaaaattgctgtggtcattagcagtgggtggtgtatggagatttaattgaggacttagaagcaggccaagtgaatgctcgctagtgtggtagaggctgcttagagaacactgaagatggcgttggatgtgtgagaacagagaggaaaaccaagaaaagtaacaaagatggtaaaatgtacgcttattttattgctatcatctgccttaagtggaaattttatttatttattaatttttttacttttagaggtagagtctcatactgttgccaaggccgcagtacagtagcatgatcatggctcactgcaacttaaattcctggactcaagtgattcccccaaccacagcctcctcctgagtagctagtactacaagtgtgagccaccaggcctggctaagttttgttttgttttgttttaaatagagacagaggtctcactatgttgcccaggctggtcttgaactcctgggctcaagggatcctcctacctcagcctcccaaaatgctgcgattataggcatgagccacctcacttgacctaaatggattttaaaaagcttttttaggccaggcacggtggcttacgcctgtaatcccagcactttgggaggctgaggtgagtggatcatctgagctcaggagttcaagaccagcctgagcaacatggtgaaaccccatctctactaaaaaatacaaaaaattagctgggcatggtggtgcgcgcctgtaatcccaactactcaggaggctgaggcgggagagttgcttgaacccaggaggtggagattgtagtgagccgagattgcgccattgcactcaagcctgggtgacagagtgagactctgtctcaaaaaaacaaaaaagcttttttaaggtgtccaactgccccttcattaaaaaaaaatctttgttgagatttaattcacataccataaaattcactgatttaaagtatattaatttaataattctagtatatttacagagttgtccaaccatcaccaaaatctaagttttgaacattttcataacctcagaaagaaagcctgtacccattgaaattacttttccatttgccccactcccatcgctactgctttttgcatctatatatttgcctattctgggtatttcatataaatggaattacgtaataggtagttttttgtgactggcttctttcacttagcataatgttttcaaggttcatctgtgttgtaccagcaatactttattcctttttacaggtgaatattattctatagtatggatatgggatttttttgtttttttttttttttgagatggagtctcgctctgttgcctaggctggagtgcaatggtgtggttttgactcactgcagtcttcgccacccgggttcaagtgattctcctgcctcagcctcctgagtagctgggattacaggcgccaccaccatgcctggctaatttttgtatttgtggtggagacagggtttcaccatgttggccaggctggtctcgaactcttgacctcatgattcacccgccccggccttccaaagtgctgggattacaggtgtgagccactgtgcccggctgatataggacattttgtttattcatcagttggtagattgattgagctttgtggtttttttgttttgttttgtttttttgttttttttttttgagacaaggtccctctctgttggctggagtgcagtggcacattcactgtaacctcaacctcctggccttaagtgatcctcccaccttagactcccaagtaggtgggactataggcacatactactatgcccagctaatatttatttatttattgtagaaacaggatctccctatgttgccaaggctggtctcgaattcctgggctcaagtgaccctcatgccttggcctccaaagtgctggaattacaaatgtgagccatcattgagtttaagaatagtctaaaggaaattatcctaagggtcgagactctgaaaattgaagagaagggaaaaaaggattgaacaacttcctttttaaaggttgggcatagtggtcttaatgactagattttaaaattagatataactataaaatattacttgtaagttattatataacatattttagataacagaactacattattctcacaatatcttcagtaattgacctttcctttccatgacaggaaactctgagtacattggaatatgctcatagagcaaagaacatattgaataagcctgaagtgaatcagaaactcaccaaaaaagctcttattaaggtaactgtgaatttttgtagagtaatgtaatcttgtttgacaaatgtgaaaataagaaactgaagtgggagataatagttaaacaagatttgttaaattgcccatggaaggctttttatatagtgatttaaactaaatgtcttacatgttaacatatttttttctaatgctagtatgttgactttaccaactttatcaactgagttggtactcttagcaaaattttcatttatttacatttacaaaatttatttatttgcatttttgaggtataatttacatgccataacatccacctaatgtaagcatacaattcaatgatttatagtgcatttacagagttgtggagtataaccacgatctagttttagaaaatttgttatcactatccagtttccctttgctcctttacaatcatgtggccactgacctgctttctgtctacagatttgccttttctggacgtttcctataaatggaatcatgtaatatttggtcttttgcatctagtttcttttgcctagcataaccatttggggttccacttataacatgtatcagtagtttatttctttttattgctgaatagtattcaattatatgctgataatatgacatttggatcatttccactaatgccattgtgaacatttctgtacatgtctttgtgttgatgtgttttcatttcttttgggtagatatctagggatttaatttctgggttgtatagtaagtttatgctctaagaaacttttccatgtagctgtaccactttgtatttcctacagcagtttatgaggtctgcaatttctccacctcctctttaacacttgttatggtcggtctttttaattttaaccattctaaggagtataaaatggtacttcagtacggtttttttgtttttgtttttgtttttttttttgagatgaagtctcgctctttcacccaggctggagtgcagtggcacgatcttgactcagtgcaacctccgcctcccaggttcaagtgattcttcgacctcagtctcccgagtagctgggactacaggtgtgcaccaccacgtctagctaatttttgtacttttagtagagatggggtttcaccatgttggccaggctggtcttgaactcctgacctcgtaatctgcccgcctcagcctcccaaaatgctgggatcacaggcgtgagccaatacgcctggccccaatatggttttaattagcatttccctaatgactaatgatgttgaacatcttttcttgtgcttattatctatttgtttatcttttttggtgaaatgtctattcaaatgctttgcccaattttaattggtttgtcttattaagttgtaaggagttcatgtagtctagatacaagcccttaatgagatatgatttgcaaatatttcctcccagtctggctttactttttcctttccttgatgttttttttttttttaaataaagtttttagtattgagatgattatagattcacatgcagttataagaaataatacagagaaaacaggccaggcacggtggctcatgcctgtaatcccagcactttgggaggccgaggtaggcggattgctttagatcaggagttcgagaccagcctggctaacatagtgaaaccctcatctctactaaaaatacaaaaattagctgagcgtagtggcacgtgcctgtaatcccagttactcaggaggctgagacaggagaattgcttgaactcgggagacaggttgcagtgagctgagatcgagccactgtactacagcctgggagacagagtgaggctctgtctcaaaaaaaaaaaaaagaaaaaaagtaataatacagagaaatcctttgtacattttgttgaactatagaatattaccacggggatattgatattaataacaatccactaatctttcccaattttccttacatgtgtatgtgtatttaattctagacagttttgtcacatgtataggttcatgtatttaccaccacaatcaagatactgaacagttccatcaccacgaggacccttcatattgctcttttgtaaccacttttcttcccaccatatccttcctttcctggtacccagtaacctgtcctctatcatttcaagactgttattgattggaatcatacattatgtaaacgtttgagattgccttatttatttatttatttatttattttgagatggagtctcactctgttgcccaggctggagtgcagtggtgcgatctcagctcacagcaacctccgcctcccgggttcaagcgattctccttcctcactctcccaagtagctgggattacaggtgtttgccaccatgtccagataattttttgtatttttagtagagacggggtttcaccatgttcgccaggctgggtctcaaactcttgaccttgtgatccacccaccttggcctcccaaagtgctgggattacaggcttgagccactgcacccagcagatctttcttttttagtactaagtagtagtccatggtgagtatgtaccatacatacagtttttgtaaccattcacttattgaataacatatgagctaatttcagtttttctgctattacaaacaaaactgctattgacattcatttataggtatttatgtaaacataaatttttatttctctgggataattgcccaagagtgcaattgctgggttgtataataattgaatgtttattattttagggaactgcctgtttttcaaattggctgtatcattttacagtgtatgagtgatctgatttcttcacatcctcaccagcatttggtggtgtaacttttttattttagtcattctgataggtgtggtaggtgatagatatctcattgtggtttttaacttgaatttttctaaaggctaatgatgttgagtgtctttttaatgtgcttatttgatgtttatatatttatgtatatatagcatatacatatattgcatatttatatataacatatacatgtatatatatatttatttcccattataatttatttggggaaatatctgtatatttgtcctgtagagttttaccatagtatcttttgacgtgttcctctgttctttgtattttctttgtaaatcggtagctgaatcttgaggcttgattaaattcaagttttgtcttatttatttttggcaaaactaattcataagcagtagtgtcttcttccatttagaagtatgtaatgtctggttctttgtcttttttttttttttttttttgagacggagtctcgctctgttgcccaggctagagtgcagtggtgccatctcggctcactgcaagcttcacctcctgggttcacaccattctcctgccttagcctcctgagtagctgggactacaggcgcctgtcaccacgcccggctaattttttgtatttttagtagagacagggtttcaccatgttagccaggatagtcttgatctcctgaccttgtgatccgcccgcctcggcctcccaaagtgctgggattacaggcgtgagccaccgcgtccggccagaggtatagttcttataggaaaggcaggacacatgcttgattaatttcctttatttgccaattttgagaataatgagttggtttcctaggtttcttagtgtcattataaactcctagatttaaactatttgtgttaacccattgtagttgttctcctcaccgatgctcagattggctcatcttaggccaggggtatgttagtctgttttcatgctgctgataaagacatacccgagactgggcaatttacaaaagaaagaggtttattggacttatagttccacatgtctggggaggcctcataatcatggcggaaggcaaggacgagcaagtcacatcttacgtgggtggcagcaggcaaagagagagagcttgtgtggagaaactcctgtttgtaaaaccatcagatctcgtgagacccattccctgtaatgagaacagcatggaaaagatccgcccctacgattcagtcatctcccaccaggtccctcccgcaacgcgtgggaattatgggagctacaagatgagatttaggtggggacacagagccaaaccatattaaggggttacatcttcaagtggcttactgagtccttttgattaacctagtaggctttgcttagcttatttccttgtcttatttgacaagatgttccgtattcatcttgaatattttctgcctcagtcctggaatcagatgcttttataaggaatcctggttcattttagtgtgaattactcctaccaacctgggtactggaggttgtggtttttcttgggaagtccatatttctagaatgagtgtatttaaaaaggagctttgaaagactttatttctaaacaaattaatattgattaaaaagtatggttataactttttatcatacttctttaagttttaaaagacataaaaaggctaactttacattttatttgttgcatgtccttcccaaactgaatgaaaaaagtactaaactgacacctacaacattcctcttgtgtaggagtatacggaggagatagaacgtttaaaacgagatcttgctgcagcccgtgagaaaaatggagtgtatatttctgaagaaaattttaggtaagcccttggctatggagttaatttccaagaataagcatttctgataacaggctatttgaagtaaaacttatgtagcagtaagtaaaatctttatatccagtgccgataaatacttcattttgtgtgtgtgtgtgttttcttttgagacaaggtctcgcactgtcacccagactggagcacagtggcacaatcttggctcactacgtcctcagtctcctgggctcaagcgatcctcctgcctcagcctcccaagtagctgggattataggcatgagccaccacaccctgctaatttttgcatttttttgtagagacagggtttcaccatgctgcctaggcttctattttgttttgacattaacaagtagctatcaaacactttttaaaaatcttttactaacttttaatttttaaatcattaattcatgtgaagtttcaagaagagtacaagagaggtttcatgtattcttcacccagtcttcctcagtggttatctcttaaataattatagtacaaggctggatgtggtggctcacacctgtgaatcccagcactttgggaggccaaggcaggcagatcacgtgaggttgggagtttgagattagtctgaccaacatggagaaaccccatcactactaaaaacacaaaattaccctgtgtggtggtacatgcccgtaatcatagctactccagaggctgaggcaggagaattgcttgaagctgggaggcggaggttgtggtgagccaagatcgcgccattgcactccagcctgggcaacaagagtgaaactctgtctcaaaaataagtaaataaaataatagataaataaaaaataggcgcgataaataaaaaataggctgggcgccgtggctcacgcctgtaatcccagcactttgggaggctgaggcaggcagatcacctgaggtcaggagttcgagaccagcctggccaacatggtgaaaccccgtctctactaaaaatactaaaattagccaggcatggtggcaggtgcttgtaatcccagctactcgggaggctgaggcaggagaatcacttgaacctgggaggcagaggttgcagtgagctgagatagcagcattgcactccagcctggggaacaagagcgagacttcatctcaaaaaagaaaaaggaaaaaataataataaaataaataaaaaataattatagtacaatatcaaagctgggaagttgaccttgatacaatatgtgtattagtttgttcttatactactatagagaaccacctgagactgggtaatttataaagaaaagaggtttaattggctcacagttccataggctgtacaggaggcatggctggggaggcttcaggaaacttacaatcctggtagaagagctaaggagaagcaagcacatattcacatggcggcaggagagagaaagtgaagaggaaagcactgcacacttttaaacaaccagatcttgtgagaactcattcactatcatgagaacagcaagggggaagtccatctttatcactcggttatctcccatcaggtccctcctccaacatgtggggattataattcaacatgagatttcagtggggacagagaaccagaccatatcaagatgtgtatatagtagttctatgccattttgtcacttgtatagatttgtgtaaccaccactgcaatcaagatacagaactatcctatcatcacaaggatctttcttgctaattcactgtagtcacactcacctcatcttttccatgattcctaacccctggcaaccactaatctgttcactttttaaagccctggagtaatttgttcaaaggaaagcttttattgaggcccattgtataaaacaacaataataacagagaaaacaaggggaagaaggcaagtgggatgctaaggactataacttgaaaattcctgattgtgtttatccttgaagatattaggaagcaagactttcacagagcattttttaaaagttaatagtgataaaagatattagacctaataataaccagaagcattttagtataatcttttactgaacttttttgtagatgttaacactctaatagtatataaatcatttaataaacttagttttttctgtgttacttccaactgtcataatgtattccatgaatgtgtaagatgccctagaatcagaacaatgtaagattgtgggttagtgaacagtttaccatcactaatggaggtgttctttttttgatgctttagaagtaaaaaataattggtgaggcactcaatcctggcctgtagtctttagaaatgatattgattattggaggctttcatctttctgattttatttttgaacttaagaagtaactttggttttcatttgtttagtcccatgattgaaaatatggtgtttgctctctttttttttaacttttattttagtttcaggagtacatgtgcagatttgttctatagatatattgcatgtaacaggagttggtgtacatattattttgtcacccagataataaccatagaacccgatggatagcttttcaatccttgctctcctcttaccctccaccctcaaagaggcccaggtgactattgttcccttcctcatgtccatgtctgctcagggtttagctcctacttataagtgagaacgtttggtgtttggttttctgttcctatgttagtttgtttaggacaatggcatccagctccatccatgttgctgcaaagaacatgatctcattctttttttttttttttttttttcgagacagtcttgctctgtcacccaggctggagtatagtggtgtgatctcggctcactgcaacctctgcctcccaggttcaagtgattctcctaccccagctgcccgagtagctgggattacaagcacctgccaccatgcccagcaaatttttttttttttaagtagagatggggtttcaccatgcaccatgttggccaggctggtcttgaattcctggcctcaagtgatcaactcaccttggtatcctggcgtactgggattacaggcatgtgccactgcacccagccatcttgctcttttttatgcctgtgtagtattccatggtgtatatgtaccacattttctttatccagtctgctgtggatggatagctaggttgattccacgtctttgctgctgtgaatagtgctatgatgaacatatgtgtgcatgtgtctttatggtagaacaatttatattcctttgggtatatacccagtaatgggattgctggctcaaatagtatttctgtgtgtgtgtggtttttttttttttttgagatggagtcttgctctgttgtccagggtggactgcagtggcacaatctcggctcactgcaaactctgccccccaggttcaagcaagtctcctacctccgcctcccaagtatctgggattataggcacccaccaccgcacctggctaatttttgtatttttagtagagatggggtttcaccatgttggccaggctggtctcgaactcctgacctcaagtgatctgcccacctcggcctcccaaagtgctggattacaggtgtgagccaccatgccctgccggtatttctgttttaagttctttgagaagtcgccaaactactttccataatggctgaactaattttcattagtagcatataagcgttcccttttctccacaactttatcaccatgtgttattttttgactttttaataatagccattctgactggtgagatggtttctcattgtggttttgatttgcatttctctaacaattaatggtgttaaacatagtttcatatgcttcttagccacatatatgtcttcttttgaaaaatgtccacatcatttgcccacttttttttttttttttgagacacagtttcactgttgcccaggctggagtgcagtgtggcacgatctcagctcacttcaacctccacctcctgggttcaagcgattctcctgcctcagcctccgaagtagctgggattacaggtgcctgccaccatgcccggctaatttttgtatttttagtagagatgggatttcaccatgttggccaggctggtcttgaattcctgacctcaagtgatctgcccacctccgcctcccaaactgctgggattacaggtgttagctaccgtgccccgctgggtgtatatgattttatacttagaaaaccccatagtctctgtccataagctcctagatctgatcaacaatttaagcagagtttctggatacacaatcattgtactaaaatcagtagcattcctatataccaataatgtccaagctgagtgccaaacaagaatg

SEQ ID NO: 59 - DNA, 32480 bp, Homo sapiens
  source 1..32480: mol_type = other DNA
aactcccggaagcggcatccacacctgatggtgtgactcggccgacgcgagcgccgcgcttcgcttcagctgctagctggcccaagggaggcgaccgcggagggtggcgaggggcggccaggacccgcagccccggggccgggccggtccggaccgccagggagggcaggtcagtgggcagatcgcgtccgcgggattcaatctctgcccgctctgataacagtccttttccctggcgctcacttcgtgcctggcacccggctgggcgcctcaagaccgttgtctcttcgatcgcttctttggacttggcggtgggtatcatctccttacagataggcgcagagaggccaagtgacttgcccaaggtcttttgttaggacggctttttccgattggcaggcactttcgttgtgtgttcctcaaacatctttattttagaagtgagaaaacttgtgcctttttttgcagtttctcttttcctgtctgtctcctcaagtgagattttatgtgggaatttttaaagattggcgtcgccttgtagaagatgcggcttgtaattgaggccttgtaccatttactggatggaagcgcttgtttggtcacctgtccagcatgacttaggtcacttcagctaatcaaccaatcatttcttttcttttttctttttttttgagatggagtctcgctctgtcaccaaggctggagtgcaatggcacgatcttggctcactgcaacctctgcctcctgggttcaagcgattctccttcctcagcctcctgaatagctgggactacaggcgtgcgccaccacgcccggttaatttttgtatttttagtagagacagggtttcgccatgttgggcaggctggtctcgaactcctgacctcagatgatccacctgcctcggccttccagagtgctgggattacaggcgtgagccaccgcgcccggccccaatcaaccaatcatatctgagggcttgctgttaggctctgtgggtaacaacaacaacaacaaaaatcaaagtgcagtccttgaaaaaatagttgaacaattgaaaaaataaaaggttagcaggaagtgtaattgggtactagattgtgtaggggtgggggtggggcagctatatcgtttgttaagagttcacagagggaaggcatgctgaggaaggtttgaactgggggaaccctgtggatgactggaataggaaatacagggaaaggtggccgggcgcggtggttcacgcctgtaatcccagcactttgggaggccgaggcgggcagatcacttgaggtcaggagttcgagactagcctgaccaatatggtgaaacctcatctctactaatagataaaaaaaaattagccaggcgtggtgacgcgcacctgtagtcccagctactcaggaggctgaggcaggagaatcccttgaacccgggaggcggaggttgcagtgatctgagatagtgccactgcactccagcctgggcgacagagcgagactctgccgcccctaacgccccgcccccgccaaaaaaaaaaagaaagaaacagaaacagaaaaaagaaaatacagggaaaggaggttggtgggactaggtggtgggggagatccaaaccgtctgggccagaggctagaaactagtagtcattcattcactgccagagtttctgtgcaaaggttaggaagcagatgtttgggggttctttcacgttctgcagatctatatttccatcattttgtgtctcaatgacttggtagtagttttctgtcctacgacccacgatatcaagtcaacagtgtgttatcaacagaaacacataggaaagaacttcctgtggcagcaggtgactgagagacgccataaccttgcatttctttaactgatggatgagctactgcaatctttcaccttataatggcaaaaatccaggactaaccttttgatagatgatttcttctactcaatctccacagttctaatatgtttagacgttctgatttcacacaggacaatcttaaaagtcacttcactaccattctaaggaggtctctcctgtttttactgatatcatttatccctgtacttctcttgtgtaatatttattacagtttgaggattcatgaacccttgtttgtttccttgttattgcctgcctttactacactgaaagccccataacattagggaacatgtcttttttttttttttaaaccagtttacacccagcatgtattaggatacctggtaaatagtaggctttatagtaatttttgaatgcactaatgggctcatactcctttatatcctttaatcacactgccattattttatcttgggatacatgaagtagaaaaatgttttttaacctccttaattagagttacttttatatactatttatatgcatcgtatgcttcactagatttttgcctgctaaagtttatattatatacttgtttctaaactgtcatccagtactgttagcagatactgagtttctccttacttaatttggccccttattcttaattcctttcatgcctgactcccctgaatgttatacctcttttccagtaaatgtcttattttaggttctcttcactttttcccactgtgctctctcaaatgattattaagatggatctgaactaggctaccttctaaaacagaggacctatgttaagtaatgacatttcgtgcctatatactcagaattacattatttaccaacagctttttattttgggccaagatatgtccttgattgtgacctacttctttcaggctttatttaatggttggagaccccttcattgttttttaaaccaaacttttccacaaaagaattacacatataattacacatatagaacactacacaaaacataaatgtacaagttgactttttttttttttttttttttgagacggagtcttgctgtgtcacccaggctggagtacattggtgcgatcttggctcacagcaacctccacctcccgggctcaagcgattctcctgcctcagcctccccagcatctgggattacaggcacctgccaccacgcctggctaagttttgtagttttagtagagatggagtttcaccatgttggccagactggtctcgaactcctgacctcatgatccacccatcttgacctcccaaagtgctggggctacaggcgtgagccaccgtacccagcccaagttgacatattttagaaggtgaatactcccatttatctaccactgagattaaaaaaaaaagttacaataccccagaagcctccatccatctttctccataccctgctggtttggatatatcatttctatttagagcagataggttattagacctgtttcaaacttgagatttaaatttttaaactcagaattatacagttgatttttatttttacagaccatttcagagatgtcttccagaagtaccaaagatttaattaaaagtaagtggggatcgaagcctagtaactccaaatccgaaactacattagaaaaattaaagggagaaattgcacacttaaagacatcagtggatgaaatcacaagtgggaaaggaaagctgactgataaagagagacacagacttttggaggtaaatggtcttctgatcctttaaattgtaagctctccaagaaagcgatgcatgaagatttcctgatgctaccttcttactcttgccgtgttccctgtcttgtccagttgattagttttggaaagctgacattgggtttagaatcttaaattcctactttgactttgccaagtcttagatgtactttagtcattactaacttctcaccttttaaatgtaattgagtatgtgttttgaggttaccaggtactaagtttgttctggaaataaagacattgcgattaatagttttgcacctttaacatggtctgtttcacctttagtatgctctgtttctcagttatttaaaacaaagtaataacctaattcatcattcttcctatagcttcttggtaatttagcttaactacatgaatattcttgataacttttgttatgctgtatttaagattgtgaaacattctggctaactattttcgctatttttaaattgatagcataacttagaagcattcgattttccatactttttttttttttttgagactgggtctcaactctgttgcccaggctggagtacagtggcttgatcataactcactgcagcctcaaactctgggcctcaggcaatcctcctgcctgggcctcccaaagtgctggaattccaggtgtgaaccgctatgcctggccattccatgcttttttggagtactaaattactcgttgatgtactttaaggatactgtgctgggcttatatctcttttttactgtgggagaggagaaaatatttacccaatagttatataatctggttttcctgttaatttactaaatgtaaaaaatcagatctgtccatttcagagtattaaatagtgttcagatttccttatttaaaacatattttatcatgcatattggctgctatccaagtaattctggttttcaggcttttgaaggaaaaattattagacatgttggcatttacactctgttcaactatatttcggattccctaatttataatttgttatggcatagacagtaaggaagttaggaacttattagaactagagggacttaaaaatgtaatcataaatataatcacaaatttggatttaattattttgcaaaagtgcttttattgtttgtatttagaaaataaatggttaaggccgggcacggtggctcatgcctataatcccagcactttgggaggctgagacaggtggatcacctgaggtcaggagttcaagaccagcctggccaatatggcgaaacaaaaattagccggatgtgttggtgtgcacctgtaatcccaactactcgggaagctgaggcaggagaatcgcatgaacccaggagacaggttgcagtgagccaagatcgcaccactgcactccagcctgggtgacagagcaagacttctgtctcaaaaaaaaaataaataaataaaataaaataaatggttaaacagtataccatttgatttatttaaattctctaaacaggcacataatgaaactgatttattttttgtaacaacatacattgaggtaaatgctttttcaagcacttagagaacagtcatcaccagtccacagatatgaaggttattttgcaatctggtaaaggaatcttattgcttccctgagagatagctttccatttcattccactttttgagaagcactggatattttgttcctttataatcaattaaacttcctataacttctacccatttgttctaattgtgcctattaaagttacacagaacaagtcttatttttcctatgcaaactgacaatttattagatatgtaaggaaattttgcttcctcttaacttttctgcagaccaagctcatattcttcagcttttctggcttcttatcatcttgaatagtttttagtttattcatatccctcctgaattatgcacttagaattgaacacagtatcctaaatatgttctggaaaacacagattgaaatagtagtgttacatctacttagctggatactgtactccattaaagcctaaaattgtatggctctgttatctgtctcatactactgatttgagttaagcttgtggccaactataatctcctcattattttcaaatgaataaccatgcccctaaacttaaattttccccattttatatttgaacaactgctgcttttttcttcctaaattcaagttttaacttcatgctgttttgatcctgttagcctataattttaataattatttctattatctttttattttactttttcctttatgccagcagcagtttaaaaaacattacttatgtatatcttgtgaatctttgaagatgttaagcattcctttagagatcaccttctagattcaatactgaatcatttatcgaaagtaagcaggttaatgaatgcatccctctcctgctgaaatattctgtaacttttaagttccactgattcaaattcattaaggagcatgtatatcttgtgtgaccgacttttagctcttagtttttacaagatccagtgttatggaagaatgattaccaaatactcatgggaaagctagcccttctttagctttttctcaccacccttgatagaggtggtttctcctttctttgtgtctgtgctcattttttaatctgtcttaactacagcacttacaacgttgcattaatacattggcttacttctctgtgagctatctgaacataaaactttggcttcctaatcttttttggccttggtatttagcgtaatgctgacttgataataaatgcttcataaatgcttgttgaagtatatattgtttagctagatgtttgacctggctttgttctaagattcttcttagtttatgtctagaaaattcgagtccttgaggctgagaaggagaagaatgcttatcaactcacagagaaggacaaagaaatacagcgactgagagaccaactgaaggccagatatagtactaccacattgcttgaacagctggaagagacaacgagagaaggagaaaggagggagcaggtgttgaaagccttatctgaagagaaagacgtattgaaacaacagttgtctgctgcaacctcacgaattgctgaacttgaaagcaaaaccaatacactccgtttatcacaggtgctaatcatttctttaaacccagattttttttttctttctgatacagtttgtaattcttaggaggaatgagtttgttaagacatgcttcccaaatgatgagacaaatgattagtatagtatactatcaggtcacttcactttttttaatagcccagtcccttctctataagcaaaaatagttaatatggtaccctccactccttgtaccattgatttgcctggaggaatattcagaagacagcatctactgtgtatttacaattaccaagattttttttgagctcttatttctatagtttgtatcatgaaaacagtaggcttcatttttttggttatttttcatatttgaaacatacaattataatatcaagtatacttttcctaactgcacttgcattttctccccgttttgtttgagaggcactagcgtcatagaaagaacaaggatacagaaatagacatgtgagttcagatcttggttttgtacttgccagctctgtgactctgaacaaatttgttaacctttatagccttagagacaatactagacttctccagacccctgttctaaatcttagtttcttttttttttttttaaacatataagctaaacctgagtttccacatcagtaaaatcaggataggaatagtgagaattaaatgtaaatatgtatgtaaattgcctcgcatagtgcctagtatatagtaggtgttcggtaaatggttacttattgatcagacctttgattcttttggagatttggagattcgaataatactaacattaatatcatctataggctgggcatggtggctcacgcctataatcccaccactttgggaggccaaggcaggcagatcacctggggtcaggagtttgagaccagcctggccaacacagtgaaaccccatctctactaaaaatacaaaaattagccgagtgtgacggcacgcatctgtaatcccagctattcgggaggctgaggcactagaatcgcttgaacccgaaaggtggaggttgcagtgagccaagattgcgccactgtactccggcctgggtgacagagtgagcctctgtctcaaaaaaaaaaaaatcatctatagtagaaaatctgtagctttcaaatatatctcagtgctgttaaggatctttctctgtactttatttcccatttaggggagatagtgatcagacctatacatttatgtgtattttcatagatgggcgtttgagtgtttctgcagatgagttcaaaaagttgaagtttttctagagaatttccacagagctgaaactcataaaacgttacagtcagattcaaagtagctgactaaaatttttctttgaagttcaagagttagtttctccacttttggaatgtgaaatacaaacttggtagaaattataatttttaaaatttttatttattttttattttttgagacagagtctcattttgccacccaggctggagtgcaatggcgcaatctcagctcactgcaacctccacctgggttcaagtaattctcctgcctcagcctcccaagtatttgggattacaggcacctgccacgacgccctgctgatttttgtattattaatagagacggggtttcaacatgttggccaggctggtcttgaactccttacctcaggtgatccgcctgcctcagcctcccaaagtgctgggattacaggcataagccaccgtatctggcctgaaattataatttttaaaaatgtattcttataataattttgtgggctactcgtattgatttctttattaactagtatgtctgactcctataacaacttccaaatgtcagtgtcttatgcaacaaatgtttatttttctctcatgctggtctagtccagattggagtagaggaagctttgctccacagagtcatttgactccaggttccttccttctagtggctccaccttcctttagggtagggtcccccaccaagtcctctgtatgtagctgtgagatggagcttgtggagaactgcctaggaggggtctggggccaggcctggtattgacatatctcacctctgctcacattccactggaacatggctccactaaccacagggaaggctggaatcagtctacagtgtgcccagggtaaaaggaaagggatttagagaactatctttgtcatagtttccacctcgaggactgaattgagagagagaaagggctacatattaaagtgaatgaatagagcatctttggagaaaaataatttttttgagcttctttgccagtattcacaagtctcttatagctattaaaagactgaaatacagctttttctatgtttgttggccagcctggctacctagccacccacttctcttttatttctctgagaaaatgaagaggagagaaataatttttgagttccatataatctatatgaactaatactaattaataattaatactttttttttttagatagaatcttgctctgttgcccaggctggagtaatttttgtattattagtagagatggggtttcaccatgttagccaggctggtcttgaactcctgacctcaggtgatctgcctgcctcggcctcccaaagtgctgggattacaggcataagcctgatcttggctcactgcaacctcctcctcccgggttctgcctcagccccccgactagctgggactacaggtgcgctaccatgcctggctaatttttgtatttttagtaaagatggggtttcaccatattggccaggctggtctcaaactcctgaccttgtgatcctacccgccttgccctcccaaagtgttgggattataggcgcgagccactgcacccggcctaattaatactattattaatacaaaacatgattctagaaaaaaaattttaccttttgtttgacaatttaatgtcttctaggtgtcatttaaatagcctagttgttttgtgtttgtctttttggtaaaaatcactgggctattcatatgcactgagggctattctggcaatcctggggtctagaggactgcagaagtcagattagatagaaaatctcaggatttccagtctgtttgggaaacttcaggggatcttaattttcacaatggttatctctggtaactctcacctggcttgatggtttaccaccatctactagatctggattttttgttttctttttttgagacagagtctcactctattgctcaggctggagtgcagtggcgcaatctcggctcactgcagcctccacctcccgggttcaagtgattctcctgcctcagcctcccgtgtagctgggattataggcacaggccaccaggctcagctaatttttctttttgtatttttagtagagatgggttttcgccatgttggccaggctggtctcaaactcctgacctcaaatgatccaccctccttaacctcccagagtgctgggattataggcgtgagccaccgtgcccagcctagatctggatttcgggatgcccccgtgagttatactgtattattatggtgaatgtaatgaggcaacttctattgtggaatgtctgatgttaactaatgttggattatttacagactgtggctccaaactgcttcaactcatcaataaataatattcatgaaatggaaatacagctgaaagatgtaagttcatttccttttaagttatgggtaaagagggctaattcatttattcttaagttttacagaaattggcaacattagtgctgtgacagaaaaactgaatggtttgagagcttcatttaagtctctttctatacattcgagaatcatttcttctaagcatagtcccttttttttttttttttcctgaggcaaagtctcggtctgttgcccaggctggagtgcagtggcatcttggttcactgcaacctctgtctcctgggttcaagcagttctacctcagcctcctgagtagctgggattacaggcacgagccaccacactccgctaagtttttgtatttttagtagagatggggtttcaccatgttggccaggctggtctcaaactcctgacctcaagtgatctgcccacctcagcctttcaaagtgctgggattacagctgtgagctaccatgcccggcatcatggtctctgtagggtagacagccctagaaattatcactgccaccaaatacctcaataacatcccttttctatctaaatctaatttccctaatttgcccaatcattttattgtttcttgttttttcagtatttttctctttttgagatggagtcttgctctgttgcccaagctggaatggactggtgagatctcagctcactgcagcctccacctcccaggttcaagtgactcttctgcctcagcctcccaagtacctgggattacaggcacccaccaccacgcccggctaatttttatttttagtagagatggggtttcaccatgttggccaggctggtcttgaactcccgacctcaggtgatctgcctgcctcggcctcccagagtgctgggattacgggcgtgtgccactgtgcctggcctccattttattcttataatgtaatttaatttgtagtatcttctcttttggtttatccatgcaagatgctctctttggtttgaatacttctcttgaaactaaggtttgctttcgtaggttgaaaaggaaacgttctttgtacactcagtacttcctttctctagaatttggtatgaggttattttagttatacagtaaagctgtattattgcaaactgataaatggattggtgggttttattgggaatggaataaattgaggacacaggactgctacttacagtgtatttttttcaagttttagagatatgaagtataaagtttctgacttaagtattaggtcagtatgttggtattttggttccaaaaatattactggcatgtctatcctgatataagcatgttcttaagatttctgttttacttcatctatcaagtatcctttgaagtctttttgatcttcaaaagaagaatttaaatctcctggatgtctagccaggtgccaagtactcttatcagaatacgtaatttacctagaggtaactggaatgaaaaggaaaagttctatgtcttattacactgaagtttgttattctatgtatatccatacctatgcattagatgcacatatttagaaatatcttacacagctcctgcattccactttatttactccacctgcaccacaatggctttccagctactccttgaataaaccaccttttctctttctgttccctctgcctgggacactcttccccagatatcttcatgatttcctccctacctcatgcaggtttttatttaaatgccactttcttggggttgggggaggacagaatgggggctgcctgaccactttgtctaaaattatagctcccagacaattcctattcttttctcctgcttttccctcctcatcacattctacagctaaatttacaatctatttaacttctcttgtttaatgttcaacctttccatcagaatagaagtcatatgaaggaaggatttttgcatgttttgtacattgctatatcctcagtgtctagaacatttgaaagaatgactggatggaatcttgggaagtttcttgaattttactggtgtctcttctagaaaagtacctgaaaatagatgccattatcttaagcttacatgtgctttttaggcatctcagtgctaactgcttcagatatcacctgagggtatttttagataatgatgattcttttttatgaaattaactttgaaatactacatatgtaagcccaagctttttgttctatcttctcagcttatttaagggtcacattgtgcttgtctcctctgtcttagaaaggcgtttatacaaatggggtaaaatttaacccaactcttctacaaatggtggtctagactgagcaagattcacagactctaatatactaggtctggggtagtgcctgagttttctgcatttccagtaaactcctagctgctgctgctgctggcccttggaccacgctttgagaaccattaacattattattattattattattattattattattttgagatggagtctcactctgtcactcaggttggagtgcagtggcgcgatcttggctcattgcaacctccgtctcctggtttcaagtgattctcatgcctcagcctcctgagtaacagggattacaggtgcgtgccaccatgcccagctgatttttgtacttttagtagagacagggtttcgccatgttggccaggctggtctccaactcctgacctcagatgacccacctgcctcagcctcccaaagtgctgggattacaggtgtgagtcattacacccagccagaacttatatttgaggagcaagaagtggtttagctctggttttccctttggaatttcagcaaatctttgagaccagggggaaaattgtagttggaggacttagggaacatggaaagagacatctcacttcttgcagcaccgacactggcacattatttggcttttgagagctcagcagttctagttccatcaccctctcaaagttcgcagaaacttcctgtagaagcttacccacgtattttcagaattagtatttgttatatttaaataagccctaaaagctacgtacagcttctttaggcccagttgtatcattgttcagttaccatttcgctctggccgacagttgaaataattacgtagagttaatgtcgtaagcattgtcaaatgtcagtacttttagtatttatttaagcattatgttagtataaactagacaaaccaaatagccaaaagacagttttaataggcgtttcttgctcttaaattcaaatatccgaattttaagcatagaacttagggaagataaataataattgttttaaaattattttgtctgcaaacattcaaattaacagaaaagttacaagaatgagtatgataacatataataacatataacgcccatatcccctttactaaaattcaaccgttgttaacatgttaccccattttgcactctgtttttcctctttcaaccctcacccacacacatatacatgtagtatttttttctgaaccatttgagaatgaattgtacatatccacagccgtttaaacccatatacttcaatgtgtgtttgttctcccatccaagtactaaacagactcaacgctgcttagcttccaagatcagccaagatcaggcgcgttcagggtggtatggccgtagacttcaatgtgtatttcttaagaacgaggatactcttgcccacaactatagcacagatagcaactttaataaatttaacatggatacaatacttctataatctaccattcctactgcagttttgtcaattgacccacattttttattcctccagtataggctaacattttaatctacgttggttggaatttttgtctacagaatatttagtggattcttgtcaaacctgggcgaagacctttatagcattccacaggactttttttttttttttttttgagacagagtctcactctgtcgccgaggctgtagtgcagtggcacggtctcagctcactgcaacctctgcctccctggttcaagcgattcttctgcctcagcctccagagtagctgggattacaggcacctgccattgcgcctggctaatttttttttatttttagtagagacggggtttcaccatgttggccaggctggtcttgaactcctgacctcgtgatctgcctgcctcagcctcccaaagtgctgggattacaggcgtgagccaccatgcccggactccacaggacatgttattttgcccacttttgttctacatttttattggtaacttggaggaaattgttaaatgcatgcctaacaaacgtatagatgacacaaagctggaaggcatatctaatgcaatgatgtttgactctaaaaactcaaaactaatacaatcaatatttatgatagctatcaactccgtgtattgatactgatagaaagccgatgcacacagtgagaagaggtggcataaggaaatgtttattgagggaacatcgccatcatgtggccttttagaatactaccccttgaatcttcaactaacatgtatttttgtttctcatacttaagtgatgtatggttcctttttttttaattaattaatttatttttttgagatggagtttcgctccgttgcccaggctggagtgcagtggcacaatctcaactcactgcaacctccacctcctgggctcaagtgattctcttgcctcagcgtccggagtagctgggaccactggcgcccgccaccatacctggctaatgttttgtatttttagtagagacggggtttcaccatattggccaggctggtctcgaactcctgaccttgtgatatgcccgcctcggcctcccaaagtgctgggattacaggcgtgagccactgcacccagctggttcctttaaaagaaaagaaaaataaaataaataaaataaaattgggctggcgcagtggctcacgtctgtaattccagcattttgggaggacaagaagggcagatcacctgagatcaggagttcgagaccagctgggccaacatggtgataccccgtctctaataaaaatacaaaaaagctgggcgtggtggtacacgcctgtaatcccagctactcgggaggctgaggcaggagaattgctggaacccgggaggcagagtttccagtgagctgaaatcatgccactgtattccagccggggccacagagcgagactccgtttcaaaaaaaaaaaaaattggccgggctcagtggctcatgcctgcaatcccagcactttgggaggccaaggcgggcagatcacctgaggtcaggagttgagaccaacatggtgaaaccccatctctactaaaaatacaaaattagctgggtgtggtggcgcatgcctgtaatcccagctactcgggaggctgaggcaagagaatcgcttgaacccgggaggtggaggttgcagtgagccaagatggcaccattgcactccagcctgggcaacaagagtgaaactccgtctcaaaaaaaaaaaaaaaaaaaaaaatttcatgaccatttaattttgacttaaattatttgtattaaaatactacttaaatgtggacaaatgtaaaatttagtataaaattaggtatctttagtatctaacacactataatttataggtatttggatatacatgtgcattgtgagtcatacagtgcttcctctcttatcaagtaaatttaaatctgatcctgggtttctcatgagtcctttcttttgaaagatgcataggttctgagtaagaacctcactggggatggcagtggagctgaataagagagtgactactgcagcctgttttaagataggccaagaatcctagcaatcttctcaactgtactaagttcactgattatttttcccaacttttatgattatttttcccaatttttattacgaaaaatgtcaaacatacacaaaagttaaaagaaaatacattgaacaatcatatatctaccacgaagtttcaataagacagactctttaaatcaaaaatcaaattactacagtgaaaacagccatccacagagctttacactattgacgatatataatacaaaatggatatacaatatctccacttgacaaatggactcttaagccatgtaaagaggactactgttccctaatggatgcagagagaaaagtgtctggtaaagtggctgaggctcctgggctaagtctttgattttagagactgtttctgtcttcctaattcatttgctaattctatagcaaacagacactgaaaatcctttaagtgccatacccaggagctttgctcaagagtttgtagggtgctagtagaaagagcctaacaaagcttagagaaactctctagacttaataagagtttccatacatgtagatctttctggatatgggactcaatcaatgtctttaaaggatggaaattcttaccggaaagcagttgccctgatagacacccaaaacctttaagctccttatgtcctcttcattgtggaactagaggtctggaaagagtggctgctataaaaggaaacactatattgtattgtcagattgaaattaaatagaagaattttatctatgcataatagatcattttaagagctactgtgttgttctccaaatagtaatcagaaatctgtattccactcttgaaaaaatgagctttgctgatactgttataggttcttcgaagttcagattactatgagctctggatttatagcaagtcctctggtgtgaaatgaactggttacaatccctgccatacaaagcttctgtcttcacatggcctcattctctatgtatatctgtgtgtctgctcctttttataaggatactagtcattggatttagggctcaccctactccagtatggcctcattttaactaattgcatctgcaaagcctccccctccccttttttttttttgagacggggtctcactctattgtctaggttggagtgcagtggcgcaatcttggctcactgcaacctccgcctcccgcattcaagtgatctgctacctcagcctcccaagtagctgggactgcaggtacgtgccaccatgcccggctaaaaaatagagacagggttttgccatgttggccaggctggtcttgaactcctggcctcaagtaatccgcccgcctcggcctcccaaagtgctgggattacaggtgtgagccactgcccagcccacagaccccatttctgaataaggtcatattctgaggtttcaagtggacatgaattttgggggacattattcaactcactgtaagtatgaaacccctatacaaacaggtgagtgacggcagcttggagtttttaattgggttataaaagatcatataaaggatgaaagttggtagtaaagagagaaggtagctgttaagtttgatcctctaaagaagacactgagatgatgttaggagtgcagacggtttattggggagcaagatctgtgcaaggaaaaaggaagtagttatgccagggagaccatcagaccatgatgaaaacctaacaaggtctctgtcaccccatggggggctccagagcagagagtgctgaaaagcagagtcctcgttgggcagcaatagttaggcacttgttcagttgttggctggggccaatccagctcagctcaaaagctgacagggacttgaaggaattaacagatggaggctgtcagctaatcagctaatcactcaccatgcagctgggcagagatcctcttttttttgtttgtttttttgagagacgcagtttcactggagtttccaggctggagtgcaggggcatgatctcagctcactgccacctccacctcccgggttcaagtgattctcctgcctcagcctcctgagtagttaggattacaggcacgcgccaccatgcctggctaatttttgtatttttattagagacagggtttcaccatgttggccaggctggtcttgaactcctgacctcaggtgatccaccaccctcggcctctcaaagtgctgggattacaggcgagagccaccgcacccagccagctgggcagggctcttgaagggggattctgagcagttcatctccatgtctgtcataaaacgtgttttagtttacagagaatgacatatacgcacacacaaagcaagttgtgtactgaaaaaagcaaacaaatgaacttaatcccacataaactacgatggtgtcatgttgttatgtattctgaaggcatgtaacatagaatggttgcccagaattagtctatgagccatagagtttttgttggaaaagactacatcacttggactctcttgcccattttaagattttgtttttttattttactgttgattttctttcatcttcccattaaggctctggagaaaaatcagcagtggctcgtgtatgatcagcagcgggaagtctatgtaaaaggacttttagcaaagatctttgagttggaaaagaaaacggaaacagctgctcattcactcccacagcagacaaaaaagcctgaatcagaaggtactgactggtataaaaatgttctctagggataggcctgacattttccaaaaggaatgattcatcaaatttagatttttatagatatgtgttagaaagtaaaataagagcaagtcttatagccctgaagtaagaaataccatttttgcaagttttatttcctaacgttttcagatcaaaagaaagtaccaacacaggctaatgggtgatctttggcagttctgaaatcacattcagttctctctacccatgaatgtccttcccctttttcaaagtccttctccagcttttacttcccccagagttggccttgtcacaattctcttttcactttgcttcccttcagcacttattcatatcaaccccaggagaaagaatgccttttttagatgatccttaaatcatttgaacttcaggtatagaattgagatgaaatttctcattcacgatgctgtctttttgccaagcactttgcagtttcccttacatagatcttagtggagttttagagcaaccctaagaggcggggcaggaaaggtcagtattctcattttacagatgaagaaataggtttagcaattctagatgacaagctaagaaaagaaaaatgagaaactccatgcaatgctctccttaaaagactgacagtttggaggggaccaaagccttgaattttatagagaagtctaaagaaaggggaacaagactcataagattggagaatcatatttgaatacttaaaacaaagctaatgctaaaaagaaactataaatgtctctggaggcacttcaaagctgtcagccctaatggcactaagttgcttctataaaatatgtgcttatgtaaaagcaggattttagttatgggctaagtctaatttcttttctttggtaatacagttctctctctctctctctctctttctctgtgtgtctgttttatcaaagcaatataagcacttgttagaataatgtaatagttaagaaggaccttgccctgtctttcccatcccaatccccgtttcttcctcccatcaggcaactgctcttaatatttctatttttaattttgatagttatctccacatataaataatgagcttgtgttcctatttgttgattgaacttcttgagactttccctcccaacagaatagatgttactgtttttagttcttctatttgtgagttttataacttcaaatagtatacctgaacttgttttttatttcatcaaatatcaaccatagtccctatctcttgacttttcatgttgtaaactaaggaaatagtgtgattcatttagatgtttgatgtttctcttttcaggaatattatttattttataaagtgagttgtgccgtaatgttgtttgtcataggttatcttcaagaagagaagcagaaatgttacaacgatctcttggcaagtgcaaaaaaagatcttgaggttgaacgacaaaccataactcagctgagttttgaactgagtgaatttcgaagaaaatatgaagaaacccaaaaagaagttcacaatttaaatcagctgttgtattcacaaagaagggcagatgtgcaacatctggaagatgataggcataaaacagagaagatacaaaaactcagggaagagaatgatattgctaggggaaaacttgaagaagagaagaagagatccgaagagctcttatctcaggtaaacttaaccagatccataattcagagtgttcaccgaacactttctaagtgtcagggactatttgaccactagagaactggctagggacaaaacaaattcctgcccctcatgggagttatattccagaacagaaacagaccataaacaataaataaggaaactaaagaaaatgcaacagggtgacatgacaaagggaaattggggaccagtggaggcctctctgaggagatggcatttggacaaagacctgatgatgaggaggacccagtgaggtgggtgacttttcctctcaatggaggaaattgtacacacaaaggctctgagtgaggaggaggtcagtatatgtgagaagccaaaagaagaagtgaagtaatgagaggaatcgaggctgattcctagactggcatcttaatggtgatgatatgtgctcaagtgaattcacatggcatcttccatgttcttgttatgctcatagccttatgctatggtatcataataatgttggagttactacgttaggattattggaattgaacagtactttgatggaactctttaatttagattttgctttgcagcctggcatcatggaaggaacattatttggaatccatgcctagtctctagtccaggatatatggccttaggcaaatcacctaacttctctgactactcactggttattcccttgtcaaattaataataacctctgcttgccatatagggctttggtgagcgtcagttgagagaaggtaaaagtgctttgtaaactaagcgaggtaaatgctagttattgctactattttaataataatttttaacagtcctacaaaagttgagggtgctggtgatgggacagtaacaagtccatctataacatttgccatcttagtcttttttttctttttttttttctgagacagggtcttgctctgtcgcccaggctggaatgcaatggcgtaatctcagctcactgtaacctccacctcctgtcttcaagtgattcttgtgcctcagcctcctgagtagctgggattacaggtgcccaccaccacggctggccaatttttatatttttagtagagatggggtttcaccatgttggccaggctggtctcaaactcctgacctcatgtgatccacctgccttggcctcccaaagtgctgggattacaggtgcaagccactgtgtccagcctgccatcttagtctttaccactcacacttcttctgtctacaggtatgagcagtgatactagggagagattaagtctgctgattaaattttgcttcagctctggctaagggcccagcactgccacccatgttatcctactcagaagtgtcagaacctccaggaaagggggcatggctgctgcagagttcagtgctgtttatcagcattcagtctgtgtgcctcagggaactctcggcaagggcggtggtatactgcttagctgctggcatagatagccatcagatggccagctggaatgattcacccctgactagcaggtgttgtcctggttagagatgtgagacttgtgatgtgagctttccgtgcatcccaggtcaagccggaaaaggttggatgtgacagcattggttctctttatgtcctacaggtccagtttctttacacatctctgctaaagcagcaagaagaacaaacaagggtagctctgttggaacaacaggtactcattcgggttgcttctaaattcaattctgcctgttagaaaatgcagtttttcctcatgtttatgctgttctatggagaactgtttgaaagttgtgaaaagtgtctttaaaagacttcaataaaagtctttcttcttcaataaaaaagatatttcaagagactctgctagccacttattcctgttgctgaccttaggctaaacagattcttgaggtgtgatggcagttttcttgacaggtagatgttggccttggcaaattttgctcttccccagtggctgtagctcctagcctaacaatgtctcctaagtagggctaccttataacttcaagcagaacttggagagacaccatttagtctcagaatgtattataaatggtgtaaagcagagatttttagtatattccaaaccagggaatagctatctctttcccttctccttcttcccccttaaaaaaggtggatagggaggagtaattctaatcaacaacttcttaagctgctcttcattcacctatacctcagcgttggctttgctccttggataaaccaaatcctcagccataagctgcctcgtttattaacatttcatggtgcttaggtgaattcttgctacgatggtacaataaatattttcttcatgtgctaataaaaaaatgtgagcatccagtcaagagaactagacagtctgtatcagctgtaatggtcttgttctgggccttttccagatgcaggcatgtactttagactttgaaaatgaaaaactcgaccgtcaacatgtgcagcatcaattgcatgtaattcttaaggagctccgaaaagcaagaaatcaaataacacagttggaatccttggtgagtctggaatgattaaactaaaatttgtcttcgtcttccatttatataccaaatcagttccgaacttaggaggatacagcttaacacacagctagctgtatctcaaatcagtaggtagagcctctgcctcatttgaagcaactgccctttgagcatcaattcagaggacatgaaagagggacatgatcacatctggaaacattcccccaactaccccagctgctgtgatgctggaggcactaaatagtgcctgagctggggtcaaaagggtagaatagagggtagtcacagaatcctgaactgaaattgtgtttatctattaaaaaagaaagaaaggctgggcacgatggcttatacctttaatcccagcgctttgggaggccaaggcaggcggatcatgaggtcaggagttggagaccagcctgaccaacatggtgaaaccctgtctctactaaaaatacaaaaaattagccgggcgtggtggcgggtgcctgtaacctcagctacttgggaggccgaggcaggagaatcacttgaacccgggatgcagaggttgcagtgggctgagactgagccactgcactccagcctgggcagcagagcaagactctgtctcaaaaaaaaaaaaaaaagaaaaagaaaaaaatgctgtttttagggataatggactattactgttaatatgctttttagatgtattatgaggtttgtgtgagtcactctgaaaacataatcttttaaaacatgaaccttttaaataatattgtttctatgatgaaatggtttttcacttacttattctcaccttactaataagcttttggaccaaacttgttgggggtctgcatttgaatatatgtctgtcccactagtacatattttaaattttattctactactatagaatacttggagacagtgaaatgttacaaatatgattcctcagttttcaaaggaggaaaaaaaaacaatgataaaagtaaaaatcacttgtaacttctgtatgaataaaagaaagaaaatatatttttggctctgttcttaagtatataattgattttacccatttataatatttgaaatgaaaatttataattcatttttgttattgaccattcaaagcttagggagcagagggtatgcaaaagaatttgtaattttgtgggggcggttccaagatggctgaataggaacagctccagtctacagctcccagcgtgagcgacacagaagacggatgatttctgcatttccaactgaggtactgggttcatctcagtggggactgtcagacagtggatgcagcgcaccgagcgtgaaccgaagcagggtgaggcatcgcctcacccaggaagcgcaaggggtcagggaattcccttttctagccaaggaaaggggtgactgacggcacctggaaaatcaggtcattcccaccctaatactgcgctattccgacggtcttagcaaacagcacaccaggagattatatcccacgcctggcttggagggtcctacacctacggagccttgctcattgctaccacagcagtctgagatcaaactgcaaggtagcagtgaggctgggggaggggtgcccgccattgctgaggctcgagtaagtaaacaaagcggccgggaagctcgaactgggtggagcccaccgcagctcaaggaggcctgcctgcctctgtagactccaactctgggggcagggcatagccaaacaaaaggcagcagaaacctctgcagacttaaatgtccctgtctgacagattggaagacagtagtggttctcccagcacgcagcttgagatctgagaacggacagactgcctctacaagtgggtccctgacccccgtgtagcctaactgggaggcaccccccagtaggggcagactgacacctcacacagccgggtacccctctgagacaaaacttccagaggagcaatcaggcagcaacatttgctgttcaccaatattcgctgttctgcagcctccgctgctgatacccaggcaaacagggtctggagtggacctctggcaaactccaaaagacctgcatctgagggtcctgactgttagaaggaaaactaacaaacagaaaggacatccacaccaaaaccccatctgtatgtcaccatcatcaaagaccaaaggtagataaaaccacaaagatggggaaaaaacagcagaaaaactgaaaattctaaaaatcagagtgcctctcctcctccaaaggaacgcagctcctcaccagcaatggaacaaagctggatggagaatgaagagttgagagaagaaggcttcagatgatcaaacttctctgagctaaaggaggaagttcgaacccgtggcaaagaagttgaaaaccttgaaaaaagattagatgaatggctaactagaataaccaatgcagagaagtccttaaaggaccagatggagctgaaaatcacagcacgagaacaacatgacgaatgcacaagcctcagtagccgatttgatcaactggaagaatgagtatcaatgatggaagatcaaatgaatgaaatgaagtgagaagagaagttttgagaaaaaaggataaaaagaaacgaacaaagcctccaagaaatatgggactgtgtgaaaagaccaaatctatgtctgactggtgtacctgaaagtgacgaggagaatgcaaccaaattggaaaacactctgcaggatattatccaggagaacttccccagtctagcaaggcaggccaacattcaaattcaggaaatacagagaatgccacaaagatactcctcgagaagagcaactccaagacacataattgtcagattcaccaaagttgaaatgaaggaaaaaatgttaagggcagccagagagaaaggtcgggttacccacaaagggaagcccatcagactaacagctgatctctcagcagaaactgtacaagccagaagagagtggggggtcaatattcaacattcttaaagaaaagaattttcaacccagaatttcatatccagccagagtaagcttcataagtgaaggaaaaataaaatcctttacagacaagcaaatgctgagagattttgtcaccaccaggcctgccctacaagagctcctaaaggaagcactaaacgtggaaaggaacaaccagtaccagccactgcaaaaacatgccaaattgtaaagaccatcgaggctaggaaaaaactgcatcaagtaaagagcaaaataaccagctaacatcataatgacagggtcaaattcacacataacaatattaaccttaaatgtaaatgggctaaatgctacaattaaaagacacagactggcaatttggataaagagtcaagacccatcagtgtgctgtattcaggaaacccatctcacatgcagtgacacacataggctcaaaacaaagggattgaggaagatctaccaagcaaatagaaaacaaaaaaaggcaggggttgcaatcctaatctctgataaaacagactttaaaccaacaaagatcaaaacagacaaagaaggacattacataatggtaaagggatcaattcaacaacaagagctaactatcctaaatatatatgcacccaatacaggagcacccagattcataaagcaagtccttagagacctaaaaagagacttagactcccacacgataataatgggagactttaacaccccactgtcaacatgagacagatccacgagacagaaagttaacaaggatatccaggaattgaactcagctctgcaccaagcggacctaatagacatctacagaactctccacctcaaatcaacagaatatacattcttctcagcaccacaccgcacttattccaaaattgaccacatagttggaagtaaaacactcctcagcaaatgtaaaagaacagaaattataacaaactgtctctcagaccacagtgcaatcaaactagaactcaggattaagaaactcactcaaaaccgctcaactacatggaaactgaacaacctgctcctgaatgactactgggtacataacaaaatgaaggcagaaataaagatgttctttgaaaccaatgagaacaaagatgcaacataccagaatctctgggacacatttaaagcagtgtgtagagggaaatttatagcactaaatgcccacaagagaaagcaggaaagatctaaaactgacaccctaacgtcacaattaaaagaactagagaagcaagagcaaacccattcaaaagctagcagaaggcaagaaataactaagatcagagcagaactgaaggagatagagacacaaaaaaactttcaaaaaatcaatgaatccaggagctggttttttgaaaagatcaacaaaattgatagaccgctagcaagactaataaagaagaaaagagagaagaatcaaatagacacaataaaaaatgataaaggggatatcacaccgatcccacagaaatacaaactaccatcagagaatactataaacacctctacgcaaataaactagaaaatctagaagaaatggataaattcctcgacacatacaccctcccaagactaaaccaggaagaagttgaatctctgaatagatcaataacaggctctgaaattgaggcaataattaatagcttaccaaccaaaaagagtccaggaccagacagattcacagccgaattctaccagaggtacaaggaggagctgataccattccttctgaaactattccaaacaatagaaaaaaagggagtcctccctaactcattttatgaggccagcatcatcctgataccaaagactggcagagacacaacaaaaaaagagaattttagaccaatatccctgatgaacatcgatgcaaaaatcctcaataaaatactggcaaaccaaatccagcaacacatcaaaaagcttatccatcatgatcaagtgggcatcatccctgggatgcaaggctggttcaacatacgcaaatcaataaacgtaatccagcatataaacagaaccaacgacaaaaaccacatgattatctcaatagatgcagaaaaggcctttgacaaaattcaacagcccttcatgctaaaaactctcaataaattaggtattgatgggacatatctcaaaataataagagctatttatgacaaacccacagccaatatcatactgaatgggcaaaaactggaagcattccctttgaaaactggcacaagacagggatgtcctctctcaccactcctattcaacatagtgttggaagttctggccagggcaatcaggcaggagaaggaaataaagggtattcaattaagaaaagaggaagtcaaattgtccctgtttgcagatgacatgattgtatatctagaaaaccccatcatctcagcccaaaatctccttaagctgataagcaacttcagcaaagtctcaggatacaaaatcaatgtgcaaaaatcacaagcattcttatacaccaataacagacagagagccaaatcatgagtgaactctcattcacaattgcttcaaagagaataaaatacctagaaatccaacttacaagggatgtgaaggacctcttcaaggacaactacaaaccactgctcaacaaaataaaagaggatacaaacaaatggaagaacattccatgctcatggataggaagaatcactattgtgaaaatggccatactgcccaaggtaatttatagattcaacgccatccccatcaagctaccaatgactttcttcacagaattggaaaaaactactttaaagttcatatggaaccaaaaaagagcccgcatcgccaagtcaatcctaagccaaaagaacaaagctggaggcatcacactacctgacttcaaactatactacaaggctacagtaaccaaaacagcatggtactggtaccaaaacagagatatagaccaatggaacagaacagagccctcagaaataatgccacacatctacaactacctgatctttgacaaacctgacaacaacaagaaatggggaaaggattccctatttaataaatggtgctgggaaaactggctagccatatgtagaaagctgaaactggatcccttccttacaccttatacaaaaattaattcaagatggattaaagatttacatgttagacctaaaaccataaaaaccctagaagaaaacctaggcaataccattcaggacataggtatgggcaaggacttcatgtctaaaacaccaaaagcaatggcaacaaaagccaaaattgacaaatgggatctaattaaactaaagagcttctgcacagcaaaagaaactaccatcagagtgaacaggcatcctacagaatgggagaaaatttttgcaatctactcaacctacaaagggctaatatccagaatctacaaagaacttaaacaaatttaaaagaaaaaaacaaccccatcaaaaagtgggtgaaggatatgaatagacacttctcaaaagaagacatttatgcagccaaaagacacatgaaaaaaatgctcatcatcactggccatcagagaaatgcaaatcaaaaccacaatgagataccatctcacaccagttagaatggcaatcattaaaaagtcaggaaacaacaggtgctggagaggatgtggagaaataggaacacttttacactgttggtgggactgtaaactagttcaaccattgtggaagtcagtgtggcaattcctcaggatctagaactagaaataccatttgacccagccatcccattactgggtatatacccaaaggagtataaatcatgctgctataaagacacatgcacacgtatgtttattgtggcactattcacaatagcaaagacttggaaccaacccaaatgtccaacaacgatagactggattaagaaaatgtggcacatatacaccatggaatactatgcagccataaaaatgatgagttcatgtcctttgtagggacacggatgaagctggaaaccatcattctcagcaaactatcacaaggacaaaaaatcaaacaccgcatgttctcactcataggtgggatttgaacaatgagaacacttggacacaggaagggggacatcacaccccaggacctgttgtggggtggggggagtggggagggatagcattaggagatatacccaatgtaaatgatgagttaatgggtgcagcacaccaacatggcacatgtatacatatgtaacaaacctgcacattgtgcacatgtaccctaaaacttaaagtataattaaaaaaaaaaaagaatttgtaattttcctgtactttgttcctgctatccaccctcttcactgtgctgtaaaatactcatttttaactactccaagttcttagaaaaaaaacacaaaaaaggaaagtctcaaaggtatgatagaatatcttagtcatttctgtgtataagctgtttgagctgctaaaattgcttgctgcctttaatttccatgtagtactttattgctgacgttgcctctgttttacaaaactagcaaatttaatcagccttgcatataggcctacctaatattcgactctgtgtcctaataaaacatattcatatatacacccaactcccatatctgggtaatttggataattacagtagttatctggataaattcacaactacctcatatattaccctcataatactgatgagctgaaattcaaaagaaaatctgtctacagtgctgaagcagctataatacttatggaacagttaaaattgctgaacaggctgggtgcagtggttcatgcctgtaatcccaacacttcgggaggctgaggtgggcagatcacttgagcttaggagtttgagaccagcctgggcaacatagaattaattttttgtagaattttctatttctacaaaaaatagaaatattatctggacgtggtgacatgtgcctgtagtcccagctacttaggaggctgaggtgagaggattgcttaagcctgggaggtcgaggctgcagtgagccatgtttgtgccactacactctggcctgggtgacagagtgagactgcctcaaaaaaagaaaaaaaaaaagctgaacattggccctatttacaaattctattatttgaaacttatttttcagaaacagcttcatgagtttgccatcacagagccattagtcactttccaaggagagactgaaaacagagaaaaagttgccgcctcaccaaaaagtcccactgctgcactcaatgaaagcctggtggaatgtcccaagtgcaatatacagtatccagccactgagcatcgcgatctgcttgtccatgtggaatactgttcaaagtagcaaaataagtatttgttttgatattaaaagattcaatactgtattttctgttagcttgtgggcattttgaattatatatttcacattttgcataaaactgcctatctacctttgacactccagcatgctagtgaatcatgtatcttttaggctgctgtgcatttctcttggcagtgatacctccctgacatggttcatcatcaggctgcaatgacagaatgtggtgagcagcgtctactgagactactaacattttgcactgtcaaaatacttggtgaggaaaagatagctcaggttattgctaatgggttaatgcaccagcaagcaaaatattttatgttttgggggttttgaaaaatcaaagataattaaccaaggatcttaactgtgttcgcattttttatccaagcacttagaaaacctacaatcctaattttgatgtccattgttaagaggtggtgatagatactattttttttttcatattgtatagcggttattagaaaagttggggattttcttgatctttattgctgcttaccattgaaacttaacccagctgtgttccccaactctgttctgcgcacgaaacagtatctgtttgaggcataatcttaagtggccacacacaatgttttctcttatgttatctggcagtaactgtaacttgaattacattagcacattctgcttagctaaaattgttaaaataaactttaataaacccatgtagccctctcatttgattgacagtattttagttatttttggcattcttaaagctgggcaatgtaatgatcagatctttgtttgtctgaacaggtatttttatacatgctttttgtaaaccaaaaacttttaaatttcttcaggttttctaacatgcttaccactgggctactgtaaatgagaaaagaataaaattatttaatgttttaa

SEQ ID NO: 60 - DNA, 32743 bp, Homo sapiens
  source 1..32743: mol_type = other DNA
gatgacaggattttcccgcgaaggagaagcgcgcttttttccctggcgggggatttggctagaaggctgggccggcagcggttgtgaggagttagctcgcggcattgcaggctctgagaggaggggacccggttcccgggtgagtgtccaggcatgccagcggaacggcccgcgggcagcggcggtgagtgaggaaaaccttttgggcgcgggtggcagcctgcggggctgaggtgggcaagcatggaggctgcggcggagtttcggggagggagccgaccccgggcagggactgaggaggaaaggagggttgggaaactgcaacggtgagtggaggacaccccggaatcgcacgtattagcatgccggtgaagatttcacataggcaactgcattttcccgagcatcccgagttgtaaactgtggtccaggcgacttgtagacattgtgaagacttacggtgtcttctgagaggtgatgctggcgtcccctcggtcttcagcttttgctccagtgcatctcgggtgggagaaaggctgtttcttgttggagttgagtagttggtaatttttttaaaactgcaatttgaaagctttctcccccgtcaggctcggaggctccagcaatggttgaacaactggacactgctgtgattaccccggccatgctagaagaggaagaacagcttgaagctgctggactagagagagagcggaagatgctggaaaaggtaatttaggcatcaggttcgtcgtcgtgaaagcctgtggtaacctcggctttaacccggaggtgtggtttgtgttctttgctttcctatttagtgggctttttaataactgaaagaaaacagctttattacttgtcttttttgtatgtttacagatattgcctttgagaatcctttcgcaagtgctttgaatggtgtgtttctatgagatgtagtcttggtagtcccatcacttttaaatgagcatttcagattgcttgtttagccatgaaaagtctttcaaagtccatagtgagttttttcgtttgtcatccttatttcctttaaaaattaccttaaatgtatgtctcatggcaaacaggaatcgctaaaacctgcagaagtaatgtactagactgagggcaggagaagttagcatcaatcaaaggctgggctggaatccaagtctaatgatttccttatactgtagtgctgttttccacctaagtgatcaacttgctgtttgtttttcttttggtttcatggcctgtgtattgctacataagattctttagctaaaaatgtgccgtactttttcaatgacaagttgctgtagttttcttgtagagagcattttgtaagttactaaaaacagtttttaacctgaaaaattcttgtttattctaaagccccaccctgctgcttgattcatatgcaagaaaaagaatgatcgttgactcttaagtactgcctagtacgtggttttcttgtgctttattaatttattaaactctaccgatattatgatataggttattttttgttattttcatttacaaatgaagaaactgagggagaagggcacatagtaagtgttgaagtcaaatttcaactcaggctgcctgcagaatttctgtccttaataatagtgaattaactcatgattataaaactacttaagttggaaaataatgcattccaaaaacgagtaatgaggccgttggttccctgttatgtcaacaataatttttttgtcagcattgttaatacttcttgaacatttattaggagtcatgcattgttttgaatgctttatatgtatttactcattgaatcctcaactattctgtaaagtagatgttcattattactattactgctattaaacttactagtttaattactagtataaacaattgctattattgaactacacaaccaaataggttttattagtcatcttattttacagatgaggaaactgaggcacatagaggttgtttgggtgccacagttggtaaatggcagagctaacattccagtgtaggccatgtggttctagaatgcacattttttaactaccatgctatagttccactccagtaatactccttccgttattactgatgatctctggttgactataaccagttaaggtaatatattaacaaattttctttaagtaacatcaatactttttgcttcagggtagatgtgaattaacagaattgagaggtctgacctgaaccaccttttctcattctttgaattttcatagtactttattacacagaatttaccatgaccaaataagtaatgataaatacttcatactactttttgattctttctcactttgtttcttgagggtgcatcacttgctgttttgtttttgtaggctttgcacctggcacatagtaggcaatcagtaagtgcttattgaatagctaacgatgataaaatggtattttataatatacaagattatatacatatactaaatatacttattagctatataaccagatgaattataaagtataaattctggggcaagtgcccagaatggaatcaactgaagaagtctaagagggatgtgataattttgtcttgagtaatgtatcttcagttttatcttgtttcttcatatacccattatgagtgttgggtagggaaatagcatttaaagaaagatatgcctgagatatgacaacagtacattttcagaaggtattattcattcaaggaagaaacacttcacatttaaaaaagataagtcaaatatgtagtattttatatatttgctgaggtcaaatgacctgctacttttaatgacatttttaagcttatgaacaaacattttgcagttagtcctaaatttaataattatgcatcatagaacctaaagagtaatttttaatccttccattaaaaaagtatatggctgttttcatggcctggcatggtggctcacgcttgtaatcccagcactttgggaggccgaggcgggtggatcacctgaggtcaggagttcgagaccagtttggccaacatggtgaaaccccgtctctactaaaaatataaaaattagccagatgtggtggcgcatacctgcagtcccaactactcaggaggctgaggcaggagaattgcttgaacccaggaggcagaggttgcagtgagccgagatggcatcactgcactccagcctgggtgacagagcaagattccgtctcaaaaaaaaaagtatgtagccgttttcaatcttaatataagtgtgtaatttgctaaaacattagtgttgtggtttcgtattacattgtcttgttatgtacagataaggaaagtttttgattattttttgcactggaccctcataaaaagtgattgcctagatgacactagaaaattctaagaaaagttttcagagtctctacctacttgagattaataaacatgtctttggaggccaaacaattaactatgcacaggtagagattccttttcttttgggagaatacagtctgtatgggcatgtatttagaagtacttaacagaggaagagctagcttaagttccttaatgagaagcatttggctttaggaaatcctaaggtttgtgaggaacctagaaaatgactttgacattcattggctacagttattttctttgacttttcacatgtatttccctttaaaagaagtcattgttagtctaggagatttgagtactgatagtgcctgtgaagtggaggagggggaatagttggagtcaggagatttcttggagaggtaaaaggatcatgatatgtgtaggctaaaatagaactcctcccaccccccaataaaaaatctgggattggtgttgggagagataatggggtagataatgaggaatttctgccctcggtgtccattggcatactctgtactgtagttacccagagttgtttcctgccaggcactcagtgcttttaatagatggagttgcaatttaccgtaatataatcatgaaattgataaataaagaaaaaacagtgataggaagatttgaaatacagaagaccaggtttaaggattaaccacttacatggtattattttaatattaattgtatattatttttttccatgatggcatcttaaagctttagtgatttttatttttatttttatttttttgagacagagtttcactcttgttgcccaggctagagtgcaatggcgcagtctcggctcactgcaacctctgcctccggggttcaagcaattctcctgcctcagcctcctgagtagttgggattacaggcatgtgccgccaagcctggctaattttgtatttttagtagagatggggtttctccatgttggtcaggctggtctcgaactcccaacctcaggtgatccgcccgtcttgacctcctaaagtgctgggattacaggcattagccaccatgcccagctgatttttttttttaggaaaaatttttccaggagcaccaggcaagtatttaggttttttttgcttgtttgtttgttttgagacggagtctccctctgtcacccaggctggagtgcagtggcgtgatcttggctcactgcgaccttcacctgccgggtttaagcgattcttctgcctcagcctcccaagtagctaggactacaggcgcgtgccaccacgcccagctaattttttttgtatttttagtaaagacggggtttcaacatattggccggcctggtctcaaactcctgacatcgtgatctgccttcctcgacctcccaaagtgccaggattacaggcgtgagccaccatgcctggctgtatttagttgttttaaaaatatgtgctggccaggcgcggtggctcatgcctgtaatcccagcactttgggaggctgaggcggggcagatcgcttgagcccaggggttaagaccagcctgggtaacagggtgaaaccccatctctacaaaaaattaaaaaactagccggcatggtggcacgcgcctatagtcctagctactcaagagggtgaggcaggaggattatcgcttgagcctgggaggcgcaggttgcattgagccgagatctcaccactgcactccagcctgggtgatagagcgagaccctgtctcagaaaaaagaaaaagtgctaattctgtacaggatttaaggtatcaactatatctaagttaaacccacgttattttaactgaacttaaattttaaaagttaaaaatttaagaatccatatattgtgtaagtaattttcatctccctgttttcatattcacctcagtagttgcgtattgtaaccacagtagtatactggtaatagtaaaagaaattctgtcctaaaagaactgaaaattgagttcaagatattaagaattatctgtgtaggtgggattatgggtgatttatatattttttgacatttagtttttctgtaatgagtatgcattacttttgttaggtccattcttagaatcttactgtagtcactgattttataatagaaatatattttgatgccgggtacggtggctcacacctataatcccagcactttgggaggctgaggcaggtggaccacgaggtcagttcaagagcagcctggccaagatggtgaaagcccgtctctactaaaaatacaaaaattagcggggtgtggtggcaggtgcctctagtcccagctatactggggaggctgaggcaggtaattgcttgaacccgggaggcggaggcagaggtgagccaggattgtgccactgcactccagcctgggcaacagagtgagactccatctcaaaaaagaaaaagaaatatattttgaaagaaagctatagtgatgatgtaatagctaggaaaatgtaaggcaatataaaatgatatcttagagatattgataagctggagcagcaaaactacccaagtgctagggcattatttagagtataaaaatgaattcatacccccatttcttttcttttttttttttgagatggagtctcgctctgttgcccaggctgaagtgcagtggcgcgatctcggctcactgcaagctctgccttccgggttcacgccattctcctgcctcagcctcccaagtagctgggactacaggcgcctgcaaccacacgcggctaattttttgtatttttagtagagacagggtttcaccgtgttagccaggacagtctcaatctcctgacctcgggatccgcccgcctcagcctcccaaagtgctgggattacaggcgtgagccaccgcgcccagcctcatatcccccatttcaaacacgctgtaaacaatgctcaattactttcctcttaagttgaaaccaccaattactggggaaaggggcagttagattttattggttgactttgtgtttttactaatccttgttgaaaagtagaggaattggtttagttgagaaaacaaaatactaaaaaatctgccactagactttttaagtcaagagtttgtataaaatgaaacatatctactatctaatctataaaatttagaatctttttaattctaaagttaacttaagtgtgatttttagtgctgttgctgaggccagtgttgcttaaagcaggaacttctacagtaattgacaaaacttgagtttttctgctctcatttatccatccttcagacccctcagatgtcatctatttcctgaaatctgacttctccagttttagtaattcttacaatttttcaggatttagatagtactgtacagtttactgctatgtatatgtctttaatacttgttgttttcagatattacactaatgtctcatctgtagtataaatcagactttctgtcttctaccagttacataatttatataattgttgcagtacatgtttgttgatttactaggctggattcatgttacagaattggtaatcttggttgggcatggtggcacatgcctgtaatcccagtactttgggaggacaaggcagacgaatctcttgagtttaggagttggagacctgccttagcaatatggtgaaaccctgtctttacaaaaaaaaaaaatacaaaaaattaacagggcatggtggcatctgcctagagtcccagctacttgggaggctgaggtgggagggtggtttgagcccgggatttggaggctgcagtaagccacaattgcaccaattacagcatgagaccatgccttaaaaaacggggtgggggtgttaatcttggctagatgtctgttttgattgttaggatgaattgtgttggtagtatttttctaaaatgttctatccaaatcaacttgtttattaatctcaaatagggagagactctgaaaacttgtcttagaattctctagtgtcacctaggcaatcactttttatgagggtcaagtgcaaaattaatcaaaaattttccttatctgtacataacaaggtaatataataacacggaaccacaacatcaatgttttagcaaattacacatacctttttttttttttccggacggagtctcactctgtcacccaggctggagtgcagtggtgccatctcagctcactgcaacctccgcttcccgggtttaagcaattctcctgcctcagcctcctgagtagctgggactacaggcatgcgccaccacgtcctgctaatttttatagttttagtagagatggggtttcaccattttggccaggatggtctcaaactcctgacctcaggtgatccaccctcctcggcctcccaaagtgctgggattacaggcgtgagccaccgtgcctggccccaatttttttttttttttttttggtacggagttttgctcttgtttggagtgcagtggcatgatctcggctcactgcagcctctgcctcccccgggttcaagcgattctcctgcctcagcctcccaagtagctgggattacaggcatgcaccaccacgcctggctaattttgtatttttagtagagatggggtttctccatgttggtccggctggtctcgaacccccgacctcaggtgatccgcctgctttggcctcccaaagtgctgggattacaggtgtgagtcaccgcacccggccttcaattgttttttaaatggaccttccaactcagtagtgccagaaaccatgtgttcaatatttgaaattataatattttgatatacgaattgcatctatcagattgcctgttaaacccaaaaactattttttttttaacagttatttgttccagtttttggtttgaaagtgtttggtttaaaaaatgttattttagccatttttattaaactttatgccaaaaaaattaaggtatgtcagaaagtgttcataattatggaaattttctctttggataggctcgcatgtcttgggatagagagtcgacagaaattcggtaccgtagacttcaacatttgcttgaaaaaagcaatatatactccaaatttttattgacgaaaatggaacagcaacaattagaggtatgtatatgtaactgactacaagtgaaagcttaaaaaaatttaaaaatagctttattgaagtgtatattatatacagtaaaatggacagattttaagtgtacggtttgctgagttttgactagtaaatatatagatctgtgtaaccaccagcacaatcaagatacagtgcacttccatgaactccaaaaaattgtcttgtgctgacagtaatccccatggctggtgtccagcaactactgatttgctttctgtcactatagaccagtattgttttttcctagaaaattgtataaatgaaatcatggtattgtgctagtgagtaaatagttggtcttcatcaccatttcctggtatacaactcttgaaatccttggaatcttcaaagtaatagtgtttttttttttgtttttttttttttaatgctaatgatcaatggctagctgcccttaggtagcttcaggatgggagcctaagaaagacaaaacctggattagagggttgggatttagcctcaccctcaactttgaggaaaagagactgaaagttaacttgttcaccagtggtcacgattgaatcaatcacgtctatgttatgaggtcttcattaaaaacccaaaagggctgggtgtggctcacatctgtaatcccagcactttggggagcctaggtgggtggattgcttgagcccagaagtttgagaccaggctgggtaatatggcaaaaccctatctctaatagaaaaattagctaggtaaggtggcatgtgcctctagtcccagctacttgggaggctgaggcaggaggttggcttgagccaaggagattgaggctgcagtgaactgtgatggcaccactgcattctagcctgggtgacagagcaagaccctgtctcaaaaataaaacaggctgggcgcagtggctcacgcctgtaatcccagcactttgggaggccaaggcagacagatcacttgagcccaggagttcgacaccagcctgagtaacatagtgaaaacccgtctctaccaaaaatataaaaattagccggtcatggtggtgtgtgcctgtaagcccagctactcagaaggctgaggcaggaggatcgcttgaacccaggaggcggaggttgcagtgagccgagattgcacccctggactccagcctggatgacagagtgagaccctgcctcaaaaataaataaataaaaaaaaccccaaaaggggacagggtttggagaacttctggatagctgaacacatggaggttcctggagaggatggcgcatccagaaaaggcatggaagctctgcgcttctttctccataccttgttctatacatctctttctctggtgttcctctgaatatgttgtaatctttctttctttctttcttttttttggagacagagtcttactctgttgcccaggctggtgtgcagtgcaccatctcagctcactgcaacctctgactcctgggttcaagcagccctcccacctcggcctcccgagtagctgggactacaggagcacaccattatgtctgtcttatttttgtattttttgtagagacagttttgccatgttgccgaggcttgtctggaactcctgggctcaagtgatctgcttaccctggcctcccaaagtgctgggattacaggggtgagccactgcgcctggactgtcatattctttataataaaccaataaactttaatgtttctttgagttctgtaagctcctctagcaaattagtcaaacccaaagaggggcttgtgggaaccctgatttatagctattcagtaagaagcacaggtaaggcgacttgggccttgcgattggcatctggaactggtagttaaaagtcttggggactgaaccctcaacctatggggtatggtgctttcaccccgtagatagtgtcagaattgaattacaatagaggacacccagctggtgtcactgcagaaatgcttgtttggtgtatagggaaaacccccacacattgggtcacagaagtcttttgtgttgattgttgagtgtgtagggagaaactgagtttgtttttttctcaatattcttgcacatatgcactctttgtcttgttacttttgctcagtgtatttttgagattcattcatgtcatgtttttctgtaggttattttttttattcctgagaaggattccattaagaaatgtcgttattggggtgtaattgacatacactaaactgcacatatttaaaatgtacaattccctaagtttgatatatggatatacttgtgaagacataacaatcatgatagtggacatacccactgattccaaaaaattctttctgcttatttataattcttctcgcccgtccctaccccatgttctatccacagatagccaattgatctgttttctgttattataggttcatttgcattttctgttggtgatgggttcttttagctttcatatgtctgaatgtcttcacttaccttcatttttgaaatacgtttttactgggtaaagaattttttttctttagtactttatttcttggagtactttaaagatgtttcactgtctcctagcttatgttgtttctgaaaagtgaaagtcctgataatgtctatatgtctgtaagcaatttgactgcctccctcaatcccattacctttcagacctgtctccagatgtgtttcctgtcttgggcttttgcccttgctattttatgcctggaaccttcttcctctaaataactgcatggcttaacttcatcttcaagccctgacttaaatggtttctagatgagacctgccctcacaattttaagaaagttgctaacacacctgattctctttaccttgttctgttcttcccattgcacttttcatctgatatacatcatttattgtatttattgtttgtctttccactagactgttatgaagatttaaaaacttgtgcaaattgagagaatacagtaagtcccggtgtccccatcacccacatttaaaaattatcaatttaaattttgctgtatttgtcaaatctcctttttcctttgtttgaaacccttttattacttttttatggtaaagtaaaacaaatggaaaaacaaatattcaacttaatgagttacacagcatctacccctttcatcacctcttggaaatggtttgaatttttggtgtctttaaaaaatttgtaagagtatgtctagaatagcttttagtctaggaataagttgatcccttttctgagcactctacttgatgccctttatattaagaggactttctactttggctgagagaatgtgaggtataccttattatgcctgaccccttggaacatgagaggttccacctgcttctttctggtgactcttctcctggccttggttaccatgcacttaccagtactcagcctgagagagagataacagctgcctttgtgcagctttgtcctctctggtacttgaccctgggaatgctactgctcttaagttttggattctgtctcctcaacacaaagagactgttgggctctgtttggatttttctccattatttgtactttaaaattgtatcaggcagtaagctgggcagtcagaagattaaccttgtttccgttttgtcagtgtttacagtccgttactgcatgttgtctgaaaaccattgtttaataaattttatctggattttagttgtttaaggcaggaggctaaatctgtcccattagtccataaaggcttgaagtacaagttcctccctggtttttaattatgatagaccttagtttctcattgtaaacataagttatttgagaattgatatgcgttttttttttaaatgttgcactttccacttgtgacataagaaaaaattgtcttacaggaacagaagaagaaagaaaaattggagagaaaaaaggagtctttaaaagttaaaaaggtaatatagccagccggaatattttttatgtcatttaaatattgaagaaatacttttgtattcttctgacttttttgatcatctgtttaattttaagtttctttagtgataaacctaactttgttacaagcaatgcagaaacatgtaaaatctgttcctcactatttaagaaatggagaaagagccaaagtatggtccactttagtttcttattctatggattattttggacgttggcaaaatttgactttcttaattggaaagaatctgcaaatttaaacttcaaggcattttgtaagtggccaccttctttgaaacctgtaatgaagttttgctagtgaaaagagaaataatttattgaatacatactgtgggtcaggtgtgctatcatgtcttctcttactctattttttttttcttttttgagacggggactcgctctgtcacccaggctggagtgcagtggcgcaatctcggctcactgcaagctctgcctcccgggttcacgccattctcctgtctcagcctcccgagtagctgggactacaggcgcccgccaccatgcctggctaattttttgtattttcagtagagacagagttttactgtgttagccacgatggtctccatctcctgaccttgtgatctgcccacctcggcctcccaaagtgctcagattacaggcatgagccaccacgcccagcctgttttcccttactctcacaacagttctttttaggtagaggtacttttttcccccattttacataaataggctgatgcaaggagataaagaacaatcatattcaaggattctatatttgtgaattcgcctactcacttacatttatttgtaaccccagagtcaagattcctgacaccgtcatggtcatttttggatatgcttatgttcagagcagcaaagaattttagtcctccaatacatatgttccaagctcagctcaaacatgggttgctgttctttgttttctgctaccatatgtatgtcaagcatatatccttttcatggtctttatttagcaccataacttttgcgtttttttgtgctttttcatggtgattttgctgttaaaatggcccccaactattgtaccaaagtgctgtctagtgtttctaagtacaaaaaggctgtgccatatggagaaagtatgtcttgggtaagcttcattgaggcatgaggtacagtgctgttggccctgagttcgatatttatttatttattttattttattttattttatttttttgagacagagtcttgctctgtcgcccaggctggagtgcagtggtgcaatcttagctcactgctacctccacctcctgggttcaagcaattcttctgcctcagcctcccgagtagctgggactacaggtgcgcgccaccatgcctggctaatttttgtatttttagtagagacagggtttcaccatattgggtgggctggtttcgaattcctgacctcatgatccacccgcctcagcctcccaaagtgctaggattacaggcgagagccactgcacccagctggccctgagttcaatattaatcaacatatatattaaataagatatctttaaaaacagaaacacaaataaaacagggttgtgtatcgtttggttgaaaatgtcataaccagagtcagagacccaagcttgtatttttcctaggggcaataagtcaatagtcatagtgattttatcgaaccacaagtactgcagataatgagagctgactctaatttgctgaaaattacggatttgaacccaggattagtttaagagcttctacttagcttctgtgctaaactgccttttatttatttattttttttttgagacggagtctcgttctgtcacccaggctgggatgcagtggcgtgatttcggctcactgcaacctctgtctcctgggttgaagcaattctctgcctcagcctcccaagtagctgggattacaagcacctgccagcacacccggctaatttttgtatttttagaagagacagggtttcaccatcttggccaggctggtcttgaactcctgatcttgtgatccacttgccttggccacccaaagtgctgagattaagtccagttatttgattcttagactagttaatggtgatgttaaaatgcctgataaagtattttgcagactgttttgcaacaaaacccattatttaaaactggtaatactgctaggtgtggtggctcacgcctataatcccaacactttgggaggctgaggcagatggattccttgaggcaaggagttcgagaccagcctggtcaacatgatgagaccctgtctctgctaaaaatacaaaaaattagctgggcgtggtggtgtgtgcctgtagtcccagctgcttgggaggttgaggcacgagtattacttgaaccacggtaggcagaggttgcagtgggccaagattgcatcaccgcactctagtctgggccacagagggagactctgttcctaaataaataaataaataaatacataaaactggtaatactgagtcactgagagagagagtattaaaaaataaaaatgggccaggcacggtggctcacgcctgcaatcccagcactttgggaggccaaggtgggccgatcatctgaggtcaagagctggagaccaacctggccaacatggtgaaacccagtctctactaaaaatacaaaaattagccaggcatgatggcgggtacctgtaatcccagctactcgggaggctgacacaggagaattgcttgaacctaggaggccgaggttgcagtgagctgagatcatgctactggactccagcctgggtgacagagcaagactctgtctcaaaaaaaaaaacaaaaaaacaaaaaaaaaaccctctgatccttgactcacttgctaatttcagagacttacctagggcttttcagatttttattttcatagagacagagcttcactatgttgcccaggctggtctcgaaccccttggcttaagctatcccccacacccacacccataccttggcctctgaaagtgctgggattacaggcatgagctagcacaactggccttacctaggggttttgaagaacatgtttttatttatatgacaattttactggcttagtcatttattccctgctctttaacctgttaatttaatatatccttcactttattccacctaactttttataccagggttttgatttttttcccctctgcttttttcataagggcgtcaactattttgaaacttaaaaaatttttttagaggtgatgtctcagtagcccaggctagagtccagtagcaccatagtagctcactacagctttgaactcctggggtcaagccatcttcccacctcagcctcctgagtagctgagactacaggtgcacaccaccatgctcagctaattttcgcattttttatagaggtggggatcttgctttgttgcccaagctggtcttgtactcctggcttcaagcaatcctactacctagtcctcctaaagtgctgggattataggtgtgagccactgcacctggccagaaactgtttcttaacatctcatttctcttaccttcctcactaataattttccattagtattctcttttatttctgctttgggttatatttaatgtatgaatttcattcacaatgaatattccttcaataccctacctattgaagggtattccttcaataccctaccctacaaaaatacctatttttgtatttttagtagagacagggtttcaccatgttagccaggatggtcgtgatctcctgacctcatgatctgcccgcctctgcctcccaaagtgctgggattacaggcttgagccaccgcgcccggccaagatgtacatggtatttctaaataaaaatgccaactatgggctgggtgcagtggctcaacgcctgtaatcccagcacttggggaggcctaggcgggcggatcacctgaggtcagaaattcaagactagctggccaacgtggtgaaaccccatctctactaaaaatacaaaaattagccgggcgtggtggcaggtgcctgtaatccccactactctggaggctgaagcaggggaatctcttgaacctggcaggcggaggttgcaatgagccgagattgtaccagtgcacactatcctgggcgacaagagtgaaactccgtctccaaaaaacaaacaaacgaaatgccaactatgtttaattttgaaatttctcttctaaatggaaaaaaatggacagaagtagagcccttgggaaaaagcagagattatgaacaagttatagtagggaaatacagaaaaatattacatgtaggtaagtataatagtgaaaaattgtggatgtggctcaattgcaggaaacatattttttctcaagttaatcagtgccttttaacgtataatactatgaaggtccttaataaaatcaatattctgaatccttgttttgtagggtaaaaattcaattgatgcaagtgaagagaagccaggtaaatatccttattctagttttgaagaatatgcgtttatatttctattttaattgctatcaaaaataaaatttttttttatagttatgaggaaaaaaagaggaagagaagatgaatcatacaatatttcagaggtcatgtcaaaagaggtaaaaataaaagggagagggcacctaacatttgatgttgagtaaaatgtaggttttaaaccaccttaaatctgtaaagattgaatattcaatatcacatgaaatatgttttgaatttaatattatatatcatttataggtgaagctgccaaaatgtttgaagctatctaccaacctacagtagacttgagactaatctgaaactaatgtcatctgaccttcatagacttttttttttttttgagatggagctctgtggtccatgctgccttgcagtgtcactatatctgctcactgcaacctccacctcgcgggttcaagcgattctcctgtctcagcctcccaagtagctgggataacaggtgccaaccaccacgcctggccaatttttgtattttcagtagagatggggtttcaccatgttggccaggctggtcttgaactcctgacttaaggtgatccgcccgcctcggtctcctaaaatgccacattacaggcgtgagccattgcgcccatcctcacttaagtggcaaataggcttacacctttaggttgttctggttttcttttctttctttcgtttccttcctttctagcttccttcttttttttcttcttttctttttttgaggcagggtatcactctgtgactcaagctggagtgcagtggcacaatcatggctcactgcagcctcgacctcatgggctcaagtgatcctcctacctcagccccctgagtagctgggactacaggtgtgtgacaccatgcacagctggctaatttttaaattttttgtagcaatgagatgtcatatgttgcctaggctgctcttgaactcctgggttcaaatgatctttttgcttcagcctcccaaactgctgagagtacaagtgtgagccagtgtgcccagctttttgttggttttcttttcttttttttttttttttgatgagacggagatttacccttgctgcccaggctggaatgcaatggtgcgatctaggcttaccgcatcctccgcttcccaggttcaagcaattctcctgcctcagcctcctgagtagctgggattacaggcatgtgccaccacacccggctaattttgtatttttagtggagatggggtttcagtgtgttgcccaggctgatcttgaactcctgacctcaggggatccacccgccttggcctccaaaagtgctgggattacaggcgtgagccactgcacccggcctttgctggttttcttatttgggttattacagataacagtaatagctttgactctacctattatcttgtgcttgttaagtacctagtggacttgtatagcattttgcaaggaactgtggaaacaacaggcatgggcatagagcttaaaattacatatatgttgcggagagttggggggaaagggtagggtagtaaagacactgtctgaccagagcagataagtatttcagggaaaaagatggtaccagctctttgttaaacgagtctgagcctggcctagtcagaaattgtcactataatttaactttttgtaacccctaaccttgtcttaagaactttattcttgttttttgttgaagacttttacgaaactgaaatcatatgctcttttctaaaaccagcttctttttttcatttctcactttttacttaaaaatatgaatgaattagagcatcttcagttctgacaaaccagttccttagcatgtttttaatgtgtcacattcttcctttttttttcttggagacagtcttgctctgtccctcaggctggagtgcagtggcgcgatctcggctcactgctacaagctccacctcccatattcaagcgattcttatgtctcagcttctgagaagctgggattacaggtacctatttgtatttttagtagagacagggttttgccatgttggccaggatggtcttgaactactgacctcaggtgatcctcacgcctttatctcccaaagtgctgcgattacaggcatgaggcaccactcctggccacattcttatatttaaaaaaaaaagcacaactctattgtctactgttgttcttttacctgaagttcaaactctagctcttcagaagaaaaatttacataatagttttccttttctctagggatgcaatgatagtttttcactgaaaaataatcgtcagggggccgggagcagtggctcacgcctgtaatcccagcattttgggaggctgaggcgggtggatcccgtgaggccaggagttcgaaacctgtctggccaacatggtgaaaccccgtctctactaaaaatataaaaattagctgggaatggtggcttgcgcctgtagtcctagctactcaggaggctgaggcaggagaatcacgaacctgggaggcagaggttgcagtgagctgagatgatgccactgcactccagcctgggcagcagagcaagactctgtctcaaaaaaaacaaagttagggtccactgaaattcattatggtatctattcaacttgcagtttaaaacacttttaggctgggcgtggtggctcatacctgtaaaccccggcgctttgggaggccaaggtgggaggatcacctgatgtcaagagttcgaggccagcctgaccagcatggagaaaccccatctctactaaaaatacaaaattagctgggcttggtggcacatgcctgtaattccagctacttgggcaggctgaggcaggagaattgcttgaaccccggaggcggaggttgcagtgagctgagatggcaccattgcactccagcctgggcaacaagagtgaaattccatctcaaaaaagaaaaaccacttttaatatgccatactgaagtttagccagtcatacagctgtttatttaatttgttaaatggttgtggaatatcggttttgggcaaactttgtcataggtggatgaaatccattagtaaagaaaggtaaatgctgtcttcaccttagcctgcatacagagagagatataggagtaagtagtcaatgaaattgaatttttttttttttgagacagtgtttctattaccctggctcgaatgcagctggcacaatctcagctcactgcagcctcaacctcccagactcaagtgatcctcgtatctcacactccccagtagcagggactacatgcctgtgccaccaggcctggctgatttttgtattttttgtagagatggggttttgtcatgttgtctaggctggcctcgaatttttgggctcctgcctcggcctcccagagtactgggattacaggtctgagccactgtgtccggttgggaattggatgtttatacaccatattagaggggctcttcactctggcatgcagttcctgaaccttttcatctatgaaaaggaaatgatatctgtgttgtgacttgaaggataaaagttaaattatttaaaggtgggattaatagggaaagagtaaagtacaggtaagatagtgggggaggtgttttaggaagaaataatagcattgaacaaatatccagggtcaagagagactggcagtttcaaaaaacttgaagtaaattatatttgcctccaatttgtatataagtgaaaagagtgatgaaggaaggatgaagctgtcgatgtaagcatggtcaggagtttaaggctgccataagtaaagtaggaagctattgaaagattttaagcaaatttccattttggtaaatcacttggctagtttattcagagatctgtgggcatagtagtttttctttctttctttttcttttctttttttttttttaagacagagtttcactgtgtggcccaggctggagtgcagtggtgatctcggctcactgcaacctccgtctcccagttcaagcaattctttcacctcagctccctgagtagtccagcgcctgggactacaggcacgtgccaccacgcctggctgtttttgtattttttcatagagaggtggtttcaccatcttggccaggctggtctcaaactcctgacccgaagtgatctgcttgcctctgccttccaaagtgctgggattacaggtgtgagccaccatgcctggtcccataccagttattctttcatttactgttacttctttcttctgtatatttactgaatttcctgctctcttttcctcttcgcctaactaaattctttccattgtttcattctcaccttacttgctgaagaatctctaaatctgtgaatgcatttggaggggtataacccaattgagtgttctgccactgtggaccctgctcctccaagttatcccttctgtttcttcaccttttccttcctcactgggtctttgcctttcaattatagatacattgtgttttcctgtctgcagaacaaaaatttttgatccagtctttctagattgccctgttttttattctttatttccaaggttttttttgagacacagttttgctcttgttgcccaggctggagtgcaatggcgccatctcggctcattgcaacctccggctcccaggttcaagcgattctcctgcctcagccttccgagtagctaggattacaggcatgtgccaccacgcctggcaaattttgtatttttagtagagacggggtttctccatgttggtcaggctggtctcgaactcccgatctcaggtgatccacccaccttggcccccaaagtgctgagattacaggcatgagccactgcaccggcctatttccaagctttttaagagtaggctggactggacatgatgcctgacacctgttatcccagcactttgggaggccagggtgagaggatcacttaagcccaggagtttaagactagtttgggcaacatggcgaaatcctgtctctacaaaaagaaatacagaaatagccaggtgtggtggtgcatgactttggtcccagctacacaggaggctgaggtgagaggatcacctgagcctggggaggtgaaggctgcagtgaggtgagattgcgccactgcactgcagcatgggcaagagaatgaaaccctggttttttttttttttttttttttggagagagagtctcgctctgtcgccaggctggaatgcagtgctgcgatcttgactcactgcaacctccgcctcccgggttcaagtgattctcctgcctcagcatcctgagtagctgggactacaggcacacgtcaccacgcccagctaatttttgtatttttagtagagatggagtttcaccattttggcctggatggtctagatctcttgaccttgtgatccatctgccttggcctcccaaagggctgggattacaggcgtgagccaccgcgcctggcccttttttttttttttttaaagagtagcctgtgcatatttccttacacattatgcagttgagcagttttacgcctaccagttgaatttattggtatctttgaaattgatacctagcacaaagcaaacaatttatcttttcctctcttccgaatcttgctcttttgttttctctttttttggtgttaatatcagaaccagtatctactgtgtcatctaaaacaatttaggaggttatctgaatttccttatatatctagatttttatcgatttctgtgagtcatttcatttgctgctactctggtgtttatgcccttactgtgccctatttatagtagtttcttaattgatttttataatcctagtctagctctcattgtcaagagtaccagattggtttttctgaaactcaaatataattactcataacctccattactttttatggtttcacaaggaattgcattttcttgtagaaaaatttgagaataaacaaaatacaaggaaatcacctgaaaagctgtcacacagataatcactaacattttggtatatgtatgttctttttctttgtattacggaaaatctcaaaaattacaaatgtttagaggatagtaaattgaatgtccacctttatcactttttttttttttgagatagagtttcactcttgttgcccaggctggagtgcagtggcatgatcttggctcacagcaacatccgcctctcaggttcaagcgattctcctgcctcatcctcccgagtagctgggattacaggcatgtgccatcatgctcggctaatttttagttttatcagagatggggtttctccatgttggtcaggctggtcttgaactcctgacctcaggtgacccgcccgcctcggcctcccaaagtgctgggattagaggcataagccaccacgcccagccaatcgctttttaattctgggatattttaacaaaaagctcagcaagactttttttttttcttaaggtggagtctcgcactgtcacctgggctggagtgcagtggcatgatctcggctcactacaacctttgcctcttgggttcaagtgagtctcctgtctcagcctcccaagtagctgggattacaagtgcccaccaccacgcccagctaattttttgtatttttagtagagacagggtttcaccatgttggccaggctggtctcaaactcctgaccttgtgatttgcctgacttggcctcccaaagtgctgggattacaggcttgagccaccatgcccggccaagactattttttagaaccataaccacaatacagttaccacacttttgaaagtcgatgggaattccttaatatttaaatttctcaataggctaatttttatttttagggatgggggcttgctgtattgacgagactggagtgcagtggctattcctgagtattgtcatagtgactacacctcaaacacctgggctcacatgatcctcctgcctcagtgtcccgagtagtagtgcagggactataggcacttaccgctgtgatctgcttagctcatacattttaaaaaaatagttggttcaaatcaggatccgaaaaagttacataaattgtgtttgattaatgcgtatcttgggtctcttttagatctagagtgtctctcatcttttttaagaaacattatttgttgaagaaaatgagtaattctgtataattccccacattctagactttactgattgtatccccatgatttctctgcctcttgtgtttcctgttaactatagtaactataagttaaatacggaagtttgtgattaaggtgtttttttatttttttttttatttttatttttttttgggagacaagatctttctctgttgcccagggtggagtgcagtggtgccatctcggctcattgaacctctgattgctgggctcaagcaatcctcccacctcatcctcctgagtagctgggactacaggcgtgtaccaccaagcccagccaacatttatattttttgtagagatgggatctcaccatgttgcccatgcttgatttttaataagaatacttcattggtggtatttatagattttgatttatttccaaattgttctttcaaaagtttcattttatctagtcattttacaggacagcttttatcagttcctggtataaaatccttttagcctcagccttataatatgaatatctatacatacataatacttcatacacacacgatatacatatattcccatgtatatatatgtgtgtgtgtcagccacttacatgtcctgttactcttctatgaatcttaaatttgatattgctgttttgaatctacttcatcccctatgccttctatattctctctgcttgaaatctaccctcactatcttgaatgatgaagcctggtgacaactttttagataattttatgtaagataattatttgctaagtcatccagtgacatactcgggtattgtttgtctccctaccagcagcatctagtaggtacttcaaaatcagagcactttattctgtatttttaattttttctgtctttgcctcttacccaggaatgcaaactcagatgtctatccacagaggcctaaagtgggctgtaacatggtttggcaaactttttctgtaaatagccagatagtaaatatttttagcttttgagtagttttgtgggcaactactcaaccctgtactctgctgttgttgcttgaaagcagccatagacaaaccgtaaacaagtgaggctgactttgttccaatttatcccatttctttgcttttaaaaaaatacctgtgtattcgcttagctggagttggtctacaggctgtagtttgctgaccccaggactagaggtttgttgccatgtgtgaatttgtacttaatctactcagattaaaagaaagaaaagctggaaaatcactgtatttgatgaaatatcccattgtataagtgttcccaaattagcctagaatgttatgaaatattatgagccagtaatgtctataggcttatttctgcctgaaggctactagttttatcttgagaatctcatcctcatttcctggcaaaatgagcacagaataaatgcttgttgaataaataaataaatgaacttcatacattattaatttgtttttgttttctcaaactactaggaaattttgtctgtggctaaaaaaaataaaaaggagaatgaggtaagaaatttataatgtaagattaagtttagaagtcatatttactcctcagttactagtcctttttctttaatcagcagtatacgttcttctcactattatcctgtttctttgctttaaaaaaaaatacctatgtattcacttcttccatatccaacattcttcttttttatgtatcaactttagttagttgttttattgcatgattcttgatgtataaatgttaatttatgggtctagcaatgttgcttttaacttgtgaatctggcagtgatacaagtgctcgtaaccatgtggatataaaccgtgaatcatcttatggaagctgtgagggatgccttaatcttgcttcagaccttaaagattttttaagtttcttaaaagttctgtttgagaaggcttgatttccgagccacctcttcacttagcccatttcatgtagagaggttccttgttatctgactttttattgttcaagtacttaaaattacaaggttgcctagggaagcaaaataatcatgacatgaaaatattcatgaatggatatgaacttcaggtagttaatttacatattaaagatttttaggcctttgggaaattaatgttatgtttataaaatgagagataatctatttggtcatataattttgtccaaaatttatattgtaaaagtgtcttggtttttattctttgttaagttattaaggactggtttatgggtgcagtttagttggatttttaaagatttagttagataaacatttagttggatttttaagataaagtctagatgtaatcttctgtaatttactatgggattttggcttcattttataacttacagtcagtaagaaatagttgttaagtatggtattttaatgaatttcgacacttgcatacacttgtgtaaccaccatccaaatcaaggtatagaacatttccattgtaaagggatctcttctatgtctttccacccccaaacccagaggaggccactttttacaccttttataggatggcttattatttcctttccactcaacatgtctgtgatactcatttatgttgttgagcatattagtaaccggtttcttcttattgactagtattctgttgaatgaatgttacaattttctcatccatccccttattgatgggcatttgggttgtttgcagtttgtgacttttatgagtaaggttgctatgataatttgcacacaagtccatgtgtagacatgttttcatactttctgcctgtgtacctgggaatggtattgttgtgttacgtggcaaatgtgtgttcataagaaagtacagattttcccccccaaagtaaacacatcattttattctctcgccagcaatgtttgaaaactccagcttacattattgtcagcatttgatagtctttttaatttcagccattttattagatgagaaatggtaacttgtgtggtttttaacttgcattttcctaattactactgaagtagagtatatttttatgttctttgataactatgttttctttctttttttttcttttttgagatggagtgtcactctgtcgcccaggctggagtgcaatggcacgatctcggctcactgtaaactctgcctcccaggttcaagcgattctcctgcctcagcctcccaagtagctgggacaacaggctcatgccaccatgttcagctaatttttgtatttttagtagagacagtgtgtcaccattttggccaggatggttttgatcacttgacctcatgatctgcctgccttggcctcccaaaatgctgggattacaggcgtgagccaccatgcccggcctgtatgttttcttttgtaaagtatctgttaatatcttttgcccgtcttatttatgcgtactgtattttctgtgtaacagtttaataaattattgagtatcacaatattagaagtttggaagagagatacaattctaatgatcttttcaaaagtatgtgcctgattttaatttgtaagggttattctcagatttttatattttattttattttattttattttattttttgagatggagtcttctgtcacccaggctggagtgcagtggctgtgttcatggctcactgcagccttgacttcctgggtttaagtgatcctcagcctcccgagtagctgggatacaggcagttgcgtgcaaccacacccagctaattttttgtatttttagtagacacagggtttcgccatgttgtccagggttgtcttggatacctggactcaggtgatcctcctgcctcagcttcccaaagtgctgtgattgtaggattagccactgtggcagcctgttatttttttttttagtagcttttcatttgtagagggatggcgatgtctccagttttttaatccaggtgtgatcttagtcttctatacttaatgattataggactcagtagattttgttagttgcattttctgataaatggtggcatacagcagcattttgtataacacatcttattaaactttttttctctacaggatgaaaactcctcctctactaatctctgtgtggaagatcttcagaaaaataaagattcgaatagtataattaaagatagattgtctgaaacggttaggcagaatactaaattcttttttgacccagtccggaagtgtaatggtcagccagtaccttttcaacaaccaaagcacttcactggaggagtgatgcgatggtaccaagtagaaggcatggaatggcttagggtaatgaattggaatttttaatacaagatactggttttatttctatagtagcctaatgatttgaggtaccacaacttgagtcatttctatcatgtttcactattatacatttgtatgtggatacttgctttctgatttctttaccctgaatttttagaagtagaaattaccttgttaatggcttccagcacttttatggctttgataaaggactttccagtgttgttataatttatggtgtgaatatatcagctttaacataattctcatctttgggtgtgattttttaaagagaagaaataaaatattgtaatcctgtagttgtttatatccaagtttaaatacagtatctattattttgtccagatgctttgggaaaatggaattaatggcattttagcagatgaaatgggattgggtaagacagttcagtgcattgctactattgcattgatgattcagagaggagtaccaggaccttttcttgtctgtggccctttgtctacacttcctaactggatggctgaattcaaaagatttacaccagatgtaagacatgcttccttatgttaaaattataattttacatgttttcttatgctttgttgtagtaggaattaaattgtagaactcttataattatattggtttctgtataaatattttgtctgatttgacttactcaatctgcacaataccctaatttaaatttatatagtataggttttggaaatccctgacatctttcctaaaatattcctgaatgattttcagtgcattggtaatttgattcgactgagacagacttaggtagagattttattaaaaattctgcttgttcttcacttgatctttgccaaaaggctaagaagagagttttctgttttttctgtacttgttaccttctgcaatttttttttttttttttttttttgaaatggagtctctgttacccaggctggagggcagtgatgcagtcttggttcactgcaatctctgcctcccatgatgaagcaattcttgtgcctgagccaccggagtagctgggattacaagcatgtgccaccatgcccagctaattttatgtttttagtagagacgatgtcttgccatgttggccaggctggtcttgaactcctggcctgaagagatctgcccactttggcctctcaaagtactgggattatagacgtgagccactgtacctcccgggcccagcccttctgcacatttttgccttatgagaaatatatatattctagacgtagtatcaccatctgtctcattttatatatttatatatatattatttatttatttattttgaaatggagtctgtctctgtcaccatgctggagtgtagtagctgggactacaggcgcacaccacaaggccaggctaattttttgtattttggtagagacaggatttcaccatgttggccaagatggcctctatctcctgaccttgtgatccgcccaccttggcctcccacagtggtgggattacaggtgtgagccactgcgcccagcctatatgtgttttatgtatttgtaggttttttgttggggggggggttgtgtttgtgtgtgtgtgtgtgtgtgtgtgtgtgtgtgtgtgtgtgtgtatgacagagtttcactgttgttgcccaggctggagtgcaatggcacgatctcggctcagtgcaacctccgcctcccgggttcaagcgattctcctgtctcagcctcccaggtagctgggattacgggcgtgcgccaccacgcctggctaattttgtatttttagtagtgacggggtttctccatgttggtcaggctggtctggaactcccgacctcaggtggtctgcccgcctcagcttcccaaagtgctggggattacaggtatgagccatcccacctggcccgtctatttgtttttatgcctttttttttgtcttcagacaggatgttgctctgttgctcaggctggagtgcagtggcgtcattctggctcactgtggccttcacctcccaggctcatgtgagcctgctatctcacacgcctgagtagctcatgtgaacctcccatctcactccactgggtgagtagctggcactacgggtgcgtaccaccacaccagctaatttttgtattttttgtagagatgggatttctccatgttgctcaggttgatctcgaactactggactttagagatcggcttgccttggcttcccaaagtgttgagattataggtgtgagccattgtgctgggcctgactttgtttttttgtttgtttttttttcattttctcccataatagttcaatgatttgttagaattgcttggcttattttgctatagaaaaatagaaataaaattttttaaaattatattttttccctcagaatgatttatattttctaaatagtcaatatttacattttgttcttaagtctgataaaaatcaatataaaatttttcagatccctacaatgttatatcatggaacccaggaggaacgtcaaaaattggtaagaaatatttacaaacggaaagggactttgcagattcatcctgtggtaatcacgtcatttgaaatagccatgagagaccgaaatgcgttacaggtacaaatgatcttcattggtttctttgtaatacataaaacatgcttttcttcatttatatcactttctcaccatctgggagcatttgtctaatttttttttgttgtcgaaataatagattatattgtgcatatacctgtagaagctggaaacttttattaacagaatgattgggatgaaggccatcatttgtaacaatataattaaagcttatggcagtttaacctatggcttagaatcatccagaaatagacctaatctcggaatgtattacagatatatttgtgacaggtactttgaatatatggaatttacttatcgtattttaatcaaataagagtatttgaagacaagttatttttagagtatcttattggactatttggtagcattttcgtttctattttcttgatgttctagctacttatttaaataatttccagttagcataacagaattgaaagattgaccttttttctttcatgccttctgttttcatttattggtgttttgaacttcttcctcactgctctacctcattcatttataattcttgactgctttttttttcctttctctggccatgtgagaaccctcttagtgcagtccccttaggtttatcttgcttgcttggaaataggaaagtatttaatggtttcaacataaaatcaaaacacataagtcataaatagaataattatgacttgcataattatgaccagtattgtcaggttttatgtgtctgctggtaaaactttggaatatgatttgcagaaatctcagttcaggagtttagcaaagtttatgaatgtgtacagcattaaaaagtatttaaaccaggccgggcatgaaggcttatgccagtaattccagcacttgggagtctgaggtgggcagatcccttgaggccaggagttccagaccagcctggccaacatgacgaaaccctgtctccactaaaaatacaaaaattaggccggacgcggtggctcacgcctgtaatcccagcactttgggaggccgaggcgggtggatcatgaggtcaggatatcgagaccatcctggctaacaaggtgaaaccccgtctctactaaaaattacaaaaaaattagccgggcgcggtggcgggcgcctgtagtcccagctactcgggaggctgaggcaggagaatggcgtgaacccgggaagcggagcttgcagtgagccgagattgcgccactgcagtccgcagtccggcctgggccgacagagcgagactccgtctcaaaaaaaaaaaaaaaaaaaaaaaaaaatacaaaaattagctgggtgtgatggtgcacatgtttaatggcacaaggattgcttaaacccaggaggtggaggttgcagtgagctgtgattgcgccactgcactctagcctgtgctacagtgagagtctgtctcaaaaagaaaaaaaaatttaaaccagtagtccccaaccttttggcaccaggaaccggttttgtggaagacaagttttccatggaccatgggtgggggatggtttcagaatgattcaaatgcattataattattgtgcactttatttttattattataaaattgtcatatataatgaaataatagggctggccgtagtggctcacccctgtaatcccagcactttgggaagcttaggcgggcagatcacttgaggtgaggagtttgagaccatcctggccaa

SEQ ID NO: 61 - DNA, 32742 bp, Homo sapiens
  source 1..32742: mol_type = other DNA
tttgtttggctgaggggagcgagcggcgctttgggggaggggtcgcgtaggcgcctcacctgaccctgcggccgtgcggttgctgctccggggcaggtctccttccaggccaggggcccggaatcatgtacataaagcaggtaaggccttcgcgtccctccaccccgtcatgggccggtaagggccgctccttgaggcgggagtgttgcggcgccacccgcagcctctcccctgtctccacaggctggaccagggctgggcggggactgtgggggaggagggagacccgggtcccgctagtgccccggctgcggggtcgcggagaattggggcactcctttgcagccccggcctccctgctggcgcttgtctgggagaggcaggatctccgagaggtgtggaagggccggcgggcgggccgctgggagggactgggccttcctgggtggccccagagctggcggggggcaccccgccggggcggccgcgggcgggaagggctgtgtggtcctgcaggggtggcctcacacggcccatgtgcctgggatgtgtggaaaggtggcttccccggcccgggggcggccctgggggcattggctggggtgtcgtcacctgtcactgcggggagccgttcttctccccagttaacccgcgaagtgagcgggaccctcctgcttgcaggatacggagcgccgcctccctcggttgtttacttctgtcaaaatggtcttcccgcgcgggactccaccacaaagatgagcccaggcacacggccttggagacggttttctgttgggtctgtcgggctctgagcactccttctttggaacgtgggttctttcaggctggccggcgtgagtgactgaaagcagcactcggtggtcttggagtcaggagagctggggcccgtcggcctgcttttatagacttgctattgtactgcagcgtttagggttcagttaagctcacacagtgtttttgattttgaaaggtccttaacaggttgacagcataactcctaaaaaaaaataaaacccagcagcattgccttggcaaagattaccgataaaagtacctttttttttttttagcagatttttaatcaccactttccaaaatgaatttttcttatatgaaatttcgagttttctatattgcattaaatgaaaaacaagaaagaaatgcaagagaaaaatgttaattttttttgtggggtgggttctcaaaaatgttttttatttactaggtgattatccagggttttcgaagttacagagatcaaacaattgtagatcccttcagttcaaaacataatgtgattggtaagtgttcttggtttactcggtcatatttatagtctatacagataatgtaaattctgtccatttctatattggcttaaggagacaggaattgtctttgaatattaagttatatttttctgcgtgaaataacttttctgtcttattgcactgatgaattgcttatttttataaacttaaaatgtttggataagacactcataagttatccattttttatctaggtagccttgtatgtgtgtgtaagagtgttttaaagcatttccgctcttctgttcttgttatatatcctagtgaaaatgctgactgttgccttatttcagagacagacaatttttattcacaaagtagatgccaggattccccccccaccccggcagtcagtgtctctaaggacagaccatgtagctagattggaagagcataaactttggagcataacagaatggggttcaaatcccagttataggggggtgggggcctgggggagggatagcattaggagaaatacctaatgtaaatgtcgagttgatgggtgcagcaaaccaacatggcacatgtatacctatgtaacaaacctgcatgttgtgcacatgtatcctagtataacaacaacgaaaaaaaaaatcccagttgtggcacacgttctttttcactttctgagaagcttcagttttctcatttgtaaagtggagatgatacctgtctcatagggctgttgagaagattaaatgagaaaccttatgtaagtgtgaagataaagagctaatggtgattgccattaacaatatgtagtcattatagattgctcagattgtagtgtgcattttgctgatacagctaacaaaaatgttttctgacactctgctgagtattttacaggatagatgaaaggagtgcttctggacaccagaaacacagactgctgttgacacagttttgctgtacagagtccaaactaagtggtgtattagtttgctaaggcagccataacaaaataccatagactggtggcttaaacaagatattttttttctcatagtctggaggtcagacatccatgatcaggatacctgcatggttaggttctcgtgaggctctcttcctggcttatggacagctgctgtcttgctgtgtgctcacatggccccatcctcatgtcctcatttaaccataatcatcttccaggggtccccatgtccaaatactatcacattcgggattaaggtgtcagttgtttcagggtgtcagttcaattcagtctgtggtgcgtgggtgagattcacattactaatgtttccagaagacctttagagaatcatacttcattttgtataaaatgataaaattgaaggcaggtttttttgccctcgatttatcaatagcagccttgtagttgggaataaagaaggcatactttttttttccctgcttgtgctctgtctactgaagtcatttaattgaattgacatgccatagggtggcttaattgtactggggttttgcttacatataagtactttctgatttttttcatcaatcagaaaatctttagaaatgtagaaaaataagaattattagatttctgttttctttaacttgcaccttaaaataagtaccttaatatttcatttgtgtgattttataaatgatctgtaacttactagctagaatgattacattttgtctataaggtccatcaaataccattgttttagctgttatcagttagttgtgttacctctgtgattgcagcattagatttgttaatagtcactgttacaaaggaaaatggttttgtttaactaaaacaaatgaacccaagataacagtactgattaaacatattttaaaaccagacacgttgtaagacataatgtaagaaagaccaaaagtagttaggtactgagatttgccttaaaaatatctggtgaaagcataccactttgattgatgaatgatgttgactattaaaaaatatctcttgtactgatgttgggtatatgcatcaaacatatacgtttttagggatttttttccccctaacctttaacaaaagaaatacatgttatagaacattatggaaaagctaaaaggaagaaaattaagataaactataatccttttactcagagataaccattctttgttttttactgcacaccatgattcttcagagataaccattcttaataataacagtctatacttgtgattagtcctggtttcctagaaaacagcacagacaggattagctgctaaggctttgatgggaggtgcagtttgagggcaagaatgaagagaaaagctggtcatagatttctaaagaagagacaggtggtttgcagtcatgttaaataactcacagactttgtggacccaccataccttagaaaggtcagatgatagaggaatggatttggattctgacaaggatttgtttgcaggcacctgtctttcattggtcaaagttttctacatctggcattgatgcctccaagcttttggattgtggtgctctgggaactaacacccggaagtagtcagggagttatagcctcctttccatgttcacaattcaggagtacctgaatgtactcccaaggtagcttgaatctaccagaggtattaggagactgagcttttccattgattggcagccaaggcctgggttgagaaaggtgaatctggggccacatataaactgtgtttacctcagtacgtttttagtctttgtatacatctttttaatatatatttaaataaaaatgggttcatttttaaataaaaatgggttcatttttaaataaaaaatgggttcatcatataacttactggtaatctgttattctccttcaggataaatcttgaaatatctttattaaatattcagcatcctttaaaattgctatatagtgttccactctagcagtaattcttaaaaggaaattcttaaaatttcagttatttatagatggattgtggtttgaaatatttattcatttaatgataaattgtcatcttaaacttttatttagaaatagtttcaaatttacagaaaaatttccccaataagaactgttcagagactactcataaaccctttacctagattcacctgttgttaacattttccccacttgctgtatcatttccactttttacacacctttttccttaaagttatttacaccatggtcctttacctctgactttaatgtgtactttctaagaggagggatgttctctttcataatcacagtacaatttacaacttaagtaaatttaatacatagtaatctgtccattttccagttatgttgactgacccagaagtgttcttgatagcatttttccccctccagtacaggatctaatttaggagcaggtattgcatagttgtcatgcttctttagtctcctttaatctggatcatttccacagccttcctttgtcttttataacattgttatttttgagaattaagacataagtgatgttgtgtccctctcaggatatcacatctggaggcacatgaggtctgtctgactcttattgatgatattacttttgatcacccagtcaaggtctaatgtttccactgtgtaggtattattttttcccttgcagctaataagtaatataggcagatgcttttggaccatgtaaatcttgtgctccttttcaaactttgtgcctgcatttaccatctgttgatgacccttgcctttattctgacggtcacaaaatgatttttcatttccagcactcctttcacatttacaacttggcatttggtaattctcctccttccttacctacttatttatctttttattattggtatggatgcatggattattccccccaccaataatttataatttatttggccattttgatgctcagattacccctagttttagctactgaaaggccccttcaagctggctcctgtgtctgtcatatgcgtttttttaaaaagtacatcctttctggcatgacatgaatgatctttttgagatttactttgcattaaaggtggtaactttgtggttaatttgctcaggatatttctggctcaagagtgagaagactgacatagttatttatgagtcttaacactgaaaatttcactaaacacacttaaaaggatttgatacccttttacgtattgaattgcttatatttgaattttgttagtcaaaaagtaccttaaaattatttatatttttgtggttctgtgagactacacatgataatatagggttgattttaaacatgagaacactttaaggatttaaaatgattattttagaacgttagcaatatatgaatctttaaattgttaaacatatatagttaaaatagaattatatatccattgtaatatgatataagagccaggtagtatatttagctattcctattcattttaaactattgggtaagagcaaacggatcaactgtgaaatatctttaaagaaaaaactattagaagtctgtacaaaaattgaatttatttggtgattatagttgttttattggtttcttttgttcactgtttaatttcagatgttaagatgtattagaaaattggattttaaaaatattgagtatttttaaaaaggtaaacagttttaattttattggtttttatgtaaaataacttgtactttttgaaattttccagtgggcagaaatggatctggaaaaagtaactttttttatggtaggtgttgctttttgaattgtaaatatattaagacctgggtatcttagggtagattattaaaatcattaattttctgaggttatgtattcatgaaacccaagaaatactttatatggggttgcagcttagtgtagagggtttagagtatacagatctgaattctgctttatacccagtggctgattagctgtgtgagagtgggcaaaacacgtagcctctcaaatttttcttttcactttaaaaatggagatgtttggatgtttgccctgtctaccttagatggtttgtaagaatggaatgcaatagtatgtatgaaaatgctttttaaacttgaatgtaatatataaatgttataaatgcatattttaaacgtatgtaaatgcagtagaatagttgatagtattgttttggaaaattgttcatctttcttatttcacctttttgaaaacgttttctaaaccaatcatctttgtaaaggatgaagaggtataaaaaacttgaaactgaacagactgttgtcactttgaagatagtaaatagagcttcaaaaattctctctaaattgcatttaagtgtaaatagcaatgcgtctgttaacaaatcctttgaggagaaaaacattttaacaaaattagacagttaaggagtaggttgaaaaatttgaactttttagttgggtaatgcttgagggaaaggggcatttagtggactggcttagtaagaacaaaggttctatctcttctgtgcacacgaatctgaaaggcactctctagcctgtatatcctattgtggttgtaatttggcaatgatgagagaatggactgaagtggaagtatttcagaatctccagggcagtgtgaagtctcctcacctcgacctgtgtccacagcacacacattaatgcttatgcacgtacttgctgatgtgggcacccccaccacctccacacacacacagtgccagaggtctcttgggtggactgggacaagaacagctgagtaaagagttccacttcctaggcagggtggtccagttaggtactctataccgaagtaggaacggccccttcttacagagctcggtatagtataagaagtgtagtataagttgggcatctcaaacatttccctgtatttccttagttttatttcttttggtaaagtatccacttaagcatattctcaaaatacatcctattttgttaaaaaggattttaactcatatcatttatgtctagtggggaaaaaagcaaatacagtgttaacctaatccagtcagtgaacactttgagccagaggtataccttagttttgcttgtctgttttcatgtatttcggtggtttctctttatttccttaccttaaatgtttcaatgaaaacttctcagtatttttcttatatcatttcctacctgattagtctgatgtgcaggcacattttctgcatttccttttgtccatatgaaacagataatttatttgcattgtctattaccagacacactatgttctattgaggtgtgggaagttataaataagttataaacacttttttagggtatactaatagttgtttttgtatttccagcaattcagtttgttctcagtgatgagtttagtcatcttcgtccagaacagcggttggctttattgcatgtgagtgagactgctttaagacattattgatattacatatattttaaaaataaattttccatgctggttaaaaaagcatttgttcaagtttcagattctttgtgaacaagacacaatctttctcataagtgtgttactctgctgtgaaatttagcctaacatattaatgccagataaaagcccaatttttatacagtggtttaggagaaaattataggatttgcctatagatggatatgtcctccatataaatgtcttaaaggagacatgatatatatcataagtgttttattctgctgtgaaatttagcctaacatgttaatgccagataaaggcctaatttttatgtgatggttaggagaaaattataggatttgcctataggtgggtatgtcctccatgtacatttctttaaggatgtgatctgcaaaggcttaagaagcaggtttgctgaggagaaagaagagtttgaggttgcagattaggaactttaagatgcagaaccaaaaattaattgggaacatagagaaacaaccattgcaaactaaacaacatacaagttgtttgttgttttagccatatttgtacttagatagtaaacatcattttccagtatgaaaaacagtagagatgttctgcaacttacagcggggttatgtcctaataaacctatcataaactgaaaataccataagtcaaaaatggacattagcctacagttgagcaaaatgatctaacacaaaagtctgttttataataaagtgttgaatctgtcatataatttattgaatactatgctgaaagtaaaaaacagtgattttatggatactcaaattatggtttctactgaatgtagactgctatcacgttgtcattcagccatttgttgaaccatcgtaagttggggaccacctgtatatttacagtaatgtgagttaggatattttattaagtgggtccttttgtaatgcataagcacgatgattgggttttcgtgttcatgtgagtcatgcctccctcaaaccttgttaggacattggcacattaccaatgtgatgtggaaaaaaatatgagtaatggactaaagtaattttaggatagaaaatcatgaaagactacaataaaacgattaatccttctgatttgaatattgtttattaaagactagaaaatgaaattcctcaacatgtcttaacagtgtttctcacacataggaaattgttttgtttagctcttgtctgtcttttccccttgtttagtttgaatttgtagcccagtaatcagaattgatttcctttagaaaaattctttttaggtttttcagattggcattaaaataattaataacctctttggtacagttcttcattgtatttactacatagtttctataatctggaaggtatctggacttggtaccatagtttttgtgtcatagattggtttaaatgtgacacatgttaaatgtgtatatttctataatagatttaaaactgtagaatgtctcaatttttcttaaaaaacagacttttggtaattatcccatgatttattaggatttctttgcagcattaaaatgagactgtaagagaaaagcctcatggtgtattagatattagcaaataggtagagttaaatgtccccagtcttgcagtctaataaagtggtctgtagaatcatatttaaggatatctaactttgacatgtcttgcatagctcttattttttatttagaatcaaaagctatttggttgagaagttttgttgtcctaatctaacgtctctgctgttttggcaagagggatatatactataactctggggatatccccaaagtatgtatccctcttgccaaaagagcagagacgttagattagtgtgtgtgtgtatatatgaatctagcagaaatttttctccattgaatcagacttgttattatgccctagactttaagaatcctttaaaggatatgaatatacaacttaaatggcaaatttctcacttctttcatttttaggaaggtactggtcctcgtgttatttctgcttttgtggagattatttttgataattcagacaaccggttaccagtaagtaactttttttttaaagtaatgttgagaatttaattggtttagctgattttcttcatactttgaaactttttaagcttttataatttgttataattacagtttatatactgattttatcttaaaatgacaatgaatactctgttaacaaatgggaatgtacaaactgttgtgaaaagtgtcttggttaagagtattgagtatttgtagtattatttttagtgagataattgaaattttaaaataaatacttatgggcaaggactttaaaatgaccttatttaaaaagttttctcctttactattaaattaactgtgggcttttacattttttcttagatcgataaagaggaagtttcacttcgaagagttattggtgccaaaaaggatcagtatttcttagacaagaagatggtcacgtaagcatttttcttttttttaaaaaaactgaatatgtacttaaatagagatggggtattgctgtgttggccaggttggtctcgaactcttggcctcaaatgatccacctcggcttcctaaagtgctaggattacagacatgagccaccacgcccagccagcatttttctttttctcaatacggagtcttgctctgtcgcccaggctggagtgcagtggcgcagtctcggctcactgcaacctccacctcccgggttcaagctattctgctgcctcagccttctgagtagctgggattgcaggcagtcaccaccacacccggctactttttgtattcttagtagagacggggtttcaccatgttggcaggctggtctcgaactcttgaccttgtgatctgcctgccttggcctcccaaagtgctgggattagaggcatgagccactgcgcccagcccgcaattttatgatttccttacaaaagagtaaaaagtattcttttacctgcttcatatatgaggaatatttgcttcatcttcaacaagtcaacatatagaggataaacataagaatcagaaagttctgaggatgatacagatggtttaattactgatctttcctccctaatgctatcaaccaaggggctactctactcattgcttaatggtgctttaaaattatttatcggaaagtaatttcattgtttgtcaacaggaaaaatgatgtgatgaacctccttgaaagcgctggtttttctcgaagcaatccttattatattgttaaacaaggaaaggtaaaacaattgtatgtcctttttaagtagaatttgttttctgagtaattcttgagtgatgaatttggtttattgatttgagtggttaagctgaagcaaaaatggccatattcttttacatggccataaagtaccaaataggtccattgcatgttgagatggaagtatttcagcatattaagtggatcttgttttcctagtgactggtattacttactgaggtgaaagtatgggaagacattattggcttatgaatgttgcaataattaagaatattgtaggaattctataaaaatcacatttgaaaaactttctaaaattaatattttgtgttacctaattatttatcacaattaaaatactgaaaagctaacattaccagaaatctgccattttgccacatgttattttccctaatagggattatgtttttacattttttcagcagccaaactacaaacttttttagctgattgttctgctctcttctcatatactttcactttttttttggactagggaaaattctcaaagaatattcacttattttatactgtaggcctttttttctagatatgtattggaaagttagcatttagaagaagtgattaggaagaatatggagtttcagttttagaaaatgtgttactggaagaacacgtttttttccgatttaactatttgtgggagataaatttttttaaatggaggctgatttgaaagagcacttttctgagatccgtctgctgtcaatctaggcccttttacttcatttcagtttctgcccgtatgccatccttgattgcctcatctgaaagcattgccgtcccctcaaccctatgtgctttatttccttaatctgttttatttttcttcataacacttacactgttaggatagtacttattttctgtctttttccattagaatgtaagctccatgagggtgggaccttttctgctttgtttgctcttttccagtgcccagcagtggcacatatgttgtagccatttgaaaaataatttttaagtgaggaaattgcatgaaccaatatgtataattggagcgttcaataatgaggatctgaaggatgattctttgatgtagatacttttgatagacctattttcgtagagataatttcaattttttaatgcagtgatatcatttttgacatttagggatacttgttatatattaagttgcatggcacttaagttgtaccattctctctatatttaaagcataccatttttgtcatatcattagccttctgtatctgtaggttccacatctgcaagttcagccaaccatggatcaaaaatatttaaaataaataaaattttaaaacagtacaataagaaataatacaaatttaaaaatacagtaaaactatttacatagcatttacattgtattattataattaatctagatattaaagtatatggaaggatgtgcataggttatatgcaaatactatgccattttatataagggacttgagcatccttggattttggtacctgcagggggtcctagaaccaatccccatggaaactgaggaagaattgacttttaatatattattgtagctttaaaaaaaagtgtagtcagtgatggttttcccttataaaaatactttgttttttgagaatggagctcatcttttataccttatcatattgactaagaaaaagatggtggtgtgagatactccttcacttgttagccctattcataaaggagagttatgaccgtaacagttgtatttggattttatttggtaaatttcatttaagtaaaggagacatagatatgtaggcatgcgtactatacaaatgacattagccaaatcataatctgtttaaaacttggcatgtcccaaattcaaaagtctgaaatacagaatgctctacaatctgaaacctttcgagtgtggacatgacattcaaaggaaatgcttgttggaacattttggatttcaaatttttggatttgggttgctcatctggtaagtataaatgcaaatattccaaaacttgaaaaaatctaaaatctgtaacacttctggtttctaaccattttgcataagggatacccaaccttcatgtgtattaaaaacctttcaacgtggagttcttcttcttaaacggaggctacagctatgtaatgattatttttctaaaaattttagatcaaccagatggcaacagcaccagattctcagagattaaagctattaagagaagtagctggtactagagtgtatgacgaacgaaaggaagaaagcatctccttaatgaaagaaacaggtaaaataaatgtgattctgccttatttttttgttgcaaattactgtttttgtgacagagtggctccatgatgggaatatagtaggtgtttagtatatgacagcattagataatgctgttattaataaaaattgagaatccataacaccaatgatgttagtagcttttaaaaatattgtggaaacgcacactgactttttttttttttttttttgagatggagtcttgctctgtcacccaggctggagtgcagtggcgcgatctctgcttattgcaacctctgcctcccgggttcaagtgattctcctgcctcagcctccctgagtagctgggattacaggtgcccaccaccatactcagttaatttttgtatttttagtagagacagggtttcaccatgttgtccaggctgatctcgaactcctgacttcagatgatccacctgccttggcctctcaaagtgctgggattactcatgagccactgcgcctggccggcacactgactttttaaaaggaagcttaaactgaggcccttactacatgttataaaagaaccagtgtcaccatgtgtaaatttgttctctggtgcttttcataataaaggatcttaacccatttatgcctagcattccattattggaatcctaagcttgtggatgttacttatattctactgctcaaggtcattgccaaggtctgatttttcacagaaaaaaatttgcaacctctggcataaatgggttaattgctattttagtattttaaattgggttaccacatcacatcaaagaaataatgctacagttcttaaaaataatttaattcaaggtatatttaagaagtgatattacataaaaatcttattcaattcttccacctctctccccatttcttttaagagggcaaacgggaaaaaatcaatgagttgttaaaatacattgaagagagattacatactctagaggaagaaaaggaagaactagctcagtatcagaagtgggataaaatgagacgagccctggaatataccatttacaatcaggaacttaacgagactcgtgccaaacttgatgaggtaaaatatttacctgtgacacttaaaatcagattaattttgtttttatgaatttgttaaactcaggccataattacacttttcagtgattttaaatagaaacttaaaaaaaacctctcaatgaatttattagtcagcaagtttttttagttcaaggaaattagccatgtggtccttgctatatagtattatctgaaatataatcagatggtggtattaggcagacaagatgagaggaaagccattttgaaggcttcttgtagttgtagtatatcctaaactacacattttgtacaaaaatttagtgcttcagttttctagtttaaaatcatttttaaaatttttgtagaaaatttgagcagttacttttggtttattttaatagaaaaatttttattagatgttatgaaatatttagtaattacaaaatgagttagatatgataagttgttttttttcttagctttctgctaagcgagagactagtggagaaaaatccagacaattaagagatgctcagcaggatgcaagagataaaatggaggtaagattataaacaaggttcatgttaacttactttttacttttgagacagggtcttgttctgtcatccaggctggagtacagtggtgccatcatggctcattgtagccttgacttcctgggctcaggcaatcctcttgccgcagcttcctgaatagctggagcacaggtgtgtaccaccacacctgtctagtttttaaatatattgtagagacaaggtcttaccatgttgcccaggctggtcacaaactcctgggctcaagtggtccttctgcctcagcctcctgaagttttttttttttttttggaagacagggtctcactccattgcacaggctggagtgcagtggtgagatcacagctcactgcagccttgatctctcaagctcaagtgatcctcccacctcagcctcctatttttgttattttttgaagagatggaatctcagtatgttgcccaggctggttttgaactcctgggttcaaggagtcctcccacctgggcctcccaaagtgctgagtttacaggcatgagcaaccatgtccagccatcgtatgtttttgaccatagtaaacccttttgtaccagaattatggaatgattacacaagggagagttagaggaattgaatattgaaaggacagagtattactaaacattaagtgaaagagaattaatggtgtcacaattctgctattgtacttctaattgccttattttctgtttaatacttttgaataggatatcgaacgccaagttagagaattgaaaacaaaaatttcagctatgaaagaagaaaaagaacagcttagtgctgaaagacaagagcagattaagcagaggactaagttggagcttaaagccaaggatttacaagatgaactagcaggcaatagtgaacaaagggtaagttaaaatgctaaaaatgaaagatgtgaatgttcaggtgagtagcaactgtagaagacagccctttctgtgactggtgtgtgttggaatttttttttaagctttgctacgttagcataatttgtactcaagtaacaacttggtactgtccctttgtttcttacattaaaaaagagtttcatgttacaggtgggttttctcatgaagtttttttcctgagaaaacatttatgctagacctaaattatgcaaaaaatttaaagcagtttgcatttttactttgtttacagaaacgtttattaaaagagaggcagaagctgcttgaaaaaatagaagaaaagcagaaagaactggcagaaacagaacccaaattcaacagtgtgaaagagaaagaagaacgaggaattgctaggtctgagaactttcaccaacactttaactttctacatcatattatgtaaaactaggttgtccgaggagctcaattatatagtagctgctttttacacttaattctttttgtatctttttgaaaaatggctttatgtttctgtgtgcagttgacattattggttgcaattaaacttggttattattctccttttcatcccatttgcttctattttgtgtagattggctcaagctacccaggaaagaacggatctttatgcaaagcagggtcgaggaagccagtttacatcaaaagaagaaagggataagtggattaaaaaggaactcaagtctttagatcaggctattaatgacaagaaaagacagattgctgctatacataaggatttggaagacactgaagcaaataaagagaaaaatctggagcagtataatgtaagaacttctatagctgctttgtaaaaatctttcagaagagataaatgtgtttagttttatctacttcaagttttctttttaaataagtctacatgttgctcttaaaatatatgacagatacttatttagaaaaggcctgcacagtttaatatacatatagttcttttttaaagaatattcatgtcattgagcctttatgtagattaagtatattaaaatgtatgtatgtatttttaatttttttgagatagggtcttgttctgtcacccaatctggagtgcagtggtacaaacacaactcactgcagcctccaccttccaggctcagcgatcctccatccttagcctcctaactgggaccacaggcatgtatcaccaggcccagcaaaatttttatttatttttttgtagagacgaggtcttgccatgtagcctaggctggtctcgaaatcttgggcttaagcaatcctccgaccttggcctcccaaagtggtgggattagaggcatgagccactgtgcccagcttaaaatatgtttttatgaattggtagcatgtgtcttacatacccttaatttaacaagatgtcacaacatatgtctaaaatagcttgttggtaactttttttttttgagatggagtttggctcttgttgcccaggctagagtgcaatggcgcaatttcggctcactgcaacctcagcctcctgagtagctgggattacaggcatgcaccaccaagcccagctaattttgtatttttagtagagatggggtttctccatgttggtcaggctgctctcaaactcccaacctcaggtgatctgcctgcctcagcctcccaaagtgctggggttacaggcgtgagccaccgtgcccagctgatagtaacaattttttttttttttttttaatacgagtctcactgtgtcacccagtctggagtgcagtggcatgatctcagctcactgcaacctccacctcctgagttcaagcaattctctgcctcagcctcccgagtggctgggattacaggtgcctgccaccacgcccggctaatttttttgtatttttagtagaggtggggtttcaccatcttggccaggctggtcttgaactcctgacctcgagatccacccacctcagccttcctaagtgctgggattgcaggcgtgagccaccatgcccggtgtaattttttttttttaaaacttcattttttggtattccagcatcttatgttacatttagttgtcatgtttcttttatctgctttaatctggaccagttcttcagttttttcttgacttttgggacttgacattttaaattatttgttataaagtacatatattaatatttatgtacttattaattgtatattatatataattatttgtccctaatctcttttttttggagatggagtgttgctctgtcgcccaggctggagtgcagtggcgcgatctcggctcactgcaccctccgcttcccgggttcaagcaattctcctgcgtcagcctcccaagtagctgggaccacaggcacatgccaccacgcctggctaattttttgtatttttagtagaatggcgtttcactgtgttagccaggatggtcttgatctcttgaccttgtgacctgcctgcctcggcctcccaaagtgctgggattataggtgtgagccaccatgcctggcccctaatctgttatagtgatttgcccactttaagtttttggtgactcacctttaaatgtatccaaaacctcagtgaagttttaaagaaagagctgtttactttgtactcatattctcactttacataaagaaaaaaatatatagtggggagaaaacacaacagcctctgtaggcataaacaataggtaggtaaaattgcgaggagtgtagcctgctgtttttggaagtccagtcgtgctgtgggttttagttgtgatactttgtggaaggagtggaaaagttgggttaatccaggcagttctttatatggttagtatagtctgaactgatagttaacacctcctttcttgaaataaaatgagttttctcttgagtttatgaaaccaacctcagcagatgccctttttgaaggtgcctccagtgagagaatttattcattttttgtcatgcttgaagttcattattttccagtattccagccacacttttggttatcagaatgaccacttgtaaagatgaagcctttcctttggacagagatgattttatggcgctgattttgttatgtaaatagccttttttttgagacagccccactctgttgccaggctggagtgcaatggtgcgatcttggctcactgcaacttctgcctcctgggttcaagcgattctcctacctcagcctcccatgtagctgagattacaggcgcccgccactgctcccggctaatttttgtattttagtagagacagggtttcaccatgttggtcaggctgttctcgaactcctgacctcaggtgatccgcccacctgagcctcccaaagtgctgggattacaggcgtgagccaccgcgcccggtgtaaataggcttttgcctcttggtataatcctaaattaatttttccacagtgtatttttaaaacctgcagtatgaaaaataaaatgtctttttggtggttttattatgctttattacagttcatttatgtgatacatatcctacatacttatcaaacttaagtttttagacttttctaacttatgtcagtggtatcttggccgtagcaactgctgtggagaaggggaagctcttagatagtttcagtgcaaactaaatgttttctcttttccaggttgtaatgcatttaataaagtctacaaaacattatattttgaatttaatataggtagcttactttattactggttctgagtagcatcatggtgtcagaaagggaaccattagtgttcagatacacctggaaaaaaacaaagtatgtaggacttaagaaatactgtaagctgccaggcgcagtggcttacgcctgtaatcccagcactttgggaggccgaggtggacggatcacgaggtcaggagatcgagaccatccatcctggctaacacggtgaaaccacatctctactaaaaaatataaaaaattagctgggcgtggtggcgggcgcctgtagtgccagctactcggggggctgaggcaggagaatggcgtgaacctgggaggcagagcttgcagtgagccaagattgcaccactgcactccagcctggacgacagagcgagactccgtctcaaagaaaaaaaaaaaaaaaaagaaatattgtaagctgtaatgctagttaataacacaacagtctgaattgtttaggactgtaaaagttgaaacattaatttaggaaaactgactcttcaaggtttatactcttcttttagcatgtgttcagatagcctggggatgaattaagtaattgctgcagaaaagttaaattttacctagggaatttgttaactcttttatggtttcagataccactgagtcccaaattccttatgtgtagaattaaagggtttaattatccaagatgttaaaagtcattctgattatccaagattttttgagacagagtctcgctgtgtcaccaggttggagtgcagtgacacaatctcagctcactgcaacctccccatcctgggttcaagtgattctcctgcctcagcctcccccagtagctgggactacaggcgtgtgccatcacgcctggctaatttttgtattttcagtagagacggggtttcacgatgttgcccaggatggtctccatctcttgacttcatgagctgcccacctcggcctcccaaagtgctgggattacaggtgtgagccaccgcgcccggccaatctaagattttgtgactcagtagtaacattgactttttgtcagtggaattagtagtaacattgacttttgtccattaaaattttggacaaaaagtcagtgttactactgaggatgaataattgtcagtactctgtgggaatatttacaattactttgatatctgacaataattagttataatacaaacagatgaatgtaattactttatgaagcagtttgaagcccttcccctgaaggatgatcttcagctttattttgcttgtcttattgcttcccagtaaggcaaggatttttgtttgctttggtcttttatgattccccagctcttctaagaatgcctggtacatactggggttttggtaacttcactaagtggatgaagtgtcagcttccttaaactctagccagtgaggctattggattttttcagctcagtatagtctactaaattaatgaatacagttcattaattctccttaaggaaacagcatcttacgttaggttcttagagatttgttataggttctgccaagatttttaactcatttttcttgaatgtaaaatagttgaaaatagtttttgtgttctgttgtgtgtgtgtgtagagggggcagtatgaaagtatataatggactattatgagaacttagaattttttttctaaaattctggagtgtatattatagaaataggaagatttagatcactaatgaacaaattaacttttagcaacatgttttatagtatttaatggtttgtgttttctggtgtggtatgctcttttgcctaaagacaacttttaaaaactgaaatggggccgggcgcagtgtctcacgcctgtaatctcagcactttgggaggccgagacgggcggatcatgaggtcaggagatcgagaccatcctggctaacacggtgaaactccgtctctactaaaaatacaaaaaacaaaaaaaacaaactgaaattggatttttcaacagcatcattgaggtataattcacatacagtaaattgtacatatttagtgtacatcatttttcctagtcaggaaagtggcaaaaataaagtatataatttgatgagttttgacatacgtatacatctgtaaaacaccacacagttaagacaccacacaccacagttaagacaataaacacgtttattacccaaaagcgttttccatacccctttgtaattcctccctcaccttttgtccgcctcccccatccatctgcaaccactgatctgctttctatcagtgtagattagtttcatgaaattgaattttaaatttatttttatttccatagaaactggaccaggatcttaatgaagtcaaagctcgagtagaagaactggacagaaaatattacgaagtaaaaaataagaaagatgaactacaaagtgaaagaaagttagtatagactaaaatgtgcattaatgttttcagtaatgttcgttactagctgttatgtggtctttaagttacaagttaaccggtcaggcttgttttctgtattttgattctaaactgtatactgttaatgcatcctcatatgtgtttaaaattaaagacagtctactttttatttattagctacttgtggagagaagagaatgcagaacagcaagcacttgctgctaaaagagaagatcttgaaaagaagcaacaacttcttagagcagcaacaggaaaggtgggcaggttcttttcatcacctctgtttacactgagtcattgagttaatcgttatgtaataattttttacctttcaaggtgtaggtcatgggttccaagtgataaataggagtccaaattatcttctaaatatgaaatgatagagattaaatagttttattactacacatactattaatagcacttttgatgttcagataaagagcccatttttaacactactgttatggaacagagcctatcatataaggtgttacatgtagttggcatattgtgaggaggtgatgtgtttgttggagaggatgtttagtttaatcactggtatatttttaaaatgtatggtgttgtgggctcattccttaccaggagtgccattgatgatattattttaatatttttcatttctgacaacttacaggccattttaaatggaatagacagcataaacaaagtgctagaccacttccgtcgaaaaggaataaaccagcatgttcaaaatggctatcatggtattgtaatgaataactttgaatgtgaaccagctttctacacatgcgtggaagtcactgctggaaacaggttaaagcttttgcttgatatttagcatttttagaagagggaataagaatagcttaaacaacttttgtagtttttgtacaacatatcttccattatctttttatatctcggttccttaactttctaattaaagaagtagatgctaagtatttgttcctaattatagaagctagaactttcctcttttgggagtttctccctccccgccattggaatttttaaagtagtcttattttccaaaattatttggattatataggaaaaaactgtttgatgcttaagtgtttataacattttaaaagtgcacacctttagtcccagctatgcaggaggctgaggtgggaggattgataagtttgggcaacatagggagaccctgagtaccaataaagatttgtcttactctgtttatatttaggttattttatcacattgttgattcagatgaagtcagcacgaagattttaatggagtttaataaaatgaatcttcctggagaggttacttttctgcctcttaacaagttagatgtcagggatacagcctatcctgaaaccaatgtgagtcattgtgtgataaggtgtatttctcttttataatgttattttttatcacataatctaacacatgctagtgcccaggcactatacactgggattcagtggtgtatgagataaaaatatctgtcttcccatggaccttagtgctgagtgggttttggggagggagacagaagtcacagctatgattggtgtggtgatgcacgcctgtaatcccagctacttgggaggctgaagtgggaggatcatttaaaaagaagagaaaaaagctaagatatgaaacaaatcattgcaaatgtgcagtgttaaaagcgtaagtacaggatactttgagagcatatctgggagtgacataattaaggttagggagttggagaaagattcccaaggaactgtcatgtatagtttaaaagtgtcttgacgtacttaggattaaatgaaaaaaatggctagtaaggtgatagacttcggaagcataacattgcttttgttggtaacaaaagtgcactttaggtggattaaaaatattcttcagacaccattcttagaacagtgtaattgctttgaggtacttgacttcagaatgttgatggtagcatcaactgttttaccatcctctgaagttaaagctgaaaccccatgagaatgatcaataatttaagtggaacattaagaatcttgtaagctatcaaagggtctgactttttctgctatcacatctacaaattgtctttgaagtttgggtaagaaaaattgagtctcaaaaacatgatgtatgaatggaacgagacacaaaggagtacatggagcgtggttccatttacgctgagtaaacaaaaccaaacttagggccaggctcggtggctcacacctgtaatcccctcactttgggagggggaggtgggcggatcacctgaggttaggagttcaagaccagcctggccaacaaggcaaaaccctgtctctactaaaaatacaaaaaattagctggacatggtagtaggcacctgtaatcccaggtacttgggaggctgaagcgggaaaatcgcttgaactggggaggcagaggttgcagtgagccaagatcatgccactgtacttcatcctggcaacagagcaagactccatctcaaaaaaaaaaaaaaattttatagaactgggaagtgcaaggaagtgattagcacagtcatggcagtggtcgtttctcgcaggtaaccactgtaggtaactgctttgtgattaggaaaggagcacacccatgacttctggggtgtcagcagtgctctgtttcttgtggttatgttggtgttctattaatttacactgaatacttaactacatttttctatatatgggatatattttcataattttaaaaaccctgttctaacagtttaggagagaggaaatgaaattttatctgacaaaatattttcctatctaatttagatatataaaatatgtaaaattaaaacattttgaggaagtactatttatatttagcccttttatgtgagagatactatcgtaagttttgcatatattaactcatttagtcttcacaactttataaggaaggtatgtattgtctacgattttgtagataaagtaactattatctgaggaagttaagcaacttgtccacagtacacatctgataaatggtgaaacgagtgtttgaatttgggcagtctagcttcagaaccactaaactctttagcactattaggctctactattgaaaaccttgattacaagagcaaaattaccaggatattctagtggaatgagtcttctaactacttcagggaaaacgccaatcgttttgaaatataatggtgtttatggtttatttgtatttcataaagatgtaatttcataattctaagttcttagttaactgtgttgtgatctctctgttgacaaaatttcatttttaggatgctattcctatgatcagcaaactgaggtacaatcccagatttgacaaagctttcaaacatgtgtttggaaagactcttatttgtcgtagcatggaagtttcaacccagctggcccgtgctttcactatggactgtattactttggaaggtttgtaatactaattcttagctttaaacagataaattctaacaaatcatttaaaacatataatctggctgggcgcagtggctcatgcctgtaatcccagcactttgggaggctgaggcgggtggatcacctgaagtcaggagttcaagaccagcctggctaacgaggcgaaaccctgtctccattaaaaatacaaagattagctgggtgtggtggtgtgcacctgtagtcccagctactcaggaggctggggcaggagaattgcttgaacctgggaggcagtggttgcagtgagccgagatcacgccactgcactccagcttgggtgacagagcgagactctgtctcaaaaaacaaagagacatataatctgtataatatgtcagttgagctgtatgcatgtctgattaatatatcttacagtattttggagacattctggttttgagagtattcgaaaaattcatcctttgcctttggccgggcatggtggctcacatctatatataaccccagcactttgggaggctgaggcaggtggataacttgaggagggaattcaagactagcctagccaacatggtgaaaccccatctctactaaaaatacaaaaaattagctgggtgtggtggcgcacacctgtaatcccaacaactcagaaggctgaggcatgagaatggcttaaacctgggaggcagagggtgcagtgagccaagatcacacccctgcactccagcctgggtgatagagcaagatcctgtctcaaaaaaaaagaaaaatttattttcaattattttatagttttttaaatagttggtttgttcaattaagagtccagacagggttcgtacttgatatttagttgatgtctctgaaatgtgatcatatagcaggggttcttaaccttttttgcagtgtggactgctttggctgtttgaagcatatggatccttcacaattttttttttaatttttaaatttattttttttttacttttttccacaacaaaagccacattcaacacaatttttaatgcataaattaaaatactttggatcacaaaggagatgaattgtattcgcatggttattattttaaaaaatattatataattatttaatgtattcaaaaaacaagatagtagtgggtctaatagctaccataagtttgaagtactgatacatgtaaacaatattttgacatctgacaagtgttacctaatatgaaaatagctcttcttttggtagtcacagatactaatactactactgtggttcttgtcgtgttcgttatagaagggaaatgctaaatctcattttgaggttaataaaaataaagatgtaaatttttttcctactcagatcacagatcttctgaattttatctttgaaatccaggttaagaacctccagtatataggtttagtttacctgccctcaattttttttttcctctttatttgttgaagaaagcaggtaaacccatctccccccaagctttgtttctgtatatgtacgttttgttgtggttgtttttgaaccatccaagaataagtaaaacatcatgtcatgtcatctctaaaatttaagcatgcatctcctaacaataagaacattcttttgtatagccacagtatcattgttacacctaagaaatttaacattaacctaatatcctctaaaaagtatccatattcaagttttctcaattatcctaaaatatttttctatttaggattaaatcaagtatgcatatagtgtcttctctttattttttttttttgagatggagtttcgagcccaggctggagtgcagtggcatgatctcagctcactacaacctccgcctcgcaggttcaagcgattctcctgcctcagcctcccaagtagctgggattacagacatgcgccactatgcccggctaattttgtatttagtagagacggggtttctctatgttggtcaggctggtctcgaactcctgacctcaggtgatctgcctgcctcaacctcccaaagtgctgggattacaggcatgaccaccatgcccggtctagattctttaaatataagacagttcctcctgctcccttctccccacccagagaaatccagaaaagttccattttctggatttgtcttattgcttcctcatcattgtttaaatattgttggcatgaatgctacatgaatgatatgtacttatggtgtcatataatgtgtcccattgttagtgatactaggtttgatcacctgcagatctctccgttgtaaaggtatccctttgcccctttgtaatttaataatatgtgagattattcttcaagtcaggttctcccaacaacttcagttgctttagcactttgttgactcttgcctgaatcagttgttacactggggggtttcaaaatggtgattcataaattctgttattgctgctgcatttattagctgtcactcttctgtagaaaagagtctccaattttcattttttaaaaaagtatcactgtgattcatgaattttttttttttaattcaatatgttattacattggtattgttattttgatgctcaaattttcccaaatatggccagtggaaatttcaagctaggtcctgtgtcctactaatatttcctctttagtcttcacttccttcccctctggtagatgttcaggttcaactggaggttcttttttttttttttttttttttaaagactgcaaattttggctgggcacagtggcttgactctgtaatcctagatacttaagaggctaaagcatgaggatcacttgagggcaggagttcgagaaccgcctgggcacatagcaagacctggtctctacaaaaaaggtgtggtggtgcacacctgtagtcctagccactcaggaggctgaagcaggaggatcacttgaatccaggagtttgaggttgcagtgagctatgaccgcaccactgcactccagcctgagcaacaagagcaagaccctgtctcaaaaaaaaaaaaaaaaaaaatctagcattgaaaagcaaaattttttcagggtggtttaaattactttcaattctcattatctacttaaagcctgtaggttagtttttttgttataagtcaatttatcattgaataaaaaagttgtacagacctattacatatgttttgtttataggtgaccaagtcagccatcggggtgctctaactgggggttattatgacacaaggaagtctcgacttgaattgcaaaaagatgttagaaaagcagaagaagaactaggtgaacttgaagcaaagctcaatgaaaacctgcgcagaaatattgaaaatatctttttgttttgtgcatagtgatagatattgtgggggaagaactgtgttttggttgccatatataatcttttgttttttcacatattaaaaatttcttgtgttttaagttcaagagcttatgtttgtttagcttttgaagactaaaagctattttaatgattctttgcttaagtgttaagtagctaataccatgaagtcacttggaagaaaagaacccatagaacacaaaaataaaggttgtatcaggcaaagaaagaggaaactgagaaggatcagtttgtgaattgtacaagtaaaaccttggtagtttttttttttttcccttcttccctgttgaatttatgtaagcaagagatactgttttaaggaagagagtgggggcggcatcagtaatgttacatattgcttagaagtcaaatatataaggactggcattttattgtacttgtacagtggcacaggcctgtagtcccagctacttgggaggctgaggcaggaggatcacttgagcctgggaggtggaggttgcggtgagctgagatcacaccactgcactccagcctgggtgacaaagtgggaccctgtctcaaaaaaaaaaaaaaaggtgacaggggagggtgaaaaatgttagattttactgtcttgaagttatttggtgcagatttaatgttagtggaggaaatggctgtcagataaccaagtcggagtagccatagtttttttttttacataaaaatggtgctgcatgaggagtggttagttcagttcacaaatgaaacaattgtatatgtggattttcttaaaaccaccatggtgctttggtataagaagtactttatgtgtgctttccattttgccacacaagttgaaaaatataggtacttgagcatcaagaatagatataaagttaatgatttttaactgcttcaggtgaaactggaatttttttaaaactgcagatttataacttctgtgccatcagtgcaagcacagaaaaagaaaaataagcacctgagctttgaccttgcaggggtctgcatatcgcactttaaagaactgcctgaatttggcaagatgttaacacaaagagcgtatggggaaatactgaggaaaaggaggatgttgacagtgtataccagctgtcttcctgtgtttgataatccagctagattgaattattccacacatggcaagaactcttcatacataaacccttaacatagtgccttaagcatagtaacagtaaacatttgttgaatgaaaagatatttaaaagtatgtaatattgttagatttcacctaacctcctttatggttttccaagaatttgttttgtataacttttagtaaaacagtatacatgttattctgagagtgaaatggggtgaaatgtttcaagcttctttatgattgaatgcattttgggtaatatagttcagcattgttttggtccataaatttgaggacataaatgttatttgggggtaaagaaaaggaagggatacatggtgttgtgtctaaaaagaattaagaacatacgatatatttacaacctggagataattttccttagccttgtatatggattaataatgaaattgatcagttgatgaaccaaatgcaacagatcgagacccagcaaaggaaatttaaagcatctagagatagcatattatcagaaatgaagatgctaaaagagaagaggcagcagtcagagaaaaccttcatgcctaaggttcgtaagtatatctttggttatagatcgattgttacagattaataatatggaaatatgaatcatacattatatgggttatccttgaattttatgtttcatttttgtttggacccatactttttttttttgaagacagagtctctttctgtctcacccaggctggagtgcagtggtgcgttctcagctcactgcagcctccacctcctgggttcaagcgattttcctgtctcagcctcctgagtagctgggactacagacatacgccaccacatccggctaattttgtgtttttagtagacatggggtttcaccatgttgtccaggcttgtctcaaactcctgacctcagatgatccacctgccttgccctcccgaagtgctgggattacaagtgtgagccactgtgcccaggctagacccatacttttggatatctacatctattttaccattcttaaacccatggatacccaaagtctcctattgttggcacgttcaaactttccaccttcattgaacaaataggcatttgaagctgtgacataagagtactgtctgatggtcagtttttgtcagtaaccatttttatctgaagcacaatggaattagttgaatatttgattccgttttgtccagattgtattaaaattagaaagcaaacttataagtgatagtgtgttattggtctcataaacttgacagttttgacaaatcttttacttagtataatactaaaactacaaagagcttaaaaaaaaaaaaaaagatgtgcctacagttgtaccatcccaaccatattctgacaactttttattttttgagggggatggagtctcgccctatcgcccaggctggagtgcaatggcgtgatctcggcttactgcaacctccacttcctgggttcaagcaattctcctgcctcggcctccagagtagctgggattgcaggcgtgtgcctccacacccagctaatttttgtattttcagtatagacgggtttcaccatgttggccaggctcgtctcgaactcctgacctcgtgatccacccaccttggcctcccaaagtgctggggttacaggcgtgagccactgcgcccggcaactttttgttcttataatatgcctgaagatttttgtatagtttaatcatggaatatgatctgccccaccctgccccacctatactattacatcatatttttcttgttgctagagtcctaattaccaaattaataggcacctaatatttgagttgatatgtctatatatttagctcaatcaaatatagattgttttaaaattttcactataagtaatacagtggctaataccttactaataaatggataatgtcatatagcaacgtagcttacagagtttggaggcaagcttgcatgctatggagtctaccagagagtcattgaaagcagaactgggaactgatttgctttctcaactgagtttggaagatcagaagagagtagatgcactgaatgatgagattcgtcaacttcagcaggtaagtagacagctgactggaaaaagaattcgttagtaattggctattgtgaaaagggcctttcttgctaactagggcaatatgaaagaaaagaactgagaaaatattaaaatgaggcttggacttttaatatacataggagtaaataagattttgtttttctaaaccaatctagctaggttaggattatacaagaaattttcatttccttaaaatttagttaattagcattacttattagttgtaagtattgctatgagtttgagcttgttagccttaccatatttatcttactgcctttacatatttaatgttttgatcaagcattttaattgatttttaaaactgcatagatgtaaactaccaacaccgattctaaaaaatgaaaagcatttaaagaaactgtttttgacagcatgcgttataaaaagggccagccacaaaaatttaacattatgaattgataagagaaaaatgaagaaagtatagggcttttttgaagaatataacatattaaacttcatttcagctcacatgagcacaagtactagagaggacagcaaatgagcaccattcctgtgtgtgaaatgtacatgcttatatagacaactttttcttaat

SEQ ID NO: 62 - DNA, 32742 bp, Homo sapiens
  source 1..32742: mol_type = other DNA
gagccggacggggtaaactgagcggcggcggcggggcgctggggcggagactgcgacccggagccgcccggactgacggagcccactgcggtgcgggcgttggcgcgggcacggaggacccgggcaggcatcgcaagcgaccccgaggtaacacggccccggttccctgctcgcagggcgcggtgccggaggggagcgggcccgggggaggcagggaggcagggaggcccccagagctacgcgggcggggctgcggggaccccggggcagccggggcgcagggcgcagggcgcaaggtgcacggggccgagcgtgcagtttgggaggtggcacagttgggggcggcggggatcagggcagcgtcctgggggttctaggttgggtctccagattgggtccccgacggcgctcgcgggcgctctttccagggagcgcgggctctcgtggggacgcgctcgaggcaggtgagccgaggctggggcgcccgggggtgtccccggatgccggtgcgcgcggctccctgacccgcccttccgcggcctgggggacgggagaatggggggtccacggccgccttgggtcctcaccgcgcaccgcgcccgcagcggagccccggagccatggccctgagcgagctggcgctggtccgctggctgcaggagagccgccgctcgcggaagctcatcctgttcatcgtgttcctggcgctgctgctggacaacatgctgctcactgtcgtgggtacgtgcggacagggcacccctgccccggcaccccagccccagcgccccttccccggcactccacttacccctgcgcggtcccggagctccgccaaggcccgggaaagttggagaactcgctttgcaaaaaagacatcccctccaggctgccgcgccggggctaggaggagccgcgttgtgtggcttcgctttcctgatgctcgggtcaaaaactgtgacatccgataagacccagaacttatgtttccccctgataatttcccgcatcctcttgcctgctttcactgcgatgaaaaagatttctgttccaaaagagaaattcctaaagttcaaaattacgtgttagaataattattgggctactcgaaaaggcaggttagtaatttggtgtagtacctaaaagagcaagtttcgatcccttactccaaaaacaagacatttagatatactgtattagtgaatgacttgagatggaaatatttcaggaaccattgcaagaacaatttgaacaatcttggttctattatttttcctatagtggaattttgaaaaattaaataatcgaaatccaggtcccttaattaggcccattaacagagaagtatttggcatgcatttccttaaaaaaaaaaatcccagtttttaatgaatgaaaaaaaaatcacgactcatttagactgtaagtggtgggagctgtttcctttctctccatttgcaggttttctcacagcagttttcagagcatctgataggtttcatctcgaggagttatcagagccgtggagctcatccctgttcagtaccaacggcattagttctgcttcggctcgaatgctccattggacacatgtgctcacagcttcgattatatgtttcacaatttaatttgtattttttgttgttgctttttattttggtttttgtttgtttttttgaaatggagtctcactctgttgcccaggctggagggcagtggcacagtcttggctcactgcaacctccacctcccgggttcaagtgattctcctgcattagcctcccgagtagctgggttaccggcatgccccaccaaagctggctaatttttgtatttttattagagacaggattttgccatgttggccaggctggtcttgaactcctgacctcaggtgatctacccgcctcgacctcccaaaatgctgggattacaggcctgagccaccgtgcctggcctgtttcagttttgctttttccttgtgaaagccttaggaattcttaaatcttacaagttgtaggaaaaattacagattcccactcataatagaaggatgaagtgggcctgttgcagaatttccaagttattacttcctgcaggttaatttttttctaagacacataatgaagtgtagttttctgtttccttgattcattcatttgaaagtcttttgagcctctctttcttagaagcactggttgactccaggtcagcactctcttaacgtcaggccacattttgcttttctgaaatattccttgaaggaacaatgtggaagaaacccacaaatgacagaatctctgggaccagtcagttcagcacagcagctgccttttgagaggagacagttctcagggccgttgggggcatggttctttctagtgagctaagtaaagtgaacttgctccaatgtcgttatagacatatggcacagggctcctgttttggggtagacctgtcaccctctggacctcttctggcatttgacacaaccatagttttgttgttgttattgttgttttgtttgtttgagacagagtctcactctgtcacccaggctggagtgcagtggtgcaatctttgctcactgcaacttccacctcccaggttcaagcgatcctcctttctcagcctccaaaggagctgggattacaggtgggtgccaccacgcccagctaatttttgtatttttagtagagagagggtttctccatgttggccagcctggtctcgaactcctgacctcaggtgatccacctgcctcagcttcccaaagtcctggaattacaggtgtgagccactgctccctgccgacacaaccatagttttttgctggcttttttcctggagagggtttcagtgtgatcaccaccttgccattctgctcttatccccagtccccatcatcccaagttatctgtacagcattaagcatgagaagaatgctacagaaatccagacggccaggccagtgcacactgcctccatctcagacagcttccagagcatcttctcctattatgataactcgactatggtcaccgggaatgctaccagagacctgacacttcatcagaccgccacacagcacatggtgaccaacgcgtccgctgttccttccgactgtcccagtgaagacaaagacctcctgaatgaaaacgtgcaagttggtctgttgtttgcctcgaaagccaccgtccagctcatcaccaaccctttcataggactactgaccaacaggtagggcagactactttagtcaaagagtttgatatttgtatcagtcctagcttatgtccttcctggaattctgcttcttactcattggtgagagtctggaaaatccatggtgggtgagctggggaaaacccagtccccttcccctatgtctctgttcccagataaccacaatttcctattctattctcccttctgttgctcaacaagtaagaaaatattaaagaagacagaataaagaggacctcttccaccaagtgggaggactttggcctgtctaaatgccaggtttcgtaagtgcatttgtcagaatcgcccttggcagcaggaactctacagccaccatggctgtcatcctattttatgagccatgtggcctcctcttatctcctacctcaggccatgcacttctctgtagagagccaaggtgtcttcttttggaactggcatgttaaagcctctcacagataccaggtagggagtgtgggaaaaggttggacgcactggtgcgcagatggagctccgagttgatgccgaggtcatgggctgtgttcttcccttctgctggctacgtagccacgtccacgtgcatgaaaggaagagaactgaggctgttgtctggataatccaagctgcccaaactagcttcagatgaatcaggctgttctagatttttttgaacccacattgtttggaataactgtttacttctccattgttggtgaagtgtttgttcttctgtagctgaggtggaccagttctgcctggtccgtgggggctcaaagctcaggacaagggccttgcagctgagaggaggaggcaggcccccaaggtgtcagtgcaaggagtgggagctggtacagttaagtgttggtggtgggctgccaagtgcgcagtgtagctacctaggtgaaagttacaaaacaccagaaatggtggggaggggtgtgcccagagtcctacctgcagaccaggcccagaagcaggaacaaagactagactagagatggaagagatggtggcgaggagagggtggaactaaggaggcaggggaaaccagggctgggctaggctgtaagaggccccaagtgctgggctgagaaaggagtgggattctgtgtggggcagttgggagccattagaaattccaaagccaaaaagaaatgagtgaatcaagcactattttaagcagggtaggtgggcagggagcagggagaacttcacatttcctctgcctttggcgtggggagtggggcgcaggactggctgcataatttgtgggtctcggtgcaaaatgaaaatgtgtgccccacattcaaacattatgaaacacttcaaggtggcagcagagcattaaatcaaccaagctctgagagcagagccctgtgcgactctagggttaggggcaccgagaggtgaggaagcctggggtggtggctggggctcaaggaggggatggcagatctggccttccgccagcacaagctgccttggacacatggagcttgagtcggacaggagcacattctcaacatctgcagttgaattttctggatggaagggtgccattgaattgatttcaacaatctcaagccatgtccagccctctagtctgtgcagagcaatattctaaggctgctacataaaacatgctaagcaaattaacccagcgaagggctgactgtgagcccattaagaaggtgacattcagtgactcctctgttctcaggagaaaaaccaaaccgacctcagtagttgcaggattgttttctttccttttttcaagactaagaatgcttcttaaaatgcatctggtataattacagaaaatagctcagggttttgtattctgagaaagcaaacagctcaaatattgtatgtgaaaattgaggacattatcgtaataataccttgccaatcacttgggtggaacgttactagccgtacagtgtaatacttagaaattcggctgaaatgatgtgagtactccaatcttccaaacgcaaatggcaaatgaaaagcttttttaaaaatcccattcttatttttaatgctttgcttatgccatggggaagaggcttgtttaaaaccagtgagctctttcccctgttaaatactccaacggctttgaggctgtagccacaccaggctcatgtttgggacttcaaaaacattatcttccattttgtgacttgtgaaatttagtctattctcatggtgagtaatccactttagaaattatctagagcaaaattgtaatccccaactgttttgtccagctaccgagcaaatttgaaaatgattttctagtgctgcctggtaatatggaaggacaaacaaatttttttttctttttttttgagatagagtcttgctctgtcacccaggctggagtgcagcagtgtgatcttggctcactgcaacctccacctcctgggttcaagcaattcacatgtctcagtctcctcagtagctgggattacaggcgtgcaccactatgcctggctattttttgtattttttggtagagacgaggtttcaccatgttggccaagctggtgtcgaactcctgacctcaggtgatctgcccacctcggcctcccaaagtgctgggattacaggcgtgagccaccgccctcagcgagcaaataaattttcatattgtgatcctgatttgtaatttgtctcataatttccaagcccagtagatatgaatttggggactgggcagctcttctggacactccaagattctgcttcccaccgcagttcagatggattcagagaagggacaaatgtgcattccatttgcctttaattgtcttcaaggagttaacttgtgagccattgcaaacagtcttttgatgtaaactgtgccaatcacatcctccatgagcaagatgtatgactcaagtcttcagtgttgtaaacaaatgtgtttaaaggctttttaaaattggttaatatgtttctgattaaagagtagttaaaaatatggagcatcagagcttgcagagacttttcctgaaagcttttgggccagtcctagcattttataggcaaaggagtttgcagttcaggaggagaaagcatttaccacaacagtggcaggactgtagccacatgttccgactgtcccatttcaagctttgttcttccccgcttcctgttcttcccacctgcttacaattatacagcttgtacctttagctactagaaataaagaatgcagctcaaaatctgtctttcttgcactgacttgggctcttcctggttgtaccaggcagaactgctggagacccagtgagttgctgattttgctacttttaatcaatgagcagagagtttagaaaagatcagcctgattcctgtggacatggaacctccctggtccctgaaatattcagtctttttccagtccctgatgtgaactggtccagcctcgtgcatccctaaagatgtgtggggaaagcttcctgtagtcaggctgggcagagctattcttttccaaagctgcttgttttaactgaagtgggacccactctgaatcgagacattctacaccacaccacaccataactggaatcctctattcacagtcgtgatggtgccatgtgtgtggcttttgtgggtaggagtcacaaaatgtaggccgcctgtttatttatttatttatttagacagggtcttgctctattgcccaggctggagtgcagtggggctatctcggctcactgcaacctctacctcccaggttcaagcaattctcctgcctcagcctcctgagtagctgagactacatgccaccatgcctggctaattttttttgtattttagtagagatggggtttcagcatttggccaggctgatctcgaactcctgacctcaagtgatcctcctgcctcagcctctcaaagtgctgggattacaggcgtgagccaccatgcccggccctgtctgttttttttaaatattcgataagttctcacaccaaaccctgaaaatatagagtaacaattcttgggttcatttaactgctaataggatgcacattcttcctgtttcatttgttattcagatcctgtatttctgctgaaaatatatgaccagttaggtggcaaaaacctttgatttgggtgtgtgtagtgatgacctggccaatagcacactttccaagaaagcctgaggttgctggattgacctgatttccatgttggaacctcttgcctcctattttataattttggctgaactattcatttcatgattgcagttgtgtgcaggtggtaccagaaattatactagtgatacttggtcatcatttggtctaagaagcaaattttagatatatatgtccataagaggaaagttccaggcacatgaacaatgggacaacacgtttacatttctctcttccctcagtcaggtaacgatatggcattgtggtcttgcttagcataaggttgaaataatagttgcatcttcagaaccaaaagatattccacaccaaacgactggcttgggaaagagttaacttcattgctggggaccgtttcccttgcttccttcttagcttgtcattgtctcagtgatctgctttttatcaagccagcgtcaatggcttaatttatttccatagttacttagtatatttgaaagcagttctttttgcttgcaaatcttagctaacatctgaacgacaaggaggaagccacagggcatgaaatctctacgaaatctaccatggttttattttatttttttgctagcttcagccagtgggtctgaagtgggctgtgtaggaacaagcagtgaccttttcagcttctctatggacagggaaaccggctgttctgagaagagatctcccatcctgcatgtggttaggatggtagggagggcttgatgagtctttgcttctgaaatcagaggaaactggctgtggaattagaacattcctaggagaagcaaaagctctgttaagctatgtgtcagagaacagggctcacgcccaggaaagtgagaagtccgtgccccctggaattctctggtagctgaaaaagacaagcagaacctaagaattttgacaagcggaatcgaagaattttatttactaaatgattgacaaacctcctactatatccaggcaaattgaaaatatcattccatttactgacattcatttactgcacaccttttaggagtgtgtagggatcactggaagggagctgttgtctctcgttgcatctggtgatagtttgcacccttcggggctctgtagtctgtatgcttcttgtaatttaccacggtagaggaaactgtggttttagcaatcatgagaagagagcttccattagtctctatggcaaggataagctaattattaacactagagaagtattgtcttcattgaccatttagggacagatggggtttctccaatgactaagtatatataattaacataacttttattgttttacatgtttttctagggattcattatgtgatttttagtcttactcaaattggattaactgcttcgtgatgctctgtagaggatgaccgtgggccagtatgacatttggctaaaggtttgctgaatcagatctggctctgcttagcaatactttaattgagaaggccctgaattgagacaaggggggcaactcagacacagattgtgactaatgtcagttgagtttctgtctgtttaggagatactgtggggaagcagaaagggtttggtccttctgcccaccactcaatgactagggacgctggacgactctccttctatggtgggtgcccgaggggccagaagagtttgagaacggagacccaggagcttcccagggagtcttctttgccttgaagccgagctctggggaaaaatgatgcccagcgcttaccactgagcagcccatgcagtggcttggcctgtgttgaaagtgcaggcacaggtgtgtccggtactgaggaggcggcaacatgagcctggttgtatctgaagccattggcttgctctgcagccatgggtgagccactctgtctctgaacctcagctttctcatctaaggtgagggtttggactggctagcccttgagtttccttctagctgtgatattcgtttattccatacgtgcattgttaaaatcccaaagaaaattaaaaagaaaaacagtagctgcagtgtttctaaagaaaacacagtacctcaaatggtaaaaagaaccctctgtaggcacaaacgctgtggttttcagtgaaactgtgcactctccatcccatgtgctccagcgtccccacccaggtgcacatcagcagggcctagcacatgttaacacactcagggtatgcccgtagccttgaatttggggcaagtaattcacctccccgagcctcagtgttgatcctctgaaaaatggataaaaccagctaccctcccttggaatctcaggccacccagcatgctggttccctgcctacagtcgtgggaatgtctgagtcttcaggtagggagggacctcagtggcttccagcccaccacagctgtgccctgatgggttacctggaatactggctggactgaacagtgggcacagtatggctggtggtttgggggccacagacaagggttgccacattttattgagttttgtcctgaaaccacccagtgtttctgcctacagtctgggaaagggccacagatgtcttatttgccttcagggatgtccctgcagcctgaagggttccatattagagccttataaatagccaaaatgaagaactggtgaaacaagagtgaagcccctaattccaatagctttgatacgtattggtacttcaacaactagattttccaaatatatattgaacagagggagaagcctgtgtttattccaggacagcccggaagattgtcatatgcccgttctttcatgggacaaactgtagttgctgaaaataaattgcctgtgagttctcctctctgagcctcctggacgtttcctgattcagtatcctgcagtgccgtgtgagcccccggtgttgggtttcttttgtccacatgaataaggggtacagagaatcagctctgggtgggctgagacagaagaagctgtcacccgatggccatctgaactgcaggtcagaatcctggcatcttctctggtttacccaatttgcttggggccccactttgtgaattacaagctcatctctgttcacagcaggggaatctttgcatggtttgtgggaggggactgactgtctgggaatctgtcatgcttgtgagttactctctgtatttttggtatttggtttctggatacaggtgaagcagttaaaaaatatttgaatatggtcaagagaacttttggaaagattctatttaaagctatatatgccgtttgggtactggcggaggtggtaaaatttacaaggaaaagccatgtgggaatggcccaggcgaaattagtctgatgacatctgataagtaatgacagatatcatgcctcagtttcctcatctgtaacatagggaggtgaaatagggcccttattaaatcatgactaaatctggtgggtgtaaatgcttggagaactgagtgtaaactttaaatgaaggcgctatgattattttttatttatttatttacttttgagacagaatctcgctctgtcacccaggctggagtgcagtggcatgatctcagcgcactacatcctctgccttctaggtttaagcaattctcgtgcctcagcctcccaagtagttgggattacaggtgtgcactactatgcctgactcattttttgtatttttttttttttttttttttttttttttagtacagacagggttttgccatgttgcccaggctggtcttgaactcctgagctcaggtgatccgcccacctcggcctcccaaagtgccaggattacaggcatgagccatcatgctcagccgattacaattttttattaaagcctggaatggaagaacccttccaggctgttgccagagctcaggatgcttggcccttctgccttcctggattcatttcattcctctccaggttcctgagggtccagagctagagacagaagagacttagagatgtttcaggctcttctgggttggagcaaaccttcaattgggcaagagctcagccactgttggcttcctctcaaggcagaggggctgggaagctgcctgtaccctcatgccccacccacagagcagggacccagctgtctacttaatccagcagaaacagaggacaaagaagaaagagaatgagggaggagatgacatttcttaggcaccttctatgctctaggcactggtgttaacagtttaacatccatatctctttctgtactccagtcctgggaggtgggcggtggtctctccgagggactgagaggagacctccctagattaagtggcagggtcatgtgtccagccagacatggcataggggaatgccagggtctttccaccagccctgttgacctggcgccagagtcctaggtgagcagtggtctcacggagcaatttggattttgaaattttgcacagaaaatgagactttgtctttctgggttggcctcatggggtcaacaggaaggcagatcttaacatcttgcttcctaatgcctcttagacatactgcagtctgccagtggaatcacttgatggccttttacccgaatcatttgattgcagtggctcctttgggagagctttagcaaagactataattaaaggaatcattttttaaaaatgacagaaataggggccgtgtattttggatgtgttctgggttacttgccaatattgtgttaacatttattccaaacaaatttctgttcacagtggcagtccataaatgtattcacgttccaagacagtcaaacacaaaaaggtcacataggaagcactgagtatatgaattttcagaaaagtccaccaaacacttatctgtctgatcccaaagggtagccaggcgaaaatcaatataaagccttaaaaaaatagcctgcagtcaccagatttgtctgatgtttgtgttttgcagaattggctatccaattcccatatttgcgggattctgcatcatgtttgtctcaacaattagtaagtgtgtggtgttttccttctgagtgtgggtctcatcagggtgggcattgatgcccatgagccgggaattaacaatacaacctaaggacggcgggggggcggggggggtcgtggttggctcatgcctgtaatccgagcactttgggaggctgaggtgggcggatcatctgaggtcaggagtccgagaccaacctggccaacatggcaaaaccccgtctctactaaaaatacaaaaggtagccaggtgtggtggcatgcacctatagtcccagctactggggaggctgaggcaggagaatcacttgaacctggaagacggaggttgcagtaagccgagattgcaccactgcactgcagcctgggcgacagagcaagactccatctcaaaaaaaagtatatggcctgggaggtttgtgtattggcaacaattgcagaaaggaattgatagctttttacggaacaaaagcacagggtggctaacatgcaaatgctccactgggttaaggggggcttctgaaacgttcctgtttgggacggttgtgtcccagcagcactgatgtgcggtcttggaccccctctctcggcagtgtttgccttctccagcagctatgccttcctgctgattgccaggtcgctgcagggcatcggctcgtcctgctcctctgtggctggtaggtgtggaatgcctgagtgagttcgtgaggggccccttgcagagtgagctggactcattcagggaattcaggtattggtggtggttggggtgctggggattcttggagaaggcacccactttcctcttgggttctgcttggtcttacattttagtgaatctgacaggtttgggaagatcacaaggctggctggagagggaaggcgagtcacgcattattcttttgctgttccccggagctggcctgttgactatttctttccctgtgtagggatgggcatgcttgccagtgtctacacagatgatgaagagagaggcaacgtcatgggaatcgccttgggaggcctggccatgggggtcttaggtgggtaaggcccccgtgtaggcaaactggcaagaggggcctgcctggtgctggacagcggcagtcctcgcccagtgaccctggcgcagtttgcactgacacagaggtcccctttttatttttttcctttcctgctttcatggagactttgaaaaatggtaggaagagccctgagctgggggtggaggggatcaggacttcccctgcctctgccccaaacctccctgggcccagatggaaaaccaaaggttgaacaggatggtctgccagaccctttcctcgggaacattcagtgagttgtgatcacggagaaccttgctttctgggtctgcctcccccagctgccctggctgacttcccagaccaggggacaaacatcttccctgagagggattcaaaaccttttccttcctcttccgatttcccgcctgcttccaggagcctgcagccttgcctgcgctggtgtacaaggagcgaagtctctgtttacacattttcctgtgcagtggaagcagcccagccctgggcctggatcttgtttctctcgggcctttgctttcagggtgacctttatagactcctgcccatttcttaggaaaaggcacttggaggaagttgccaagacaactgaactctaaccgaacagaacaatagggcagccaccccaaagccttattggaacaaagtagagagagaaacacaagagtcaaatagatggttctagtacagggagagggcatgtgtcccaggggtggtgtccccactttctctccctgcagtgggcccccccttcgggagtgtgctctatgagtttgtggggaagacggctccgttcctggtgctggccgccctggtactcttggatggaggtgagtgagtccacgtgggcgccatgccatgaccttggcatcgtgctggcacgcgcttgggccacacctgctttctgaagaggggcttgtcttttttatttttattttttagctattcagctctttgtgctccagccgtcccgggtgcagccagaggtaagcggctgggaatgagggccctgggggagggggcatggtgctgcttctgacccgtgtttttttcttgacagagtcagaaggggacacccctaaccacgctgctgaaggacccgtacatcctcattgctgcaggtggggctctgtgggtcttctgagtcaggggaatgcgaggtgatggccgcgtgctggaggcaggggtggatggccagggctgattttcgttttgctgctagaaatgttgggctatataaaaaaacagaaaaggcaaagaggctacaagtcaaaggaaatggttttcttccgccattgctttctgacactcagccaaggccctttttgtctcatttggggaaaatcaaaatggcgtatgctgggctctgcagagctgcctgggtcctggggatgcccggctgggtttgtttggagctaagcttgcccactgtgtttgtatggaaggccatcattgtttggccttgaactttccggaaggagtccttggcctcaaggcaagggtccccggtgggcagtctgactcaccttggcatatatgaatagaaactgacagcagagccccacagggaccagaggggctcccttcttgcagagagcatccctgccgagcagcagggaggccgttcaaacaccctttggctaaaggacatgctttggcctagaggggctaaaagaaagcactggggttttgtgactcttgggaaggataatggtctgcatctatccaagggactgttccccaagactgtcccagtggtaggaggctgcctgctttgccaggccccgggctgcctaaccagggaccagccttgtgtaggtgttgctgggcctcagtaccaaggtaagcagacccttggggtcaggccaggagaaggtctggctgcgcgctgatgtgttggtctctggggcagcctgcactgtagcactagacccagttagggttagacttgtctaagcacggctccctaacacaggtaggctggagggcgcctgggagaactgggcaccagtagttaagttcagcctttgtcaaccctcaggctggttttgtttaacccttctgctgctggatttgattagggcagcaggtatgtaaccctggccaagaccctgtctatcatgcttgctggccaaagggatatggaggtggcatggtgacttattcatgcagtgacgtctgcaagatgcagggggcatcccagagctcagatgcttctggaaccctggcatctgaggtggggacgaggaggtatggtgagggacgggggctccagaaatgtgacttcctgaacctcgggcacgtctgagcagggctgtgcagcctgggcctgtcctgtcttgggcttccctggaacctcactgcctagtacctgctcacaggagacacaaagatgctacccagcactcctggactgtcatcgacacttccagacagcccgactggggaagggagttgagagccaagtggctgtccacttgaggggagtcctgccattgatatgctctgcctttaagtgtcatgtcgaatgaacagacctttcttcaccatatgtgcaccttcatcacgattgcacaatattctttgaatttgttgtagcaaattagaggttccaagaggcacaacacgggaagttcccagaacgatggagaacagttccgtgggtctttttccagatagttctatatttacaaagggttctggttaagagatcatgaatatttgcataggtgcccttatgtaccgctgaaccccgccccctccacctaacggcatgcctgtactgaatgcacctgatcctgcttggattttctggcatttctaggtatcattagaaatgcccacgtatattgcacagtaaaacacagatgcgagagcctcaggctgccccgagactgtgtgtggtctggaagtggcctgattgctgggtggccccaagcaagctactgcattaataaactgggcttcctttcttcattgataaaaccataattgggtaggttaaaccaaaggaactctagggctgcctccagtccaaactttgtctctgggattctagttgtttaaaatgaggacgacgacgaccatgatgatgatgattatgataaacagcctttgctgtccccttgatatgcgatttatcctttacttaatgaaagtagaagttgcggttatctgagctgtaggcgcatggagtctaactgtgcctggaaatgagagaggaggcagaagccactacaaagccctttcctcccttacaggctccatctgctttgcaaacatgggcatcgccatgctggagccagccctgcccatctggatgatggagaccatgtgttcccgaaagtggcagctgggtaaggactggggtgggctcttctgattcaagagcatttgtccccagggcagcctttgtccccagggcatccctgctgagttgcccttatggggatgataaagtgattgcttctgtttgactcttaatggggtcattgcttagggcagccttggggtctgtttgttctctggtttatccatcatccctgaggggtgcagaactcacacagacacatcagatctgggcagaaatgagagtaaaaatacagtcagcatcttcccctgtttctgaactggactaactggacagccataaaatttatgtgaaagagactaataacaaactaattgttaaaaggattaattcttaaaaagtatttttaattttgaaaagtaatacatgcttattataacaaaatcaaagtgtgctgattgaggacgtaaaacatttttaaatttcatgctcatctttctccctcccccagcccatctcctgtgatattcattgttaacagttctatgtctttttctagatggttctgtgtttaccaccctattgcatgaaatgcctaaaaatccagtcaagtgaattttgccatttacatcactgtgtgacctcttgtttttccttcatgcaattttgtggccatgtttccgtgtcagaacaagtagatttactttttaaaactaattaaattttatttttttttatcaaagttacacatgtacataattgtaagtcaaagataaaagaattataaggaaaaacagctgtctttttcccacgcctcttgatccccaaagcccttcagattccatcaccttcaacgtttttagatctttcttctgctgatacccttatgtctctaaataatatgtgtacacccccgactcttttttttttttttttttgagacaaagtctcactctgtcacccaggctggagtgcggtggcacgatctccactcactgcaacctctgcctcccgggttcaagcgattctcctgcctcagcctcccgagtagctgggattacaggcacgtgccaccacacctggctaatgacaccccctttttaaaaattttccaatttctgacattgtccaccagcttcctaatacagtagatggggattatttaatgccgttgcagcgccacatagaagtatcaaacaaccagctcacacattttcccatcttctgtcctccctgaataattgcattacagcttcttgttagactggcattcagcactgacattattgtgactgggtaattattgttcacagctgactgagctatgtagggtactgtgattaatttcctttctttttgcaaatttaattttcctggagttagtcgttgccttgtcctttcattttcttaatgttttatgtagtgtttatgaatatatccaccaaagtttctggcaaagatgaaaaattctccaattgcagtcaagtgttggcaaacctgatctttctgtgtatttgctcgtttgtggatgtctgtcctaggtcttcagtctagacttccttccccatcaccccagcatcttctgtgcctctcttctgtttcctgtattccttgcccttgactgacttcctccttattgcagagcatagcctcccacagcatagcctcccacagcttcctgagagtgtgcgtggcaggtaaaggtctctgagaccctgcatagttgcaaatattttacccttatcctacactttgttgactttgtctgcatgtataattcttggttggaaatcatttcccttgggagttttcgggccactgttctgttgtcttctagcatccagggttgctgtgggggaggccagtgttgccctcattcctgagcctctgtaggagcccgagggacctttacttcttctctaggttataaaagtccatgttgatgatttgcagtgggctctgttttcctcctctgggctgaacacttgcttaatcagccctttcacttggggaaccccatgttacaattctggggagactctttgtattattacttgaatgaatccccctattttctctcctgttttactccagttggctgagcgttaggctccctacttttattcttctaatttcttgtctttccccttttccattgagttattcctgttcatcttttaaactgcttattgagtttttaaaattgatgctatcatatcttaaatctgaagagccttttgtgtataccctgagtgtttggggttttggtgaggttgttgttattgcaaaaacaccctcccaccatgttcctgtttcagcctcttgtgttgccccggttgccattctggttaatttctgtggagaaactgtctcctgccagggtgaaggctggagtgctaggggccccactgctcttaacacagcctctctgcctgctttcatgttgacagcctctgctttcagccccaccttcacagtacccgaagcttcagttcctttctggctgtgaggcacaatggctcttgcctcttgctggcctcaccatttgcaggtggaagattccagcattctctgcggtgtcctctgctcacttcttcctcgtattgtcccttctcctctcccactctgtttgtcctcaggaaggtatgggggcggaagggggcataggctgtgtgtctagaattttcttctattcctttgctagcatttaaatggactttgaggtgggagtggagaaaaactatagattcagtctgccctgtttaactggaaaccttttattctttttaatggttgcatattgttttattgttaaaataaaacaacatataactgttgaaatcctcagtcagtccctattattgggcatttgggctcattttgttgccagaaaagggatctcaatccagaccccaagataaagattttggaaatcactcaggaaggaattcatggcatgtcacagaacacagtagaagaggcaagtttattagaaacaactctgttagagcagggcgtcctcagaaagcacatctggactttctgctgttgtaggagagtgtccttgtacgtatctttaggctgtttccttaactctaaacatctcatgactatgggtcgtgactggcaaggaatgtgctttgctagttttaaggtggagctgagcttaaaatggtgtaacttctgcttccttaacagttccagtttttgccattagaaaccatatggcaggctgggccggtggcttatgcctgtaatcccagcactttgggaggccgaggcaggtggatttcttgagaccaggagtttgagaccaggagttcaagaccagcgagatcctgtctctacaaaaacaaaacaaaacaaaacaaaacaaaaaacccaaaaacagcaacaaaaaaattagccaggagtagtagcgcacacctgaagtcccagctactcgggagattgaggtgggagtattacctgagcccaggagacagagttttgctcttgttgcccaggctggagtgcaatggcgcgatcttggctgaccgcaatctctgcctcctgggttcaagcaattctccctttttctttaagaatttattgacagtccttcctagagatttatattctttttatagttctttcaaggtacgtgtggatagcttcagatggagactctcagctctgaatcaagcagacattttcaatgtccccaacccttcttcaggtgaccttattctctcacaggcatccagccctggggaatgggggtgtcttgccagaagctgccccctggcttagactttccctgttctgcctgcctccctgcagttgggctggcctgagtaccagtgtctttggaatctgcagagttgctatgctctctcatcgaacaatacctaaaaagtcccaaatggccgggggagagggggtaaggatggagagaaactgctaatggggtgtgaggtttctttgtgggatggtgacaatgttctgtaatcagatggtgatgatggttgctcaactctgtgaatacactaaacatcactgagcgatgcactgtcaaagggtgaattttgtttttttttgagacggagtctcagtctgttgcccaggctggagtgcagtggcacgatctcagctcactgcaacctctgccactcgggttcaagcaattctcctgcctcagcctcctgagtagctgggattacaggtgcctaccactgtacccggctaattttgtatttttagtagagacagggtttcactatcttggccaggctagtcttgaactcctgacttcgtgatccccctgcctcagcctcccgaagtgctgggattacaggcgtgagccaccgcatcctgcccaaagggtgaattttaaaccacgtgaattgtgtcataaaacaaaacccaaaccaagcctgacatcagaagaggtattcagtgaaggaggaaggattcttggaattaaacaagaatgtttcttaggcagaaaatttagctctgaactccctagcagccaagatgaaagtggaagcccaaagaccttcagagctcctaaagaggcgtgccgcttggcaggaggggtggacttggatctgacaccgagtcagcaaacagcagatgagaagacaccctccagccttgttgctcatacccgctgctgacactggagaggctgtttcccagcttttcttccctctggcccttgaggtgatgtggatctctcggtgttttcaggaggcgcccgctgtccaagtggggtgtgcactgctgagtccagctgctgtgttgactttgcatgcaactcttgagctgagaagctcttatttgtttatttatttttagagacagggtctcgtcctgttgcccaggctggagtgctctggtgtaatcatggctcactgtagcctcaacctcctgggctcaagctgtcctcctgcctcagcctctcaaagtattgggattacaggcgtgaactgggtctcccggccacctagctgaactctcatcctctttgaatgtgtcctggccatgtgcaggacacttaagatgttttgtgctcatcctcttcagacaaagcctgaggctttctttataaaatctttaaagtcagccagaagccatgggccatcaggggcagatagcagagtgcaggctgcctggatctcatcagattgctgtgtggggcctatcaccggcgccagacgttcactcaacccgcttgctgcacatttccaccaccgaggttcctcctttcatttgccccagagatagacatgtctgtctttaagagaatcaggtttctctacctgcctcctgtgtcagcaccagcaggaggggaaataccccaccttccctagttctctgtagctttcagcccatggctccctgaccctggggatggggtactgtgagtgaagcagtgcggaggacccagtgctgagggcggggagctgcccctgcagcccagactctggtgttcaggaatcttctctgagctcgctccagtccagggtgaaagggaggctgttctgcctttatgcttcccttcactgtttctggagaaagactatgatatttgaagtcagggcaaacaatcttattagctgcatgggtgacacaggattgctcttgctgaaggcattgtttttggccacattttttaggggtagtaaagatggcagcctacccatcttccacgtcgctcccttgccagcctgccccccaaattcctcatctgccacttgaggggaagccctgggcttgagtgggtggagaaagaatgatttcatggtgttttctctatatctgagttctaggtcagatggcctctccagaccccttgagacttagggacttacagtttggggtgaggcctacaagcccccaaagggaaactgaagccctggacaacaggccccagacaaggatggaggcacactcttgtcttctggttcttctagcccctttgtatttaatgagctgtggggatgcaaagtgggatggagggtaggacacgggcctgtaccagaagacaagagggactgccagccttctgtggctctggggtgcgaggacttaggatcctcctaagcctgccataggacagggcagaccattgcccctattctggttctaggccgagcccttggccttcagggaggggtcatcttgagcttggaggaaacccaaggtctcatttccacctttgcttccggggctggatggccagctcatctccccgcaggcttcgtgatgaccggagcccctctctcactggctggccaaggccgtggctgaagccagattgtaccaaaatgtagaagatctccctttggtgaactttctggtgtgagcagagatatgtgaagagtgttgccccgcagaagggagggttcctgccatggcccagggcactgttgcaggccagtcccagccaacacttttctcagagtcgggagaagccctagaaagaattcttgctgaggctgggtgcgtggctcatgcctgtaatcctagcactttgggaggctgaggcaggtggatcacttgagcccaagaggcagaggttgcactaagccgagatcgtgccattgcactccagcctgggcaacagagccactgacattctgcctctattgagactccacctcaaaaaacaaacaggatcttccaatactggaactgcagtccctcaggggagtgaatggccacagagagtggcgtctgccttctagatggagtctgggccctctgggtcaccacagatctctctttgctccatttttcattttatttctctgacactgaggctgaatgtcagtggttctttatcatggtatctgcactgttatttctgcttgcaatttgcttgttttattcatttatacctacctggcctttggggattcttatcatgagacaaatgttgtcatgatatcttactatccggactaacagtccctagagctggtaggaagtcctacgacacagcttttgaggccaggtttatataccatctgctctgtggagcttggccagacgcagttccaggtccccagagcatgacacctgtgtttttgttatgttccttacttggccaggtcacagtttaaacgtcatctgctcctttccttcaaaacacttgcgtcaggacaagaatcacgttgtcattgtctttgctgcaggccactgctgtgctgggcacgtggctgtcagtaaatgtttgctcaatcagattacactgaacaattatttgaccaccacatattgctaagcatgacagaaataattctctggaaaatgaaatgagattgctctttattagtgtttcccagaactcccatgtctagaatgatctggttttggatttagctcatggagccatttatttggaagtccctgctgtgttggaagactcagcctgtttctgggtttgatggtagacgttcgtgctttatcctaaagagacaagatcacacttgcccgtgagtgtgtggccagctgctgggatgagaaggacctccaggccccatgcattttgagtgtagcaggcactcggtcatctgatatctacctgcatgtctcacttatgcagtcctctgattgagaacaaagtaacttttactatgtgtgggcaaggcttggaatcaagtctggtatatctgatttcaaggaaaaaatactaaaatcactaggagtttgaaaagcagtcactcataaagagattgtcctgtggttctgaggaccacacacagcttggatggatgaggaccagacacagctgatgtggacaattcccctgtagccaagctgggtctgataatggttaggcctttctgttcaatgcggaggacaggttcaaggccactgctgccaccaccagcagggaatcaccctgggcacatcagaacctgggggatgcaggtgtcctctatggggacagcaataaaacttggataggaggccggacgtggtggctcacgcctgtaatcccagcactttgggaggctgaggcaggcggatcacctgaggtcaggagtttgagcccagcctggccaacatgttgaaactcagtctctactaaaaatacaaaaattaactaggcgtggtggcgcatgcctgtcgtctcagctacttgggaggctgaggcaagagaatcacttgaacctgggaggcagaggttgcagtgagccaagatcgtgccgctgcactccagcctgggtgacagagcgagactccatctcaaaaaaaaaaaaaaaaaaaaaatctgacttgacaacaaaaaatgaccaggcagacatttatgtttctgacatagaaaaatgttcataaagctaactgaaacaagcaggatagagtataatcccttttttttgtaaatcaaaacacacataaatatatttatatatgtaaataaacttacaggagaaaataactgtggtgattatctgagtaatggatggggtttggggtaattttaacatttttctttttgtttatctcacggttccctaattctttcaatgactgcgtcttacttctgtcggatgaaatcacacataagattgcaggtgctgagctcccaggcaggagctgtttgtattggcccacgtgtgaagcccaccaccagccagagatggaggcaagatgaagcagttgatagagaaaggactttcatttctggagtgtctcagcagctttgtgtggaggataagccacgtgggtccagaccggatccggcaggcgccggatattagctgctggggtgtgggccccggggcttcgttttatctgctctcatcaacattgtggtgtctacagttattactttttctaacatatgactgatatcagcactgataaggtctccttttcataaatttacaggcgttgccttcttgccagctagtatctcttatctcattggaaccaatatttttgggatacttgcacacaaaatggggaggtaagatgatatgaaaacaacactcattctgttacaataatgtagttctttcaaaaaattctaagttgtttctgcctttgctgttacaagtaattgttttgattttcattgaaaatttggactagaaaaaaatcaaatgatcatttcttgatggtgctttttcttttggtaggtggctttgtgctcttctgggaatgataattgttggagtcagcattttatgtgtgagtaaaagatggcatttgacaagtgggaacaatctgtgaataaaacttgcgctttgggcaagaatcaccaagaaacattttacgtttgagtttgttgatgttttattacagctttcattttattctaattttttatcatcttaaaaatgtttggacaagactttccaaggagtgtattttcattttatgtcagaaattatttaaaatgttttatttcacagtttaacttttcccctgcatcatcttaagcttgacagtgtcttaaacacttcaggacaaccaacctgaaacaatagcaagatgtttttctagaataaaatctcttctaccaatggccaatatccatccctcatgaggcctacttgttcttgtcaaaacttgagggtggactaggctgatctttcacatatgccggtgacaagtttttcatggtggtcataaaactcgtttcaagctttgacttttaaagatttggagggtccggttcttcacaaaccccacccttcttcctcctgttttcttcagaagggaacaggcataccacgctcagagaaaacacaagttcaagactttccgagatgatttagagttggatctcttgttattttagcataatgtttatttcctcttacagattccatttgcaaaaaacatttatggactcatagctccgaactttggagttggttttgcaattggtaagtcacacgaaccttgtgcctacatttaaaaccgcttttccactaggaagggttcttcttcctctggtagactgtagttcctcaacctaaatttccagaatcttagaaggaggctgcaggcagcttagctaaattacagcctgtcgattctccgtgtaaagacacctgcttctatgcactagtcatttatttcctgaaaaccagtattttttaaaagctgatatttacagaaggaaactgatgctccactgctggggctgggcaaacaaaggaatcccttgcacagagctcatttttgtggactcctccctatgagcaggtcttctcatgaggctgggggcaaaggcttcacatatgtattttgaagaggttttagtacagacaaagcagactaatgtgttgatgaccgcctgtgctgcaggaattcccatgggcaaggagatgggcttttgtaatgttaagaatgataatatgttaggaaaaatctgtcactattttgagtgaatggtatacttttgtctcttatttataatataccaattgatcatgataaaaataagtgctcagtccacccctgtagaagcaggaacgcaacctttgagtggtacagtggcacagcatggctttcactgaggacagatggtagaaggctgctgaggctggggtagaactcagtatggtactctaggtccttctcaggtgaccgtttgcctgtcctctgccttgcctccccttgtcctccactgtctggttggcccatctttttagggagggtgctagtcctctggcggctccccttgccattctgcaggtctggcagagttgcaggttgctaactgtacggcccctggcctgcatccttttggtgcttccctgctttgctgttttctggttcacttgtccctcaccactcagcacacctgcatgcctgacccacctcctgccagtcacacctgggccacacgcttagactatgggtgtttccaaggtggagaataataggggggaccagaacgccccagaactccaaggagtccgagagatcatctggccctgctcagaaattatgtgtgtgtatgtatgtttatgtgtgtgtgtgtgtgtatgcatgtgtatccatgtatgtgtgtgttgtgtgtatgagtgtgtatgtgtgtgttgtgtgtatgtgtgtgaactaaaagaagctaaaacacacatgcacacacatacatacacatacacactcatacacaaacacacacattcatacacacaaacacacatacacacactgacacacgcatacacacacacatacacacatacaccccccacataaacacatacacatacacaaatatacatacacacatatgcatacatacatacacgtagatacacatacacatacaaacacccacccacatacatatgcacacatacacacatacatatacacacatacacacacacctacacacatacacatacacacacatacacaaatacaagtacatacacaaacacatatacacagacacatacacatgcaaacacatgtacacacatatatacacatacatacacagatacatatatacatatacataatacacatacacacatgcatacacacatatacatagacatacacagatacatatatacatatacatacatactcataaatacacacatatacatacagacatacaccccagcaacaaccacgaccagcattagaatctcgtctcttgaatagtggggagcaggtagcataaagatggtgtgtgttcagagttcctggctcagactccctggctcagtgagtgtggtcaagcctcgcctctctgagtattggtttcctcatctataaaatggggatgctcatgattggctgctgtgagccagtgtctgtgaacacactggcagggactcagaggttggtgccctcccctccacatgtgtcagtggcaggcacatgaggaaagtttctttcattgaaatggtgcttgctgcttcctaatatgtacaagtgctggggatatgggtgaacaaaaccaacagaagagttgggcatttagcaaagaattgaagaatgaatgacaattgagatgatgctgtgagagaacatctgtatacgaggggaacctgacctcctctgggggtcagaaaaggcttccttcattctttctactcaaagattagtatcaccccaagacttgcaggtggtgatgacagaaggggaagagctggcagggtggtgagtttaagacacactccctgatattcggcccattttgggtttacatccgttttctatacactgtgttccctgactgtcttcaggaatggtggattcgtcaatgatgcctatcatgggctacctcgtagacctgcggcacgtgtccgtctatgggagtgtgtacgccattgcggatgtggcattttgtatggggtatgctataggtaaggacattggcttttcataagaaccttttacctcaatacgtaatggataacgtctactaaaattgtttaaatctttgcatctttcagtctacaagacatttggaagagctttatctaattctctgtttcctgaaaggtccttctgctggtggtgctattgcaaaggcaattggatttccatggctcatgacaattattgggataattgatattctttttgcccctctctgcttttttcttcgaagtccacctgccaaagaagaaaaaatggtaagaaaaatttaggatgcagtgagcatttcttgataattttagcatggccttcctgatagcttcctcatggtttcattctaaagccttcaaacataaatggtgagaattcctttttagtttgtaccacatagagcagttacttcttttatttttttattactgtgaaagttatttctttcaagcttatgtttataaactgggagaatgaaattatttttgtacatagattagcatcagtgttgctcttttgtcgaccaagtataaacctggaatcattcaatttgattttctatggttcttgaaaatcttggacacaatctttctgcctcctgtacttatgcccaaggttagccatttgtggtgctgttgcttttctcataacccttacagcattcagtaatagttgctgtcttgtctttactgtatgtaggattttagagatgattttacgatttttatggaaaaatcattgtatatggactttggggtatatgtgaacacacagaacgatttaattcataactttatgaccaaaattatagccataggcaagatacagagtataaagcatccctcttttgaaaaagtccaaattaattgattcaaaatttgaattttgaaatgcatgagtcattttaacctttctaaggtatttaccttacccagcaaggagacgctcagtgtttctgatcatctttcttatctggtgttgccagtttttaaaacagcaaatgctgataggtacttgtccaggtgaaaggagagtgtcttggattaaggatgaatgaggtgaacaagaggacatgcatttttgtgtttgaatagatgtgaggtttgtttgtaatgttctcttggaagtacatcagaaggtctttctgacagtggaactgaatgcatcttaatgctttggcatttcctgaactgccctttgatgcttttccccaaaaggagatttaaagacaaaccttaaaataaggttatgtgcagcctgtgtttgtcttgggtgttttttacattcattaattcattccacatattttaaaatatatcaagcactgggcactggccttgtgccctttattttaaataggatttaactagatacttttgagtaatgcatggcccgtctgactcatggaaaaggtatggaaggtgctgtggaaataactcagacagaagccatccccttgtccttccctccgcttgcttagatgcttccccagctctgaaaaccacatcaccttctcagacctctcttaggagacatctgctttccagcttgggtgtgtaaatttcagatgcatctttgcttggctgaccctagcataataccttgccgaaatggagtcagaaaattctcagcacaaatgcaaactgccattctgttgccatgataacagtttaaggctgaatggaggttactcaatgtttttgaccaaaaaaagtatatatgtgtgtatatgtgtttgtgtgtgtctgtgtgtgtgtgtataaaatcacctacaaatgctcctgtagcccaggaaactgtttgaagactcctgggagatagttagggctagcatgggcctgggagccacactggccccaccatgtagaggcttatgagtcttggtttcctcctctgttgcatggagaaatgataacgtctacctcataggattgttgtgaggattaaatgaaagaatcccaacagagtgactggccctgtggctcaaaaagtgtgttcctatttccaatatcaccccactctttcctgcttatctaactctctggcttcccccgtcagtccagcaatacctgaattttctccctttttcctcctctgtgatgtgagagtttccttttgctatacagaccccagaactcctgaatgggctccccttgccaagccggcaaacatcagtggctgttgtgatgtccgtttgtgaacggcagcctgatggcttatctgtggccttggggaaatgaatgaggtcagaggatgagcagagaatgtgcttgcccagccaactaccactgtgttccgcagaaggactggcagaaggcaggcctcagtacccctcctctttccccatttaaacgaatacttcagttcatgttttaaaaaaatgctgaaggaagtggaagagacgatcctgaaaggccaaacagtaagaattataggtttccaggaagccactttcactgcaagatgttacaatccttaataagcacctagcaagataaatcattaaaaacttgagaaggtgtgcatctcgctgcccatcaatgatgcccataattgaaggcatcacattggatgccatttgactggcctaatggtgacatttgagagtggtggccagcagttgctgcctactcattgtgcaagcagagcaggaagccagcggtggcggccgacagcacctaatgataagggggcatgcaggcaggacagcagtgtgtgagggaggaggaagaatcaatgaccatgcagttgagaaaccccagagcagacaagtgctggcgttcaggatgagcagttgccaaatgctgggggatgtgagggccagaaggcatacgacccttagcaaatcattcttccattagacagcatcctgataacaaggtgtttggacttaagctgttttatattgtaagatataatgctgttttcatggatcacaagtgacagaatcatgaactagtttataagcatgtgagtttgtcttccatttggtttactggatttctgttttttataatcagcattatcagtataggtggaggaaaaaaactgttactcaagtccctctgcacatacaggaaatatcaacattaccatttgaggaaaagtgtcttataagacagttacacggtagcgcttcactctcaaaattcccagttgagaagagctgtgttgcggatttttttttccaggttgaagaattatttttaaagacaagtcacgcttcttaattttactcttgaagtttctaattgttgccaagacaagaaattaggtggtttgaggattgcagctttcttttcctggatggctctgatagttgttccataaagcccttccagcaatagctctgttttctggatgccatgcgtggggcaaggatggggtggcccgaggctgctgagatagaccacattctgcatattctaagttgtttatagaatttgtccctttgcaggtatttaaatagtgggtgcaaaaccatcattgcttttctagttatgttaaagagaataaaactttcctactcagaaggcccaggacctatcatcaaaatctcaaagactggcactcttatcttttaatgcttttatgggttcactaccccagctttgtatt

SEQ ID NO: 63 - DNA, 11166 bp, Homo sapiens
  source 1..11166: mol_type = other DNA
agagggcccgctcaccaccccgtaggccccgcccctgcgtctctgcccgccccgtggcgcccgagtgcactgaagatggcggctgctgtaggacggttgctccgagcgtcggtgagtggctgtcggctggggacaggcgtggagacactggtggctccgggaacgtgcttctcagacaggaccccgcgcttctgggcatgagggccattcgcccttcttggagggtttccgcgggtaacggacccagaggcctccctccgggaaggttccatgcgcctgcgcagaaccgcccttccccactccatcctcgcggtctcttccccgagtccctcctctttcggcgtccccggtccccaggcccatctccacttaaggtcctggccctgattctgccaccgaccctgtgatcttgggcaagcgccttcgcctttctcagactgtgtacttaagatggaaagaatgatgcctacatcaaggcgttgctgtgaacagccccttaaatactggataaaaacgcgcaaagtgctaaaaaactcacaaaggctttccctcccaatcccactcccgcgtgtttctgctgctgtttcctgcttaactgtgggcaatgcgtcgtgctcttttggtacacggctttctctggtggggttcaacacagcccctttcgttctcctgagtcattttgaacattaaagttgagcaaaccggcagagtgcggtggctcacgcctgtaatcctagcactttgggaggccgaggcgggcagatcacttgagcccaggagtttgagaccagcctggacaataatagtgagaccttgtctctaaaaaaaaaaatagccgggcatggtggtcagtgctcctggggaggctaaggtgggaggatcacttgagcccaggaggtcgagactgcagcgagccgagatcgcgccactgcactctagcctgggtaaaagagcgagactctgtttcaaaaaaaaaaaaaaaaagttgagtaaacatgtcccttgagcctttaacagactcccagaggctgaatttggctcttcttgtttacttgtcgctggtgctggaggggccttgtttttctaaggaaaaccttgaaatggtagaacatactcagcagatagtgctgggaaaagcctgcacaagtcccctggcttctgaaccctgtgttgctttaagcgcatggagtttctgattttttttttttttttttttgagacggagttgtcgcccaggttagagtgcaatggcgcgatctcggctctgcaacctctgcctcccgggttcaagcaattctcctgcctcagcctcccaagcagctggaattacaggtgcccgccaccgccgcctggctaagttttgtgtttttagtagagatggagtttcaccatcttggccaggctggtctcgaactcctgacctggtgatcaacccgtcttggcctcccaaagtgctgggattacaggtgtgagcaaccgcgcccagccggtctttgtgttcttatagttcctctccaccttccagtctcctaggagaaggaagcagaagggagtgttaagaacatgcagatccaatccatgctcttagagtttggggtttgctatttggttcacaggaacagggacagctgaaaccaccgttggcacgatgccctttcagccttcagtcaccagtccaggaaaactttctaataaaaagtttctctttccaggttgcccgacatgtgagtgccattccttggggcatttctgccactgcagccctcaggcctgctgcatgtggaagaacgagcttgacaaatttattgtgttctggttccagtcaagcaaaattattcagcaccagtaagtgttatgtcatgtcttggctggagccaggtaaaggaaaaatgaaccatcgtctctggacaggggctctgaaccctggccaaacgttagagtcacctgggagctttcaggaacacagcactgcccccgtcccaccccagacaagttagtctgtggggtgagaccaggatgtgccgggtgattctaacgtgcagccagggttgagaatcactgaggcaaactgcccttgtcacatttccatgttggttgtcagagtttctaatccactgtgttgaggagggtgttactgggagctcagatgccttctgagtctagtgtgtctgaagagctgtgagtggtgggcagcctgtgggggacctgagagggcagctgctctaagattcaaacctgtgtaatggccccagctggccacttaggaaccagacctgtctaatggtatctgtaatctgagcgaaatttagctgtttcttgagatttacactcccttctctaggatatgggctttgctaagatcagcctcagataatgagtggtatttgaaaataccttgtctagatttgactagcctttgaaaaagcccgtatttaatatgtaatggtttgtggggatatactttagtaaagcctttgtttgtgggcaaaatgttctaagagctttcgcaattttactaccctggagcttcaaaatatttctagtagtgatgtgataccacaggcttaaaactttactccactggtttcgaatcctcatccccagcagcgcctcctgtttctgttcatggcggtgtcaggcattttgacattggaactactctgtcgctcattcctgggtagaagcaagtccttttcagttttgacacatctcttgcatccattcctttctgttctttctgccccatacctcccctcaatacgtctaagatcactgaaatcgaggctgggcacagtggctcacacctgtaatcccagcactttgagaggccaaggcaggcgaattacttgaggtcaggagttcaagaccatcctggccaacctggtgaaatcccgtctctactaaaaatacttaaaaaaaataagccgggtgtggtggtgtgctactggaatcccagctacttgggaggctgaggcaggagaattgcttgaacctgggaggcggaggttgcagtgagccgagaccatgccactacactccagcctaggtgacagagcgaaactctgtctcaaaaaaaaaaaaatcactgaaaccacctcctaacatgtctcccccttcctcctgctcctctttccctcctgccggactaatcttcctaaaaacccccatctcagccaggcactgtggctcacgcctgtaatcccagcactttgggaggccgaggctggcagatcacgaggtcaggagatggagaccatcctggctaacacggtgaaaccccatctctactaaaaatacaaaaaattagccgggcggggtggcgggcgcctgtggtcccagctactcgggaggctgaggccggagaatggcgtgaacccaggaggcagagcttgcagtgagctgagattgtgccactgcactccagcctgggcgaacagagcgagactccgcccttgactctgttatctttcctgctaagaagacccagcagcctagtatttaaggactgttgcaacatggccttcaaccattcctgcctgctgcctgctcttcactccgtacccttagacactctctgttctcattagactgccacacgctgctccacacacatgtcctgtcttccttcctgctgtttcctacatgccatctgccccatcccatctagacttgacaaaatctgaaccatatttaaaatccatctctagtctcatgtcttccttaattctatccctactttgtcttcctctttttagtttctgtagcagttggaattgaatttgtgcacaatctaaaactatagaaggagaaattacagttggccctctgtatctggattctgcatctgtggttggttgaatcgaaaatattgggagggaaaaatggatggttgtgtctatactgaacacaaagtctttttttcttgtcattccctaaacaatacagcttaacgactatttacgtagcatttacgtcgtattaggtattatgagtaatctagagatgatttaagtatactggagggtgtgtgtggattatatgcaaatcaccactttatgtaagagacttgagcatctgtagatttcgatatcctagaaccaatccccccacaggtggcaaaggatgactgtgcctaagatgtacagttgaaccgaatgttttgatttatactaagcactttatactactaattaattatgagaagtttaaataaaatcataggtgcttgacatagcaaatgatgaactccatatgagtgtgggttttttttcaggttcctcatgccatgcacctgctgtcacccagcatgcaccctattttaagggtacagccgttgtcaatggagagttcaaagacctaagccttgatgactttaaggggaaatatttggtgcttttcttctatcctttggatttgtaagtgtaatttctatgatgctttcgtgtcattctgagagcaagcacatatcctgttcccacactgaattgtctatccctagatacccttgtgaaaggaaggattctttctgaccctttatcactgatggccttgttgattacagctgggatctgtagcttgtttacaagtgataaacttcgggggtggggtaggacagctttctttatagtacacctctgtgctctggagcactgcttccctaagccagtctatgaaaaagttttcactggtctggggaaaaatgagaaaagtaggcataataaaatgatttttttcaaaaagcaactttattgaactgtaatttttttttcttaaaatatgtgttccctttccccattttttgatacaattcctaaaaataaaaaggtgaggggaggtagtagtacttttgccagcacaacactatagtccagtgaggatggtaaaccattttgccttttttacccttagcaagttgaactagttgttagaccactaattgttaaaatccttgtttttaaatgctctaatgagaatttctatcctttttttccagcacctttgtgtgtcctacagaaattgttgcttttagtgacaaagctaacgaatttcacgacgtgaactgtgaagttgtcgcagtctcagtggattcccactttagccatcttgcctggataaatacaccaagaaaggtatggcattgtacccctagcttttgctcttataaacttgcttggaagaatctaaatttctagctatgctgctggactatcaagatcaaattacgcaagggttgggtttttttttttttttttttttgagacggagcttcactcttgttgcccaggctggagtgcaatggcacaatctcagctcactgcaacctccgccacctgggttcaagcgattctcctacctcagcttcccgagtagctgggattacaggcatgtgtcaccacccctggctaattttgtatttttagtagagacggggtgtctccatgttggtcacgctggtctcgaactcctgacctcaggtgatccgcccaccttggcctcccaaagtgccggaattacaggcatgagccaccacacctggcctactcaaggtattttttttattattactcttccatgtctatgtttgagaaaattagcctttaaaagaatgctttaagaattagaaaaagcagccgggcgtgatggctcacgcctgtaatcccagcactttgagaggccgagacaggtggatcacaaagtcaggagatcgagaccatcctggctaacacggtgaaaccccatctctactaaaaataaaaaaaattagccaagtgtggtggtgggcgcctgtagtcccagctactcgggaggctgaggcaggagaatcgcttgaacccaggaggcggtggttgccatgagccaagatcgcaccactgcactccagcctgggcgacagagcgagactccatctcaaaataaataaataaataaataaaataataaagaattagaaaaagcatctgtagtcccagctactcaggagactggggtaggatgattgcatgagcccaggagtttgaggctgctgtgagctgtgattgcatcactgcattccagcctggtgacagcgagactctgtgtcttaaaaaaaaaattggaaaaggtctatagtattagccgggtgtaaatcttccttctgctcctttctagctgtgacctggaacaagttacttaggtttttcttgcctcagtttcctcattttgatagtgtcttctccagggtggtttcgaggaggcagtaggttaatagagtaagcagtgcttggcccgttgttgaattactgttacctatcgccgttactgttggtctcaaacattgtggtacgtggtcaagaatgttgtgaggccacacattctaacagtcatgtttgcattttgattagaatggtggtttgggccacatgaacatcgcactcttgtcagacttaactaagcagatttcccgagactacggtgtgctgttagaaggttctggtcttgcactaaggtaagatcctgtttctgatgaacttaagattatttttcatgtttagtatcattctgcttcttaggggatttatgtagaccttggtaaagcatttttaaaaccagaagatcctggctgggcatggtggctcatgcctgtaatcgtagcactttgggaggccaaggcgggaagatcacttgagttcagaagttcaagaccagcctgggcaacatagtgagacctcatccctattatattaaaaagaattaaaatttataataatcaatccttaattttagtctttaataaacactgatgaaatgcctcctgcaagggttggcggtctctcagaaatgctgagacatgcatgtcccctccaccaccttgggtctctttctgaagaaggctggctgcgtcttgaggccacactgctccatactccctaactatgtgggagccacttccatggggacacacacctgacattgaagccatcagactctgcagaaggggggactagcagggtaagaggtagtctcttggaatggtgaccatcttcagccctggaaccaaacaatccttggtttgagtttttcttttttttaactcagctacttaatagctgtgtgactttgggcaactgatttgatttaaccttgttgagccccagttttcccataactaaaatgaggtggtacgtcacaggtgggtgtgaggattaaatagtgacacagctagagtttttagcatagttactggcagcagttgttaggatttctgccccagaacatcatttctatctgtattcagtcccttattaaacctttattcctttgagtgtgaaaagctttcagtcctcagcagccccacattcaaacataaccttcctgggagggatgagaacttgggtcttagaattggcatcttgaagtctgctgagaataggagtgaaggagggatagggcagaacttgacctccaggaaggaagagaggggatccccctttgatgtgctgtgcctcacagttttgctgggggctggtcagcttaaagccagctcacctggccgggcgcggtggctcaggcctgtaatgccagcactttgggaggccgaggcaggtggatcacgaggtcaagagatcgagaccatcctggtcaacatggtgaaaccccgtctctactaaaaatacaaaaaattagctgggcgtggtggtgggcgcctgtagtcccagctactcgggaggctgaggcaggagaatggcgtgaacctgggaggtggagcttgcagtgagctgagatcgcaccactgcactccagcctgggcgacagagcaagactctgtctcaaaagcaaacaaacaaacaaacaaacaaagccagctcacctgcctgtcttgtaggtgacctctggcctgctctttcttgggttacaccttgggttttagcgctgagtggcatcttagagtttgggcctttttttcctctctttttttttttttcttttcttttcgagacggtgtcttgctttatcgcccaggctggagtgcagtggcgtgatctcggctcactgcaacctccacctcccgggttcaagcagttctcctgcctcagcctcccgagtagctgggattacaggcacacgccaccacgcccggccaatttttgtattcttagtagagatggggtttcatcgtgttggccaggctggtctcaaaactcttgacttcgtgatctgcctgcctcggcctctcaaaagtgctgggattacaggcatgagccaccgcacctggcagaccatttttttttttttaaactttaaagagattatcaaacgaatgcctaggtctttcagaattgtcaatggccagagaaagggtactggctatttttctcctacggtccctttccctatgagaactcactaattttgcagttacctctgtacccgttttaatattgagattaacaagagagagaagctgagtctggcttataagataaagacttttgggagtctatgggccctgctctgtcccagctctgcctcaccttctattggtggacttcagctggctgcaccctctgggaacagtttcacctcaaaccccaggctcccagtgcctgacccagggagggagaagcatcttttatcctgagttttctctaacctgccttttccatgagtgattgatacctgaaatttccacatccttttaagacagactgttaaaacctgtaggttaaataaccggacacagtgacacacacctatagtcacgctacttgggagtctgaggtgggaggatcagttgagccagaagttcgaggctgcagcctgctgtgatcacacctgagaagagcactgcactccagcgtgggcaatacagtgagaccctatatttaaaccaaacaaccaaaaaaacttctaggctaaacatatctgcatctgtcacagtaacaccaacacagaagataaacacagaccactgtggtagcgtggttcatctcattacatgctgctacatgattaaaagtgatgggcatggttttctgttttgcatagacttagagcctgtacattctttctatgaagatttttcccgtgggatttccccccatttacccaataattcattcataataaacagttgttgaacctagataaaatacacctctgtctcttcccatttgcctataagtttcttgccaagatgtgatacagcagctcaaagaatgcttgccaagtcactaatagtctttgctctctctagttcagtgactttccgatactgtgtaacattcagggcactatgtgaacttgtaagtgtgaccatactgcatgttttatggtgacctggtccagtactgcctttgttaaagcatctgtcatcagtaagagatgataagttttttgcacaacagtgaaaaccccacctttaagcatatgattacgcttaataaatattttattaaaaggagaattaaagacctaaaagggaagaagttagactgttctagttctggtactgttgaggcactgatgaggataaatgatcatgcagaggtctcttcataattgaccccaatggagtcatcaagcatttgagcgtcaacgatctcccagtgggccgaagcgtggaagaaaccctccgcttggtgaaggcgttccagtatgtagaaacacatggagaagtctgcccagcgaactggacaccggattctcctacggtaggtttttttccccaaaagcagtgaggtccatgttctctcagcctcgagagctattgacctgaaatatccacaaaagggagcccactcttgaagcaagcgtgcagatgatatgcaaatgggtgaagctgctgtggggtagagggggtggggtggggagccaggaaccaattatcagagacaggcaggcctttttttttttttttgagacggagtcttgctctcgcccaggctggagtgcagtggcgctctctcagctcactgcaagctccgcctcctgggttcacgccattgtcctgcctcagcctcctgagtagctgggactacagggcgcccaccaccacggctaattttttgaattttagtagagacggggtttcaccgtgttagccaggatggtctggatctcctgacctcgtgatccacccgccttggcctcccaaagtgctgggattaccggcgtgagccaccgtgcccggcctagagacaggcaggccttaatgaaactttcatctttatgttttaaaggaaatctttaaaagtttaaagaactttaggttaaaaattgggagattgccactcacttttgggactattattatggtaaagtcacagttacctaattaagcttttgtattttcagatcaagccaagtccagctgcttccaaagagtactttcagaaggtaaatcagtagatcacccatgtgtatctgcaccttctcaactgagagaagaaccacagttgaaacctgcttttatcattttcaagatggttatttgtagaaggcaaggaaccaattatgcttgtattcataagtattactctaaatgttttgtttttgtaattctggctaagaccttttaaacatggttagttgctagtacaaggaatcctttattggtaacatcttggtggctggctagctagtttctacagaacataatttgcctctatagaaggctattcttagatcatgtctcaatggaaacactcttctttcttagccttacttgaatcttgcctataataaagtagagcaacacacattgaaagcttctgatcaacggtcctgaaattttcatcttgaatgtctttgtattaaactgaattttcttttaagctaacaaagatcataattttcaatgattagccgtgtaactcctgcaatgaatgtttatgtgattgaagcaaatgtgaatcgtattattttaaaaagtggcagagtgacttaactgatcatgcatgatccctcatccctgaaattgagtttatgtagtcattttacttattttattcattagctaactttgtctatgtatatttctagatattgattagtgtaatcgattataaaggatatttatcaaatccagggattgcattttgaaattataattattttctttgctgaagtattcattgtaaaacatacaaaataaacatattttaaaacatttgcattttaccaccagta

SEQ ID NO: 64 - DNA, 32742 bp, Homo sapiens
  source 1..32742: mol_type = other DNA
cggagcctaggagtcagataccgcgagaagtagtctcccgaagaggttcggacaagcgcaggcgcactacaattcccgccctggccgcgaaggtggcacccgcagcgggaggcggggccgggccttcgggacaaagatcgcgagatttaatggcgagtcacagctacttcttcctggcagagaccggaagtgcggtccgcggagcgtctctggcgcttaccctgctttgggcctgcgttgctgctgctgctcctccgctcccccgtcgtatcgcctgccctggatcgaagtgatgggggatgccaaggaggccggagccgagggtccgccggccggggccgccgctcgaggagggctcagcctcctgtcccagggagaatccgaggaatcttctgcacaggtgagtcctccgcggagggggacctgccagggatgtgggagcggaggacccgctccaccggggagggatgccacggttcccggcagattctggaggcttctccatgtttccctgacacccccaaaacagggagttgaagtccatgctccagtcggcaggtattcgtattaaaagcagttctggtagccgacaggtgaattagatacgatctttcctctcaaggagggtacatgtaaatatgtcgttccaaaacgtggcacagtcgtgcaaagcaggagggaagaaacggtgccaggtagtgactcgccgagaatgagaccgaactaattcacaaagggtgtaaaatgtttgccatgcagaagaggtactgcgtgaaaggttagaatattgaacccagacgccgaacttgctttgggagtgtgcaagtgcaggctgtgaggaacgaacccccaatgcctttctatgaagttagagactcaagagtatttgaaccatgcatgcatgcatgaaccgatgcatcgattactaaatatttgcattaaaacaaaaagcccaaatgttctaccagactattttatgaatgatgtgttattaaaattaaaatacatctttggccgggcgcggtggctcacgcctgtaatcctagcactttgggaggccgaggtgggtggatcacctgaggtcggggagttcgagaccagcctggccaacatggcaaaaccctgtctctactaaaaatacaaaaattagccggacgtggtagtgcacgcctgtaattccagctactagggaggctgaggcaggagaatggcgtaaaccccagaagccgaggttgcagtgagccatgattgctccactgcaccctagcctgggcgacaaagcaagactgcgtctcaaaaaaaaaaaaaaaaagaattaaaatacatctttaatactgaaaataggctttactaaagtttgcatctagttaacatgataccattgagtctccttggtttctgcttctccactttacatgaatacattttaaaagagatgtgggtggtccattttctagctgataaccataaccatcatactccttgactcatcttttttctttgaagttggtgtaaaagaactaagtaaatgttaccatttatgctcaaatttattaagtgctgttagtaacatgtggcatacgttccttgtgaagcctggtgtgacaggttcttgttttctttttataaaggtgagatttttcgttcttagtaattttcattaaagtttcacccaatgtgttaattagggatcagctttatttcttggaggcaatgaagtgaagagccgagctgtggtgaaatactcttctgcccctcctcgaacagcatttgcacgccttgaagagaaaacagacttgaaactcccacctgccaactggttacgagagagtgccaaactagggccagcaggaactaccattcttggcaacagcaagaaaagcaagccattttcaaggtaaatattaatcagtggcatttttacctgcccctccaccctcacttaaaactcttatttgcttttaaattcagtttgtaatgcctattaacttgtcgagatttctctttagagaaagatcacatttgattttcaaaggctttttattctgataatagatgatgttaaaacatgaagatatacatacaatatcaattgcatatgcttcttttaagtctacgtcatgttatcagcaaagatgagttttgactgccaaagttcaatcagccctttcattttagccaatttgcataccttttggatatgtgaatacaaaggatcagcttggtgcatgaggaggaaaaccttgaacattccttcatctttcctgtggagtttttcattaaatggtggcaggttgatctggaaaagccagatttaaaaacccagcatgttgggtgacctacaccttgactttgacaccagaactgatggtgttcaaagttgagagagtagcctgaggtcttatagagaaaaatgtattaatgtacatactgtaggacatttaatgtgtagggttctcttttcttcttcccccttctcagcaactcaatctaaaatatttccatgtaacttgtagcaagaggcacaaatacactaatactttatgagctggtattttggaaattatcctaaagcctcagaaaataaaagttatatttgcaaaaatgctgtttgtttgtagcatcatttataggagcaaaaagttgggaataacccaaatatcattttttaaaagaatggcttaatcagttgtgatttgtcaacataattaaatgttgtgaggaaatttgaataattatattgactctatacaaatgctgtggcaagtatttatatgcttatctcatttaattctcacaacaactctttgagataggcactgttaattatattgcacctgagaaaacggaagctgagaagagctaaataatttggctcaagcatacagtaaatcacaaagcatgctttgctgttaggtagtccttggtaagtgtcctgactctgccatttagtagttggaacatggtgatgtcgggtacctttcaggcttatagactatagatgtgcttcaggtggtacgtggcatcagttggctgctcaattaacatttttttttaatttccttttgtggctgaattggtgtcaggtacatttttttcatgtatttttttaagaggtattgtatatcactagaaacacaatctcagaaagtaaaatcctgataaatgtttctgtttctgtttttcttatctctccacctaaaaagaataaagttttgaactattttcccttggagactttgagttttgtgattacaaaaataaagaataattgtttttattctaaatatttcctactggatgcttctaatgattattaccatgttttatcaaatctaagatgccattgactttaagacacaccattattttagtaccactaagaaaaaaaaacttgccaactgtgatggtgatacacatcctggtttcagagttgttaaaatgtggaaaatgtgtatcctagaagcaatgagctacagtattgttattaagctctacttgcatgattatgagcatgacctcataacctgtgtccttttttctctttggtagctttggcatggcatatgactttattgattcagtgggaaatgatgtggatgttgtctctgactctgaagtaagtgttatttgtcgcttaatgtaattttggaggtgttttgtgataggtgttttatatcatgctgtgttttgcataatataaatgtgcaagtcttgagaaattagtgatgaaataagataaaacttacctgattattgagtatcttttttgttgttaaagtatcattgtttaccacatttgtatttaaagaggaaggaataatcaatccccaaacactggcagtggtaataatatattgatggttatattttaatgatagtaattgaaactgataatagtgtttgggattattctgtatatgttaccagttgagttacaaatgatatttctagtaaaatctattggatccttagtggctttgatctgatatgctaaaagcctgggtcagcataacagtgtgacgtatacacccttaactttaagaaatcctatcatgtaaaaataaatgtttgactgtcactaacataatgtgactcataaagtgtacgtgattctggtttgaaagctccgtcctctgtgtgtttgcatgtagctttttgtttaaagttctatttgtataaccttaaggaaataaggtttattatgctttaaaatgaatgaagctaaaatttaaaagattccaaatcacactaaaacagtctttctaaactattttttctcttaattttttaagaacataaaaaaactcctgaaaattccctacagcaagtcgcacgtgagcatggcagtacaccgcataggaaggactctcttactagatgagctagatattcaagaactctttatgagatcgtctcaggtaatgcttttgtgaaaaaatccaacaaaacattaacagcttaagagcactagaaatacgattttgtttcagagaatggccaaagtggaaatgtagttgagtacttcaacaatcgagaaattgaaagtttcactgaagatagaaaagcttgaatgaagaaaaaagaagagaatgagaatggtgaagaaaattattttattgattccaacagccagattcttttttacaagaaaaaagatgaagccaatgaagaaagttgtgaaaaaaactgtgaaatttaagggactagtttaatatttttaagaatcctttaacgtctcccttaaacagattctcaggaaacacagctactggaaaatgtgaaaaatattagaagctgttcctatgaataaatacagtcatgttcccataatgacgtttcagtcagcgatggactgcatataccggtggtcccataagattataatatactgtatttttactgtatttgcagtgttcagatacacaaatacttcagtcacatgtacagatttgtagcctgggagcaataggctataccgtatgacctaggtagggagtaggctgtaccatccaggtttctataagtaacactctgcgatgttcacaccaggacaaaatcacctaatgacgcgcttctcagaatatatccccattgttaaatgacacatggctgtagttattagaattaattgatgctctttagcctagattctcaaattgtatgttggtaaggactgtttttcccacatgttgagaatggatacttttgaaaaacataataacattgttgcagtttctcaagaactaccctccatatctgtacttttcttgggctggcaagaaatagttcatggtcagtctttaaagaatattactacagtgctttgataaagaaaattaaattatggtgaggtaaatgacatttaaaataagtgcttttttcctttgaaaagaccaccgtttagttcatcatgtgagtatgagcctaggcacggggatgtgacagtgaacaaatcacaggccttgctcctcagcagttcattgtttggggttataaacacatacacagatcatttcaatatagtgtgcaaagtgggaactactgcagctgctaaggaacatgttatagagaagactcacctctcccagcctggcttaggaggaggaagacgggtttcctttaggaaacaaaaaacaaaagaaaggtggtatgaattgacccagaaagatatgtttttaatgagtatgtgtttatgaaactattcaaaaaataataggagccttttctgtaagctagtactaggtaacattgtttcgactatgtgtgttgtattaataatatgtatctcatgttatccagactggtgactggacatggttgaaagagttttatcaaagactcattgatcagaagtggcagaggaagaaaaagagcaaagagcactggtatcaaaaggcaattctttccaagtttttatattacaggtacttggctacttatttatctctaaagagaaaaagggaattctgatctaaaatttagtgtgaagcttaatgaagttataatttaagttttgcccctgtgatactgttaacatttgtttcatatttcttttttacaagatgtatgcttaattacagattgtagtttttataaacgggtagactgttgcatgaagttaactttagtaacagcaatccttttttatttctggtttggccagtatcaatggtgatggagccgctcagcctgtctcatccaccgcagaacagcaggaatcgtccagttcagatcagacaaatgattcggaaggggcttcatggcctgctcccttcgaaatgccttcttcagtttctgaagatcccagtgcttccagtcaggttagtacttaaatgctaattctagaaactcacataggaaaacaaagccttttttaacatctcgttaaaaaaaaaaaaagatgaacaggactaagaaatattctgtcagcttatggaatgggggaaaaaagacttctgtcaatttatggaattggagaaatactttttagtttttcgcaatagaatttacaagagctattataggtggggagatcagatttttttattaaatcgaaatataatagttgactgatatgtttattaatactgattatctccttcaagtgatgagtattatatagagatatagtatattttaattataaatactagtcatttttaactataaatactattttaactataaatatctgtcaatatttgatagacatttcctaccaaatattgagactcagagacccatttgtaatttaagttctaacctttttaccataactttcagtcagattgttagacctaaaatatccctttaaggttttccagataaaattcctgaaacttagtccacattcatgttataaaagttttagaaaagagaatgaactaggttgtccattttatctcttacatccttgtttcttcctaatgcttgtttatttttgtacttactgtatctatcaaagaataaaataaagccatagatgtaaattgtgacatgtctattttcaggaaaatagattgataaatagataataagatctgtgacttgataagttacgtcttccctcttgctgttgtgttcccacatattgagcactattcaaccagattgtttcaatcttcacaaattacagggagcagatacatttaactcgattttagtttcagtaggtttaagatagagaaagcatcccataaaactccataatgaatttaaatttctttcaaaagtgagaaaaatgtaaggaaaaggaagtaattaatatgcaagtcacatagtggtaacaaccaagaagtagggatgttctatgattcagaagggagaaaagactacataatacaaatactaccctcctattacccatgtcacccatctcccagtgttgttctgtctttaccttgtttaggaattactgtgaaaactcttggagagtcgggaatctgtagacttgcgtgttgaggaagcaagctggcatttactgaatagctcttatgccatgtgtatgtttgtacaaggttttttttttcattcttggagctgcgtattgtacaaataagtaaactaacgctcatcaaaagatgtttcacatggtcatacagctggcgaaactctcaggctagggcttaaacccagatctttctgcctgcagaggcctgttcctccagcagtactccactgtgtccgtgtactccacacacagcaaggccctactaacagtcagatcatcgtagtagtggtgtatccctaggcacagctagcctgccttaagagtctcttacagagtacttttcttatattgcttaaatttcagctttagagatttgtttatatttgcaagctatctctgcacaaattcttgttccaaaaactaaaactgctggcttgaggcctttgttaagcagttatagaggttaaataggtgactgtgggatggtcctagagccagacatttattgagaacgttgtaacctagagctcatactctgactaaagcaactgcctggcaaactgttttgagaatcggttcatgagttgataacttgtctgtgtaaacaaataataaaataaaaaagagtttaaagttctcttaggactcctgagggagaggacaaggcacaatagaagtgctagagagccacctgtgcttatagtcacacactcttcccaagcaggtgccaagcctactggcacacacagatgacaagtaagacagatgtttgtggaataagcaacacacgcatgcctgtcttgggttctgttgaggcaatgacattaaaagcttaaagtagtatttcttaatggcagtactactttcctaatgattggaaaattgagtggtaggctgagtttacccagtgtcaagagggcccaagtgtattccaaaatgcattccaggctgggcgcagtggcttatgcctgtaatcccagcactttgggaggccgaggtgggtggatcacttgaggcccggagttagagaccagcctggccaacatggcgaaaccccatctctatttaaaaaaagaaaaaaaaattagccgggcatggtggcacgtgcctgtaatcccagctactcgggaggctgaggtaggagaattgcttgaacccaggaggcggaggttgcagtgagctgagatcatgtcactgcactctggcctgggcaactctgtctcaaaaaaaaaaaaaaaagtattccagagaatatcttaagaacaaaaagtgttctgagattaaatacatttgggaaacattggtttttacaaagataaagtagatttttctattgcaggattacttattatatatttattgttttaatatcaataaatattgttactccacaaaagtgagtacctggtaaacgtcatctttcaaacctgactctggaaaattttcattcagtttcccaggaactagtgttctgtgaaacactcatcaggaaatgctaaactggagactgttaagataatgagtatctcaaactgtggctgagtaagatttcttagggtttcttttttttaagagacagactctcattatgttgtccaggctggattcgaactcctgggctcaagcagttctcccctgtcgacctcccacatagcttggactacaagcacatgccatcgtgcctggccagtttcttaggaatttttaaattcaatatagatagagtaggctgaaagagcagtggtaatcagatgcaccaaaaaagagaaaaatgaaaaacttagaaagtttagaataatctttaatctatctctcttgagtaagatctaaatgtgattcgcttcttatagtagctatgatcattagccaaagcaagccacccaatgaggcgtgttattatttgtattggcctaataattcacaatggtagatttgaagtgtgtgctttgaatatttaggtgatactctcaaaagtgggtcaattttaagaaatgttgacagcagaatcactccttatccttgcacttttcacagggaagtgagcctcttgaaccctcatacatagtggggcatgtggcctcagcccccaaagaacaaaacctgattactttattcaatgacggggagcacagtcaggtatgctttccatggtgtccaaggtgacagcaaatccccagtctactttgtcatttcaaaactagcctaagtcgaaattgatagggaaaaactccacttgatcctgaaactgctttctaagcatctttgtgatcttagctctggggcctgactttgtcttctttgtctcttcctttttctagtctttttatggatcatggggggaaattacagattgactgtttattataatcctccctattttaaatcacagggtcttaaaaatgattttgttcggaatattctatggacatttgaagatatccatatgttggtcggctccaacatgcccatatttggaggaggcagatacccagcagtcagcttacgtctcaggtgaactaacatcatacccctcctcaagcttatggtatttaaattcttcctttagaatcagtgttccatcagactgaggttgcagtgagccaagatcatgctaccgcactccagcctaggcgaaagagcaagactcgtctcaaaaaagaatcagtgttccatctatttgggcatcttcctctttctctaggttttttcccctccctccttcccctgccagttgaaatggccacattaaggaaggagctactgtcagcagatgctgaaaggcaggcctatagctgagtcttcattctagacctcattgaatagagccagaggtttgttggactggcctagtcttaggtctgaatctacaacttgtgagaatattcaagagagtttatttaattagttagattcctactaactacttgtgagcatttttcttaatgctccacgtgtatttgttgatattagccaatgtgaattccaacttaagcatggtcttgtatggtgttcagtctttcttcaagttgtgtgtgaggagcaggcagtaggctcaccgtcctttcctattatattgtcttctattcttactgaaaacttaccaatgtcagttagaaatacaagcaagcttttggaaagatgttaaatatagcacaaccactgagctgcatgtgcatatcttatcagaaaagaaagcatagatggcattttctatctagagaggacagcttaagatacttaaatggtgaaataactttcagatgattaattaaggaacatcttaattaaaccaaataacactagaaatgtatatttttagggataacaacaaaccaattaatgtgctaactggaattgactattggttggacaacttgatatgcaatgtgccagagcttgtgatgtgttttcatgtaaatggaattgtacaggtaagatacagtgtgatttttctgatctctcaaatgcaaattggtacagagagttcctcaccaaagtctttacggccctgaagtactaaggtgcatttttgccagggaagatagctgtgaataaactgaatttgagtgtacatttaagttggtgataacagaattgtagatgttatagaagtataattttacaggtaatttggaggaagttcataaatatatgaaaacctgcatttgtagccatagaactctaattttaatgccaagctctcattaataattaactgaaagtgtctacacaatggaggcgtttcttcgttatgcaaatatctactcagtacatgcaaagttttagggaaaggtcttgtaaaaattgcatatggtggatagcttatatagcaaattcttattgagcatattctgtttagaagacacgtatccccattataagtgttgggggaagctaggcgtgttggcttattcctgtaatcccaagctactcaggagactgaggcagcaggatcacttgaagccgagagttcaagaccaacctgggcaacgtagtgagaccctaattgtagaaaaacaacgcacacacttagttgggcatggtggtacatgtctgtagtcccagctacttgggggcttgaagcaggaggatcacttgagcccaggagtttgaggctgcagtgagctatgatcgtgccactgcactccagtatgagtgacagagcaagaccctgtctcaaaaaaataaaaaaattgagaatttaaacaataaataattgttgaaggaaaacaaagaataagcttggttgttattcagaaagagataatctaatgggaaataatatgcagagagaacagtaggagacagataagaattagaagtgtagcacacagaaatctagatcatcagagaagggggtgagcacttccattcaggtctggaggaaagactttgtggaagaagggacatcttaactgagtcctgaatgatagctagtatctcaaaaaataagagctggattttaaaagtctagtgtaaatacatgaaaggattgataataaatccagctagggaacacaggatttatgtagcagaatagctgcaagtaaggttggaaaagtcatggtcaaatgatggagatcttaaatgttgagctaaggagtatggacttggttcagttggtaatctggaatcagaaggctttgcatctaggaggggaaatttgttgtgttagaatattaatttagagatagcatataggacagaaaaggaggacttagagacaagaaaaccagaggcattgtaccattttgcagatagtgtaatgtactttccactagagaggaactattaagaatcaacaatggtaagaatagatagcatttattgagtgcttattttatccaagcactttgctgaatgctttaaatgctttaccttatttgatcttcttagctacctcacatgctgttattcctatttgatggaaagagagactgaggatcaaggagctcaagtgagttgcccagggtcaacttagtagtgagtggcggtgccagtctttgtgcctctctctggctgaggacatgctttgaaccgttatattccaacccagtgattcttaacctggttgtgcatcagaatcacttgtggtctctgaaaaaatgcacttgcttgggcccccagtgttctagtatcagtaggatgtgtacttctgtcttttctgaaagtctgctgtatgattctggtttgcagtcttgattgaaaaccactgttagaccatctccctaaatggcaacatttagtgagaggctggggtgggagtggggagcaagagaaaagagagaggcagataaagcgttagcaaggcggaggggaacaggagtcaaaggagattccagggtttagggactagaataatggtggtgccatttagtgagataaggatgttgaattggtttagacagggaaggtaatatgtttttgtcacatgttcagtttgaggaaagtataaaaatgtctagtgagcattttgaagttgcagccattagagaaataaattgaagcatcatctgcctagatactgtcagatttcatcaccagaggaatctattaaaatcagacattggagcctctcctcataggggtaaaaatagaagggcatttagagagagagaaggagaacaagaatagcacagattaaaatacaggaaaggagcattttaaggaaggaaataatcaacattggggacttcacatgaacaaagtggggtgaaaatcaacctcagacgattgtgtttggtcttacattccagttgatttgaagtttccagttttagagtacttcagaaaatgtggtaggagatggttaggagagtgtgcacagaagataaacaagaaaaatgcaaaggcacttttaaaatagtggtagtaatgtccatgaagcctttactcttattgccacctccattcccccctgctccatccctgtgaagtaataaagtccatagatgaagggaagagaggtgtctactggaaaatttcctaaatgattctctctccttgagtcactgactgtagtttctagcaaaaaaaaaggccagaaatacatgtgttttaaaatcttgctgggtaaagcctaccttcatttaccatcttcccagttgaaaaccattcaagtggaataaaagtagtcagtatgatttgttccatgttagaacagaaataagatcatgcctgaatctgaggttctaaatctggtagtgattctccattgaaattactccaatagtgaactgcccttgctgatggggtggatgagattcctttgggaggctggggcagaaaaaagattaaaaaccactggtttaaacactttcatgctacataggtctctgtttgcaggacttctgcatttggttgctttttaaaaagaaaggtgttgtttccttgggttttctcttaaactgctttccatctgtctgtattttacagaaatatgaaatgataaagacagaagaaattcccaatttggaaaattctaatttttctactaaagtcataaaagacattgcacagaatattttatcatttttgaaatctaattgtaccaaagaaggacatacctattggctctttaaaggtaagctattaatacttcttgagtgaacaataattgatttgggtaactgctgtgaaatgagtcttctttgtttttcttttcagcaagtggcagcgatatagtgaagctctatgacctcactactctttgtgaagaaactgaagacaaataccaaaatccattcacaatgccggtagccattctcttgtacaagtgagtgctttaagaatttaagatgaagaagtagcctattatataaagttttaaagcatacagtcacagtttccaaaccaaggcttttaaatgcttttaggttttcatagtagggggaaaaatacacgtacacattgtaccaaatattactcagctttcttatgccaccatagtataaacgttttgggggttgtgggtaaagtgtaaagtttagtattttgttgtttcttatagctctttgttggaaagaaacaagagcactcctagacttgagtcttgcagacaacgatgaaatgggcagtaaagttgatataaactctttttttagggttgcttgcaacatgatgatgaagaagaatcaaaataagaaacactatggaactattagaacattgcttcttaattgtctgaaattactggacaaaagtaggcatcctcaagtaagattaacatttatgtattctctaaaacaatcctagcattctaataggagattgttacctagacagtaaagcctcctgattcatattccgtaactgccctattcagtgtggtagccattagcacatgtggctgttgatcacttaaaatgtgctttgtctgaattgacatgtgctgtaagtgtaaaatacacactgaattttgaagattggatgtctgtacctattacatgttgaaatgcaatattacatatattggattaaatatatttaagttgatttcacagattctactttttaaatgtagctactagaaaatttaaaatttctgtatgtgactcatgttacatttctctcagacagcactgctcaatgaatttagaattcatgtaattctaacagtagtgcccttagttctttgttttgtcgctattagaccttgttaccactttgttaatataaatagggttcacattccacacttcaggatattaaagcatctcttaaataaaggccagtaaaatttcttttaaagagaaggggaaaaagcatctcttaaaatattccctcagtcatgctcccaacagttttacaccatccttaccctcggttgtctgattgacaactttatttttcactgttaaggctatttgttgtatcctgttcaaatcagtaaaggtatgtaagatacgcaatttttctttgaagagccaaagtaattttaattgtagccacatttgatttagagataaagattatcctagagaccaaactcagaaatgtttttgaagaaaaatagtaaaacattttgtttctgactgaaatacctaattgctgactgaggtggcagtgtttagtggaacttgagtggtttatttggatgttagaaatggtgttaaagactattgtctgtgattaagaactgataaatagtagaatgggttaaatggtcatatataaatgctaattttaagagatatcagaatggacttttccctttttaatgtaatggttttttttttctagaaccatagattatatgataaatattagttacctattatagagaaacttgaattaatttatagtttgtaaagaaaaattctggtttctcacttggcatagggtggtattaaatttttgttaatattttagttatgacactctgtactcaaaagcttttgtttgtctccagtgaaattcagttgacaccttttaagagggagggctcagggtggagtaatttcgggaaataggaaatgcatcagcctataaagattttgcagagcatacccagagtatcagtagctttgaactgggaacatttctgtgtgtgttacagtctatatggtggaaacagcctgtgtgcagacctcctcctaaaattcgttagtatggtagtaaaattcatgtattttttgatgacagtaatttacacatatttctctctttttcataagattattgcttccgccaattacatgctttcagaactttttcaattggatgaacctaaaaaggaagaaaattcagaatctcctttaaatgagaattctgatgaaagttatagtgaagaggaggaagagatgcccgacagtgatgaaaatggatcctatagcaccagctctgatccatcagatgatagcaaagcagtagctataatcaagtctgttggagaactatcagtaccagaaaaatacaaatctattcatcaaatcagagtaagcctttagaatttatattaaatttttatcaaggaaacataattgttaatcgaatatagttagcctttcaaaagataccattacttcaataaacctttcatggtctagcatctagtaatcattagttttctgaattcttaaagttggttttataattgttcgagggtaactgacccacattatgcaagcctatagtggacaggtgtgtaaaccaggtgtctgtctattcttatgtgaaggattttcctttccagtgaccagtgtgtagtcatagtcatgtctcattactagggcacttctatccggtgttggggttgctgggaaatgacatatatagattgcttggtgaacatagagtagagaagggggtggctcttggaactgtatatggtgagctctggtacattatccctgtgctatataggacagtacttttttcgtgactcttgtggtcatgtctgttgtattggacatgtctctgccctggagagggccagacagatttctccctgtgtggattgcactgactctaccatcagtgtatctccaggcagtatatacctttcaacataccgtctccctatgattagatccaggccagccttaagagttctggctgttccctgaactgaaatacagtcgtatttacagataatctcttaatttaagcactgagtgtaactttcagatggaaactctaagcaagtttttgaggggctatgtctgtcaccttaaaacattgaccatctttctgaccttcacttgctccattggtttgccgtggccatgctgggttttttttctctcaaaagcatcaagattatgctcattggagggtctttgtatttgctgttgcttctgcttggaatgtacctaccctaggtctgttcatggctgccttttttaaggcttaagtcttgactgaaatgttgcctcttcagggagatgttccctgaccactctggccaaagcatgctctacttttttgtccttcaaggagcctatctgttcctgaagttcttaatgtttgtcttgcttcactagaacgtaagctccctgcaggtacagaccctctatctcccatgtctagaacacattatgggtgctcagtaaatatttgactaaatgactgcaggaaaaagtcattaactgtccatctaaattttagttcactttcagcttgaacttccacagtggagtgaaaaaatgttctggttataatcattgattgcaaaagttacatgtatctggaaaactgcattgtaacactaggccatggacttacggggcaattaggtaataattaaagatgtaatgagttagtgtcactatttttcacagatagcactttctgttccgtatctgaagcactcaaaaaatgcagtcttagtattcatataaacatgtctttagttagcctttccttatcctcattgaatgactttgtggtatggacagtcagcatgagctccagggtcccagctccccactcactcaccgtgtcctcagacaaattgctaaactgtctgtgcatgcttctcttctgtgcaatgagaacagtaattccaaccccacgggattcagcgaaatgaaatgcttcacagaagcccctacacataatatccttcatagttggaggttgctagctgcttttgctccttaattaagcaaataaattaaacaacgagaatattggtgatacttgttatttctaaattgacgctaattgttaattgtgttttgtccagtatcggtgctaattatgagtggagctgacctattagatgatgtctatatttgtctaaaacattactactctagttcttgcttttttgtcataatagaattgtatttaaaattgtaagtacttaaagcaacatatatgttgtaggatctttttaagcaagatttttgttgataatgcttacagtaatttaatcttcaacaaaaacaatatgttgaccttaatacattggtagtgtattaataattttatgtttgttcctcaagcccagttgtgcatttccagtttgccatgacacagaagagcgctgtagacttgtgcttagctatgttctagaggtaagtttaagtttagtcttcacttttttcgtaaagtttgtacttgattatgcaaattacacttgtttgttggtatctaaatgttattctgaattgtgttctgctgcgatttttttttccttaagcataaagtgaaaatcagatttgtttttcccaaatctttcagatcaaacatagtttttgaaagtctgtttgtgagatggaaattttcctaaacgtattcagtagtccagatactgtcttatatttagttttcagttgacctgaagttagatagatagtgaatgcttttcctttttttgcagggtttaaaatctgtcgatagcagcatcaaaaaagaaagcgaccttccagcagctgaccccagcactccaatcccgttaaaatatgaagatgaatcctcaagagggggtcccgaggggctagagaagcagatggccttgtttttggacaaaagtaagttgaattgatgtgcaaataaggccttcaatagaataatacactggttctttatcaacagcagacttatgtcaattaaggcattaattgaaaggcattgagaaaaagatatcctgtgaactggaattaggggtagtattctttcatttgaaatataaaaaggataattttgatgtttcatggacatttctaataagagcataaggagcctgcatcttcctgttacccacagtggggaactaatgcttcagcctggtggagttctcgctggatcgtgtaggagccacagacttagccagactgcctaacttcatatcttggctttgcgagggcaagttgctccacttctttgagtcactttttatctctttcaaaatggagacgataataatggtttctttaaagggttgttaaatgattaaatgattaatatatgtaaagtgctcagaacagtgtacataataagcactatagaagtgtaggctgttgttactgcacagtacttgaataagctacaaatgtcacttttaaattatctagttcttcaggaatataacatcatgaagaatatatggacttcgaagcagaagttgtgaatttcttattttaacctaagttgtatttctttttccaaccttatttctttcccccttttaaatcagtttcaattgtttaaaaaaaaaaaaagtgtagaaagcctgtatgtttgaagtacatctgaatcatagtggaagcgctttctggacccttcttcttttcctgaacaaacatggtggaggtaggagaggaatagatttatttccccagcatttatatagtgctgctggtatgccaggcttcggcctacaggcagtaaggagatcacaccaggacttttgccattctttttttctgaaatgccttttctgtctccttctccatctcccctgttgaaaatcctgctcaagctcagaatctccatgtttccctctgttctccatcagaattacttgattctcttaccactttgtcctgtgagcctgccttatgtcagagttccagcattaaatggttttacacacacatgcacacacacggttgtgaacaagaacttcatcttaattttagtttctcacaatgcctcttactcacagatgatgcttatatcagcagaggaaaaaaatccatacacacattaaaccataatgaagactaagtacctttcattgccttgaaagacttgtgttctagctgattaaaaaatgagaaaccttcaggctgggggaaggggtgggtgtttttgttatttgcagagcaaaattttccacagtattttgttctttgtctgttaattacacttaacatattttgttgtggtttatgttatcaaggatagaggccatataacttcatgtcacagtttccagtgcctggcacagtacttggcagaaaaatgatcatttgttgagtaaagaaggtagcgatgggctggactttaaataaagagtattccttgtagaggaaacagtaaactaagatgggagataggaaaaacaggcatgtttataggtgacaagcagtaacttaacattggctgatgggtagtaggatggacaagtaggaagtgagactgagaaacatgcaactagctaagtggggagaagccgttttcatgtttgaggacaggctttcacgctgatctaagctgtgctttaggaaggtaaactttgacaggttgacacatagactggaaaaaggagacaggtgtcactcatgaggttagctatgtcagtgacactggaagagaatgacagagttgccgatgtcagggaagcagaaggccttagaactcccaagtgagagtcttttaacacggccatttcactccagtgtatttaagcagtaaagcatagtatttaccagtcttgtcacctaagtctagagtgtttccatcaagaaacagaaaatattttttgtgcatgagacttacagtcaaatgaaatgtgctgtctttttttttctctccatgtcacagtgggctcccttcagaagggcaattattccagtcaatctggaatgatccctggctcttggcaacataaaatgaaacttcagctgattctcaagtcatcaaaggcctattatgttttgtccgatgctgccatgagtcttcagaaatacggaagagcattacgatacattaaattagctttgcaaagccatggtaagccactataaatgaatatgtttaataggcactgggaagagagaacagagaaggcatctgaatcacagtggaagtttactcctatttttctagtaaatctttattttaaaatgactgtttccaatcctgtgtgtgttaccttctattttagtttctgctcagtggtttaacatctctttgctttgaactacatgaagccgtaatatgtattgttggacctaaaataaacagaatagatacagtgctacaaagcgttcagctggtaacacagtttcttcatatttcctatgatcattaatttttttctgcatttgtgttttttcttcttccctccctttctaaacagatacttattgctgcctctgcaccaatatgctttccgaagtgctgttgtttctctctcaatatttgacactttgtggtgatatccaactaatgctggcccagaatgcaaataatagagcagcacaccttgaagagtttcattaccaaacaaaagaagaccaggagatcctgcatagccttcacagagagtccagttgccaaggtgtgccacaggcttggaccacgtggttcacagtgggactgtgcagtctagctcatgcttatttgagtattcagaaaaggggtagaaatattagagttttgatatttgctctgtatttatttatttattttttgagacggagtttcgctcttgttgcccaagctggagtgcaatggtgcaatcttggctcactgaaacctccgcctcccgggttcaagcaattctcctgcctcagcctcccaagtagctggaattacaggcatgcgccaccatgcccggctagcccaccttggcctcccaaggtgctgggattacaggtgtgagccaccacgcctggcctgctgttttattcatttcctaattttaagattaagcatgatcttgtgtatttgtataaaatggtttttaagtattttataattactgtttatataactagaactaaatataaagtaagatatgaagacagttgtgtcaactttttattttattttatttatttatttttttgagacacagtctcgctctgccacacaggctggagtgcagtggggcagtcttggctcactgcaacctccacctcctgggttcaagtgatcctcccatctcagtctcccaagtagctgggactagtacatgcgccaccacacctagctaatttttgtatttttgttagagacagggtttcaccacgttgccccagactggtctcaaactcctcaactcaagcgatcctcccaccttggcctcccaaagtgctgggattacaggcacgagccactgcacccagccttgtgtcagctttttacactcttcttttcatgaggttcttctaggtaacacttgtagtcagctaacaaagccataggtttccttttgaaaggtataacagttggtgaaggaggttaattaaccttctgaatgattccttggggctgaaataaagtgatcattgtttttaaagttagttcatagccacctgtcttgcttaatatgtcactctgtttggaattgtcaggctttaaaactgggaagtagaataatctgatccgcagcagcgatatccctccctcttacctcagcacagtgtgtaaccacgctgccattaacacagtgaatgaagtaaaagatgagtcttctgaaggtgcttctgtaatgtctcatggggttgttttattatgctcttaaattgttatactgaatattacttgatgtttgcctcccagagttttagacaattcatagctagaggagtatactgggggagagggaaaaatgtgttattttgtaatagttttgccctttcttcccctctctccgtctttctcaaataatcatgttttaatgtagtaggaaagtccttggtgtatttttactactcccatcatagcaatttcagttaaatattctttttactctagtccccactagatggcatttttaatcttcgagggcttctgtagcagcctcttcagtgacttaaagttaatattgggacattatttcaagaactatttccattagttaaaaatagcaactttactttgtattagtggacaactttaggtccattctaataaacaagtgtacctgggaaaacctgggtcacagaaattgtttgatattcataggcaggaaaatatttttatccaacattaatatcccaagaaatataattttataaataaatagatctttattatgaaacttaaatattgttgtattgattgaatcttggtatacttacactatattgcattttttattacttagaatttagaatctcaggttcatttggatactgaggaagaaggaatcacatgattcgcattgatgtatcccttttttcttttcaggatttgcatgggcaactgatttgtctacagacttagaaagtcaactctctgttagttgtaaatgttatgaggctgctaatgaaatcttgcagtttagtgacttgaaaagccaaaatccagaacactatgtacaagtattaaagagaatgggtaacattagaaatgaaattggtgtgttttacatgaatcaggctgctgcattacagagtgagagactaggtgagtatctctttagattcctctctattgcttgttctctcagaaaattatgctaattttgtatgagtcaagcaaagaactgtggcacttgattttatatcataaagaggtgctctattagagaacctcttattattcttaagaaatagaattaggaacacatgattttcccttggaatgaattatttcaatgttcttcattcttacttttgtactcactccatctgatcaattcagaagcaaatgggacatccagccatgtgccaggctctatgttggatatgtaactggctaaaatatggttctctcttcatgttgggaagctagataggaacacaaagcctcaaaatgctgtggatgagtaccgacgaagtataatgggagactggggaaataagacatttatggaggttataagttagaaggcttttgggaaagtgttgttgagcagggtgatgcaggatgtgtagagcatcagccggcaaatgtgaggaaaggagggcactccagaccaaggaggcggtgtgaggaagaagccagggatctcaaagggtgcaagtgtacgtttagagggagcaagaggcctgtgtgaggaagatgtgggatagtgggtaagtaagatgtgggatggcgtagtaagatgtgggatggtgtaagtaagatgtgagatggtaaaccatttgggcccatgttgaatttgagttcactatggaacatgtatgtgaaaggtataatttgtagtcaatttgaagtgtgctaagagctgtagggctagtgagacagactgagaaccattcacataaaggtaatagttgaagccgtgagaatagataagaatgtaaagcctggacacagggacagaacagaaaggggctgaggtagaactgaggtgagcaggtaagctgaacatctgtgggcctttggttttggttttggttgtttctttttttttttttttttgagacagggttttactctgtcgcgcaggctagaatgcagtggcataatcatagcttgccacagcctcgaactcctgggctcaagcaatcctctcacctcggcctcccaagtaatttttaaaaatttttttagagatgaagtcttgctgggttgcccaggctggtctcggactcctggcctcaggcagtcctcacgctttggcttcccaaagttctgggattacaggcatgagccactgcacccagcctgtgtgcctgttgatctgtgaataatgcttggcacttagggatacaaatgttgccctcaaagagttcattgctagtgggagaacctgtgcatttacggtgcatctggagggggcagtcagtgagggagcctggaaagtggtagtcaggaagctagggaaattggatacaacacaggttgtaatctcttcagactccatggggaccacgcttttggatcttcacaaaatggcactttgctcagatgtttttctttgcttattttaatatcatttggttaatagtgaagagggttatacttaagtgttgtacagtagaccccacttatccttggaggatgcgttccaagatccccagtggatgcctgaaactggagagtttttcagtgctttttcctatacatacatacctgcgatgaagtttaatttacaaattaggcacagtaagagattaacagcatttacaacagtatggcagcatcgttactcttgtgctttgggacattaagtcaaaataagggttacttgtacaaaagcacagcaatattgtaacagtcatctgataacccagacagctactaagtgactaatgggtgggccgtgcatacagcatgaatgtgctggacaaagggatggttcccatcctgggtgaggcagagcaggatggtgagagacttcatcaagctatgttagtgagctggggctgctgtaatgaaatatcatagactaggtgacataatgagaaatttattgtgtcatagatctggagactggaagttcaagatcaaggtggcagcagcattggattcctctcatgtttctaccttggcttgcagataaccgccttgtcaccgtgtccacacagggccttctctctgtgcatagccctggagtccctccctctttaaaaggacaccagtcatactggattaggatcccacccttacaatctcatttaatcttaattacgtctttaaaggacctgtcctaaatacagtcacattctaaggaactaggggttagggcttcaacatatgaactcatatggacacgtttaccttcatgtaacaggcatggtgagagcaatgagccgtggttgactgcaggtgactggctcgccaccacactcctgtcactgccatcctcctcttatctcatcaagagacagtgctaaggtttacactgatgtctgcttacacagttgttttctttctttctctgtaaagtgagcaaatctgtgtctgctgccgagcaacagttgtggaaaaaaagcttttcttgttttgaaaagggaattcacaactttgaatcaattgaggatgccaccaatgccgcccttttattatgtaacacgggaaggctcatgcggatttgtgcgcaggcccactgtggtgcaggggatgaactgaaacgtgaattttcaccagaagaaggcttgtattataataaggtaacacattcgcgtacatgttgggcctcacccattcacacctgtcatttatttacattttgccagtttcactaaaatactataaaactaaaaataattaaactctgctaatgatacaacaccagacagatcgtgaaaacacttgcaacctggcctaagactagtaagaattgagtattgaagatgacatgtggaattggaagggaaaagatgattctgcaaatggtttgtacaacgagcatgaatgtcaaatggattaaagattgacatggagaaagtgaaactgtaaaagtattagaagaaaatataggtagaggcttatatgataggttacagaaagactttcccagcatggcacagtaagcagaaatcctgggtaaaagttgaataaactcaaatgtgtaaaattaaagttctaaaatgcacaaatgtataaaaaataaagatctaaaaatgctcaacagaaactgaaattgaaagcaaatcatagagatgagaggttaatatactcttgctgtataaaataagaatcattgaaaataaaccacccaaagagaaaaaagagcaaataaccttgaacagaaaatgtacacattttttaaaaaaagtaaatggctaatatatataaaagaaaattttcaaagtttagttttatttatttacttttttgaggcagagtttcactctgttgctcaggctgaagtgcagtggcacagtcttggctcactgcaacctctgcctcctggattcaagtgattctcatgcctcagcctcctgagtagctgagactacaagcatgttgccaacacgcctgtctcattttggcattataatatttttagtggagatgaggtttcgccatgttggccaggctggtctcaaactcctggcctcaaaattgagttttatttattagattgccaaattttatgacaaatggtcacacccactgttggagagggtacaaagatatgagcactcatataatggaggaattgaagccatttaaatgacattagtgaagaatgttggtggcataaatttttaaatgagtgaccttttttgattttcttttttaaatttatatatacacagaaaagagtgaataaataaacaccagaaatgtagaaattattgctgggtgattaagtgtggttttgtttttggtttcaatataatggccatgtatttgaggattggggtaacaaggtaggaggagatacttctttttacgtaaaatttggcaagtttttaatctaatttactagttatataaactgtaattttcatttagaaagaaaaaaaaaaacaaaggaaacaagtgcatcatcatgctcagcctgagtcagaaagcagcagcacggattggcttcttgtagccttgagatgggaacacagagtggtcttcagtctactcggaataactttcttcattgaaatattttcattgacttacttttttcatttcctcataatattgtctctttataaattatcccaaaattaaattaacatctgggtagttgtgaagtgtgttttattttaatgcagtattggtatatgtttaagctgagtcagaaatgtacactgttttctcctttgcaggctattgattactatttgaaagcgctaaggtcattgggaacacgagacatacacccagctgtttgggattcagtgaactgggaattgtccactacttactttactatggcaactctacagcaagattatgctccgttatctagaaaagctcaggagcaggtgataatatttgctggagtataaaataagttctcaatctaattcccttgtttaacaaatatttagcgtctgttgtcttttccctaataagcagtatttaaacgttttaaaaactcctacagtcagattagaagcttatttttttcttccccctcaaaacaagaacagattgagaaagaagtcagtgaggccatgatgaagtccctaaaatactgcgatgtggattcagtgtctgctcgacagcccctttgtcagtatcgagctgcaaccatccatcacaggctggcctccatgtaccacagctgtctgaggaatcaggtattgtcagtccaagttaagtacagtgccacatcagtttaaaagtgttctgggtgctttttgtttttttaacatggtcatatatgtcttccttgacgtccactcaggtgaactgctgtcctaaattttctgctgcgtctgtgcctttttttgtgctgtgccacttaaacaatatgtccgcattgtgctccatgttgagcatgggaaaacgaatccgctgttggtgttctgtggcttactgcctgtcacttaacatcgtgtttttgagatacatctgtgttggcacacgtagctgttcattttctcagctcagtagtcattaaatgactatatcttagtttatctagtctatgattagtgaattttggggttattccagattccagtttgatgctattagaaataatctagtgccagcaggattgtacatgaatcctggtgcccaaatgcctgtatttctgagaataatctgaggccgaggataaaggcacttccttccgagagattgcttggcttttgctgcgagtcttgggcctgtagtttctcagtgatgtttttttgtttgttttgttgattttccccccccgtaaggtaagactacttaccttacagtccctttggcatgagtttacttctgggttgcctttattctgaaaagtatcttttgagatacagcttaaactggagaagttctttttctttttttttgagacagggtctcactctgttgcccagactggagtgcagtagcacgatctcagcttactgcaacctccgcctcccaggcctccccactcttttgcatatagatatctagttgtcccagcaccatttgctgaaaagactactcctctgctgcattgtcttggcacccttaagcttgcttttgccctcaggatattaggccatctgggcaaacctgaattttggttgaggacttcctaagtcgaagtggaaagaaatcttctccagttcatgcctgtaatcccagcactttgggagccgaggtggttggatcatttgaggtcgggagttagagagcagcctagccaacatgacaaaaccccagaaaaaaattaaaaaattagccaagcagtagtggcgggtgcctgtaatcccagcaacttgggaggctgaggcaggggaattgcttgagttcaggaggcggaggttgcagtgagccaggattgcaccactgcatctccagcctgggcgacagagcgagaccctgtctcaaaaaaaaaaaaagaaaggaaatggattaaagacctaaatataaaagctaaaactaataagacctagtaagacccacagtgggggaaaaataactaagaagcacttagtgaagcctgaagtagttaccgtgaaggatttgttgcttgttttggtttggttctaggttggtgatgaacaccttaggaaacaacaccgggtgctggcagatcttcattacagcaaggccgcaaagctgtttcagctgctgaaagatgctccctgcgaactgcttagagtacagctagagagagtagcatttgctgaatttcagatgaccagtaagtcttaattttcatttctcagatatgtatgcattggcttagtgctggattgtcttagagtaaggcaggcctgtgaatctaaataatactattttctttttaatttgccccatagttaatgacttcgggtagagagggtgagaaatcactacatgttttgaagtgctttttaaaacttagaggaatgtattagattatgttcagtgactagaaatactgagatatggcccatgacccctagtttggaaaaaaaattgacaaataaatttagacagttaaagaattcaatcggccaggcacagtggctcacgcctgtaatcccagcaatttgggaggctgaggcaggcagatcacctgaggtcaggagttctagaacaacctggccaacatagtgaaaccccgtctctactaaaaatacaaaaattggccatgtgtggtggtgcaggcctgtagtcccagctactgaggaggttgaggtgggagaatcacttgaacccaggaggcgaaggttgcagtgagccaagatcgtgccactgcacaccagcctgggtgatagagcaagactgtgtctcaaaaaacaaaaacaaacaaaaaaaaagatttaaatcggcatgaaaaatttgggaatggagaggcaacagtaaaggagtagtggaccttattgaaccccttaaacatagaactgacccttggattgtggttccagaacagacactactgtagagcctgaccgaggtcaagataagtcgggagatagagaagggtgaaagtgagaatgctttcttatgttattttccatggcatggagtaagcagatacttcaaccacttaatgatttttcctaagttctccccctctctctcttgctcacctattctcctctcccgcagaggagtcttttgagaaatatctcctgtgtggtaaagaaacaagaaacaattatttgaagtgcagcagttcatttagtttttcagtctgctgtaaaataaggttaatactttaaatctgtatgacttagtttacataatacagtagcccctgaaggatgcataagaaactggtaacattgttccctttggggaggaaacctggaaggccaagaggaggggttttgctgcatacccatttggaccttgtaaatttgggaatgtattacctatctaaaacagtttctaaaaatggtttttactaaaactaattttttgctggcatataacgcatggctagatgtgtgggacagtcaccagaattaacagtagctctttatgtgaggaaggtttggggagagtgatcttcagttttcacttgcacctttgaatattctgccatgtttgaattccttagaatgatcaagcatcttttttgttgttggggttttgttttttgttttgttttgttttgtttgagacagagttttaccctgtcacatgggctggagtgcagtggcatggtcatggctcactgcaaccttgaccatctgggctctagtgatcctcagcctccccgagtagctgagatcacaagtgctaattttggaaaaattgtttgtagagacagggtctcactatgttataagcccaggctggactcaaactcttgagctcaagcgatactcctgcctcggcctcccaaagtgctggaagatactggaacaaatttgctaagatgataagtgtgtttaattctctcctttaaatgttttactactgtgagtactttagaaaataatgtaaatattttagagggttttgttagccaggtttgtgggttttgtaagccaagttaataaatgctctagtttgtgacaccttttattctatcttattttacccagtgtttttttttttgttttttttttctagtacatatgattcagacctcccttcctaatgtctatattgtctggtcgttgtcccaacaacactttcatacataagcaatagcttgtcttccagatgccaaatctatgctgaaatcacattgatccattgattttaaagagaataggttgtttagaaagtgtgggattatacttctaaaggaagaaggcaacagttattctctccccacccgcagagtcggggagtccccaagaccattgtcacttctcacactaactacgagtctgtcggcggtctccaagaccaccctcaggtttgagaatttgctaaaggactcacagaactcactgaaagctgttctgcttacagccacaatttcttaacaatgaaaggatgtacattaaaatcagccaagggaagaggctcgggaggcagagtcctggagagttctaagcgcggagctcccagttcctctgctgctggagttacagatagtgctaactcaccccggcagtgatgcatgacagtgctcaccaagtgtatcaatcaatacatgtacaactgcggaagctcacccaagccttggtgtccagagttttcattggaacttggtcagatagacatggttgactgccacgtggctgatctttgtctccagtgcctccagaggtcaagctgttaccctggggcccaaagtccccacagtaaatcccattgttaggctatccattgtgacccaaggacccccaggtaaacaaaggcgttcttaccgggcaggacatttcaaggacttagtggttaccttctgggagccaaggacaaagactaaacctctgtacaagatttaa

SEQ ID NO: 65 - DNA, 29543 bp, Homo sapiens
  source 1..29543: mol_type = other DNA
taccgggcggaggtgagcgcggcgccggctcctcctgcggcggactttgggtgcgacttgacgagcggtggttcgacaagtggccttgcgggccggatcgtcccaggtgagctgcggccgggactcctgggagctgtccggggtcgagggctgagccgcggggaccccccgagctctgcggggacgggcaggggacagacgcgcggcctgggcccgactcctcctgggctctggcgagggcgtctcggtggaagctcccaggaggcgcaggcgctggcgacaacaccccagctgccggactttggggcgccgggggctgcggtcggatcgtcctggggtccccgctagctagctgcggtgtgcgcttctgtggccggggataggtgaattgggcacggggcccttcttagctcctttgctatcagagtaactcgcacctcttttgcagtggaagagttgtaaatttgcttctggccttcccctacggattatacctggccttcccctacggattatactcaacttactgtttagaaaatgtggcccacgagacgcctggttactatcaaaaggagcggggtcgacggtccccactttcccctgagcctcagcacctgcttgtttggaaggtgagccccgcgggcgcgcgcggacgttttagctgagaaagaggaaaataccttagtcacagaataaagtccagaaacgcgctctaggattgggtcctgccgtcacttttccttggtgcttctcccattcgttactaagttgacatagttgtgtttttttgttttgtaagtataaatttgatgctagtttgtatgtttaagtggttttaaaaatcaagccaattaaaaaaatcgatttgctaatgttgcggtaaagaaagatgtagatgatcttcatatgtcactggctgcaggcaggcgtctgaagacactgtgcgcccccgggtgcctccacagtgggcatccctggccactggggacacagagaatgaaggaaggaagccatacacttgtctcttggctccttgtggcaataggaaaatgggacagaaagtcttcctgcctggaattcgagaacgtttcctcttatattgctgtcctgtttggtggtggtaataaccctgtccctgtataacaggtatagttgctgacagtgccccatcagcctctgacatgtgtcccactagaggcctgagaaggggggtcatttcccgtgtggtcatttcccagaccacacgggattcaggcctcaccctgtcctcccaaccccatcccggcctcaccctgtcctcccaaccccatcccctaccttgttcctcccgcctaaggcattccaagcctttgttcaccttggtacttcttacacacttggaagtttacaatgggaaagttctccccttcctcaagcttgtgtgatttccatcattcaggcatcaggtgaaatgtcacctctgaggaagccttgcatgaaaacttgtatttccaaccccacagcttcaggggtgagttgtgggtttgtctcccactaggctgagctccccaaaggcaaagactgtcttgttactaatcacgtgtgtagggccagggatggtgtctggcatagggggtgtgatcaatacctagcattctggcaagggtcagtagaaacatgggctggagccatggatttgcaatctcttgagaacagtggttctcacaggagggtcatctaaccttccaggattcatttgaatttccatgtcacaatataggacaggggcatgcgctgtcatcgcggaggagaggtcagggtgggcatcctaccaggctcagggcagcccccacaatacagaagcatctggcccaagatgtcaacagtgccaaagctcagaaacacccatctatagtcgtcctcctgccaaacaaattctcagttgtaagggatagtctttcctttgctctgatgtcctgttaccttaaaatcaaattattttattggggttaaggaagcttttcactttccatagatacctttctcttgaaaaggaaaaatataaacatttcatctccagtggcagtccttttgcttttttatacagtactccttgaatatatcttcatgcaagattttataatttagaaataattcctaagtgtttggtcacatgacctgggtaggaagagagattcttagactccaaaggttcagatggagaacagacaggccattgcatagtttattcaaatttttaagatcacaggctagaacaggaacactgaagactccaagaacctactaacaaactcttctgattattagtttgtataggtttaggaattgtctcttctgctactttgccatggtgttagctttctgtggaaaaacaagttgaatttagattttttttttgtgtcgcttgcaaattagtatttttattgtttagagacttgaatctgtcagtaaattcagtgtagttttaaaacaacaatgaaaagcttacccataatgagcatttactatgtgctaggcaaattagtgacatgtacaaccatttaattgaacatcacatgatgtaggttctaatgtaatttctttattgtatatgaagaaactgatgcacagaagtgctagcatcaaataagcacatttggggatgattaaacctctaaacatatttaacattacaaacaaacgtttttgaaaaagcacagagtattaaaaatagtcattatccaaaattgatgtaagtattcctttgtgtcttttaagtatagcttttcatataaaaggtaattcgatttgtgttctagtgttttcccttgtttttacatactctctgttttaaagatctaatagttacatgtttaatacttccaaaagttctttgcaaaatgcaagatcgtttacattgcccattttgtttgttactcctttatgtcatatttacagatcaaacattctagtcaaattgtgttttattttgggaaattgaggtaatcttttaaaaagttgcagcaaccaaaaaaaccttcttcttttgcatgaaggggtattgaatgtgacatccgtatccagcttcctgttgtgtcaaaacaacattgcaaaattgaaatccatgagcaggaggtgagtgggttttttgaagatctacttttaaagctttttagttcacttttaatctgttcattagttacatatttccccttcttttcacttgcaggcaatattacataatttcagttccacaaatccaacacaagtaaatgggtctgttattgatgagcctgtacggctaaaacatggagatgtaataactattattgatcgttccttcaggtaggtaaaagctgattggtctaacagtaaatgtcatcttctgattaaccataaactagtgtcaaagtcaactgtcattcttctttaatgttcatggatgtcaaagtatttcaggttttcattctcaacactaatcttaatttaaaaggatatggatctaggaagatgactaattgggacaaaatgtgatggaattcaaggatttgggtgcaaataattatgcagagggaggttgaccttgtcctaaaggagtttgttattttcttccaagtgttttgaaactgcatgagatttttctattcttttttattttaaagcaaaatatacacagagaaaaaggtacaaaacaagatggacaggtcaatttatcatgtgaacacccttttgatcaccacctattatggactgatttgtgctctcccgaaattcatattttgaattcctaacccctcgtaccttaggatgtaactgtatttggaaagagggcatttaaaaaggcaatgaaggctttttgagctattagtatgggccctaatctgatgattggtgtcattataagtggagattagggaacacgtgcacagaggaaagcccatgagaagaggcagcaagaaggcagccatcttcaagtcaaggagagaggcacagagaaatccaatccagctgacaccttgctcttggacttccagcctccagcactgagaagggcatgtctgtttttcaaggcattcagtctgtgggactttattatggtggccctagcagactaatacatcctcagctcatatagaacatttccagaagctttttaaaaatgctgttgtctaatcactacttcattccctcagcaagtaaaccaccgttttggcttttaggatatcataaacgtctcgagtttcactacctaagcatggatctctgaacacgatagttttgtctgttcttataaaagtccttaacagtgatacaagaatgtatacatttgtgcctggcttgtgcttttctgtgtgtgagattcatagcatgttggacatctctgtagtttgttccttctcatggcataagtatttcactgaaaaaaaaatgtttaatatatacaataatatacataactatacagaattcattcattcttgatggacatttgactaatgtctagtctttgaaatgtgtcaaggtttgctttatgagcagatatggctaattatcttactaatctgccttgtgtaattgaaaactgtattctacagtgtctcatatatatgtaatatataattattatatatatcacttatataatatataattataatatattatatataatcatatataattataatataatatataatattatatagtatatactatatgttatatagtaatatataatataataatatatattatatataccatatagtatatactgtatacagtatatactatatggtatatataatacatatacaatatatatacaatatatttatattatataatatataatatatacatatataatatgtaatatatatacacatatacagatacacacactcccgttagattcaaatctataatcttagtaaattttcccctactattattctaagagatatgttcaaatcacctactgaggattgattgattgatttgtttttatctctatcagtttttgctttgtatattttgaggctgtactatggtgtacaaacttagaatgatgtcttggtgcatggaactctgtcatttagagatgtcctctgtttttagtagtgctttcttttctgcttaatgtttcctttggatgatgagtatggttaaactaatttccttttgatgagtgcttgtgtagtataacttttccacccccttaattttaacttttcataattgttatggtttaagttgtctcttggaacctgttgtcaggtgacctcttgtgtttaactggaatatcttcttgctggattgatccttatataaaatgtcctttttctctatgaataacttttgtctgagatgattttgtctcatgttagtacagtactccagttcccctctgcttgctgtttgcatggtatatcttttcccatgcttttattttaaaagattgtgtctttgaatcaaaattgcgtctcttgtagacaacgtattagttgggtcatttaaaaatccattctgctaaatgaatctctgttattgtcttcatttgtattagctgttttttaatgcaccacttaaattccctagtcatttcttttactgtgcttctgggaagtttgccttcatttttaaagagtatttttattgaatacagacttctatgtaggaagtttttctttttttctttttctttttgtttgtttgtttgtttgtttttgagacagagtcttgctctgtcacccaggctggagtgcagtggtgtgatcttggctcactgcaacctccgcctcccgggttcaagtgattctcatgcctcagcctaccaagtagctgggattacaggcacgcgccacaacacccggctaatttttgcaatttttagtagagacggcgtttcaccatgatggccaggctggtcttgaactcttggtctcaagtgatccacctgcttcagcctcccaaaatgctgagattacaggcatgagccactgcgcccggcctataggtaggaagcttttgatgtttattggagggctgaactatttttcaaaacaagatattatccaaattgagataaattcagatgattaaagacatccaacaaagatttgaaagtgaatcttagaaagagagacttgattccaaactctctaccatgagaaataatatcagatgtgtgactgcttcagatcttacttaggttgcctataaattcaaatcaggtcatttcactgaggccaaaagttttcattatgcaaaataaaggattgcttctatgacttgatcactgaggtttgccaggacaattatgtatcttgctaaaggtgatcttcttaagatgtacctgtcttgttcagatacagactgaatgtgtgggaaactgaagtgatcatagtgttctaaaatataggtttgtagttaccctgtagtgtaagtgtagctttttatttaccctgaagtatgtaacttcacaacgtgagaaagattcagttacctacaggcttcctggctggccttccaagccatccgatgatttccatggacttaaactagaagaaacttgactttgctctcatgtgcattagcttatgtcatagaaggtgcttggtaatattgtcaaatcatacctgggctgttcgtcagtgatcagaagttaatctgggtccccagcctctgacagtggtatttcaaaacaaactcgatgcaactaatcctagtttttagtgtaaaagcacttttctaactctaaatttatttctttgtataaggtgatgtcttgaactaaacccaaagtttgttcgttgatccttggacattaagtggatatggagacttccgccccagggtataaatttttaatcaggatctttgtcgttctataaactgcaggtatgaaaatgaaagtcttcagaatggaaggaagtcaactgaatttccaagaaaaatacgtgaacaggtgatagaaaatatccaagtttgggctgattcgtttcgatgatatgaaatcatttatgtatgctttaatgatttcttacttgaaatcagttacaaagagggtggttactgttatagtaggaaaatgtaactaaagtataaaaacgagttgaacttagacgtattaaaataatctaaaatgatatttcctctttattgttcaaaatcagagcactaagttggtcttacacttttagccaaaaagtctattagagcatgttgcgagctttttgcaaacccatgattaggataaccccaacacgtagagctaacatttgggaattgcattatctggtggctcattttgtcgcccagtcattgtactcatccgtctttatgtgtctgaaataatcacattatgaaaatcatgagtgccaaagatgcttctctattttgatagatagacgacccatgaaacaggaaaagggatcctgtgctttgtcttgtgagagaatcctatagtttgagtgtatcagtgtggaacaggtattccaattgtacagcttatgaaaacataattgtcgacacgtgcttcgcaatttagatagtttgagtatatcagtgtggaagaggtattttagttgtacagcttattaaaacacagttgtcggcatgtgcttggaaatttagtgggatttaggcttaggatgagccctgagaattcatatttttcctacattttagagtgctcctaaagctagtttcagatgagctccttggaatatcttggcttaggagagttatcttaggtgcacctgaaattagcagtaggtactcttgaatttcaacatttctgcctttttttttttttttttttctgagacggagtctcactccgtcacccaggctggagtgcagtggtgcgatcttggctcactgcaacctccgcctcctgggttcaagcaattctcctgcctcagcctcccgagtagctgggactacaggtgcacaccaccatgcctggctaatttttgtatttttagtagagacagggtttcaccatattgaccaggctggtcttgaactcctaacctcgtgatccacccacctgggcctcccaaagtgctgggattacaggcttgagccaccatgcccagtccatttctgccatttaagtactgccttcttccctagaggagcagccttaatgttgaatctgatggtcatcagttcccgtgctggaagccagtttctgaggcatcccacactgtagccaccaggcaacttgctagtctatgggagtaaataaaccaaaaagccagttgaactgtgggttagatatgtgccactcagcagtctaggaactgtttgttctgttactggtctgtgatatagtgagtactgaaatggagtatgtagtaaatatgacagcaattcgacagcaattttgtggctattgaatgtaatcgtacaacaaaagtgagattatatactttacatattcataattttattagtggttcatttatattgtttagtcataagattcttgttccacttcagattggaaataaaaaaccatccctcacatagatagttttagaagcaaggtgttacgtatcaagaaacctaaaattgattaaggaagttagattctttgcctttgttaatattttttagatattttcttaataatccagatgataagcttttcttcctttggggcatcagacttttataaaagttatatatatatgttattctttagttcttccacccttccggaaataattccatatgaaggaaagttagggcgctgtctctggggagccaggtgggggcgctgcgcctgctcccaggctgtgaggttgcagaatctgtgaatataccatgtgtgcctgtaccatgaatttacctagggtgaatctaggctctcagatccaccctaagtatccaccagccaagagggcgcacatgccaagtggagcctcagttcatcgacaggtcctatggcccatttatgagaaaactgatgacgcagtcagtagttctgagctcgtggggggttacagatcttcagtataggtgatgtttaatattgactttggttcttccgcaataggatgttgggaaatatctttaaaggaagttataaaaacacaccgaggtttgattttagtaattttaagcctcgaatttgtttcctattaatcactcactattttttaatgagtcagctaataagtacttttatcctgaccactagctcccaactgacttgagctcatttctcaaacagtctttaaaagtcatatacgagtggtttggtaaagaaaacaattttttattgtttttatttttattttttgagacagagtctcgctttattgcccaggctagagtgcagtggtgcaatctctgctcactgcaacctctgcctcccgggttccagcaattctcctgcctcggccacctgagtagctgggactacaggcacctgccaccacatccagctaatgtttgtatttgcagtagagatgaggttacatcatgttggccaggctgttctcaaactcctgacctcaagtgatccgcccaccttggcctcccaaagtgctgggattacaggcatgagccatcatgcccagccagaaaacaataaataatattttcactgttgtgactgtcatcatttagaaagacctgcaaataactgttcttattttcccaacttacaggagccagcacgtcgtgtctcaagatctagcttctcttctgaccctggtgagtagtggttgggttttgttccagaatcctgaaagatcaggtctttgcgaagcatattggcaaagaaggggcaacaagaatgcaagtgctaaatgtctagcctgtcagaaatggaggaggtgtcatttaacatgtcaacgacagacagatgcctaactttcccttggtgactgatggtatgctatgcttaggagagactctagatatgagaaaattgcctgttcagctgtcaactcagttctcagtagttagatagcatgtgctatttcatactggttattggagctgatatgatttatatatttgtatcataatactagtatcataagacttgcaagttttaggcattaaataatttgtaggccaagtaaaagctagcttataagacaacctgaaacaattaaaatattgaattccacaaatgttaatcattgagaaaatgctgaacttctgtttcttatttcataattcattgccaagatgagaaagctcaagattccaaggcctattcaaaaatcactgaaggaaaagtttcaggaaatcctcaggtacatatcaagaatgtcaaagaagacagtaccgcagatgactcaaaagacagtgttgctcagggaacaactaatgttcattcctcagaacatgctggacgtaatggcagaaatgcagctgatcccatttctggggattttaaagaaatttccagcgttaaattagtgagccgttatggagaattgaagtctgttcccactacacaatgtcttgacaatagcaaaaaaaatgaatctcccttttggaagctttatgagtcagtgaagaaagagttggatgtaaaatcacaaaaagaaaatgtcctacagtattgtagaaaatctggattacaaactgattacgcaacagagaaagaaagtgctgatggtttacagggggagacccaactgttggtctcgcgtaagtcaagaccaaaatctggtgggagcggccacgctgtggcagagcctgcttcacctgaacaagagcttgaccagaacaaggggaagggaagagacgtggagtctgttcagactcccagcaaggctgtgggcgccagctttcctctctatgagccggctaaaatgaagacccctgtacaatattcacagcaacaaaattctccacaaaaacataagaacaaagacctgtatactactggtagaagagaatctgtgaatctgggtaaaagtgaaggcttcaaggctggtgataaaactcttactcccaggaagctttcaactagaaatcgaacaccagctaaagttgaagatgcagctgactctgccactaagccagaaaatctctcttccaaaaccagaggaagtattcctacagatgtggaagttctgcctacggaaactgaaattcacaatgagccatttttaactctgtggctcactcaagttgagaggaagatccaaaaggattccctcagcaagcctgagaaattgggcactacagctggacagatgtgctctgggttacctggtcttagttcagttgatatcaacaactttggtgattccattagtaagtttatttaattgtaaatttatttttctaaaagatgaacaccttctatgtagctgtgagaccttcattctttcagtagtgattagctttgtggaagagaatgtaagcacataaggcacagggataagacagacacgcacgctgttttcgctaatagatgaatactgaaggcctaggtaattgtaacaaggaatgacagaagagatggaagttgtcaggcaatcatgaagcaggggttattgaaggagatagggtggccccaaaaatatttgattctcctccatctatcacaaaatagaaaagagaataatcataattgcttttcacatggagtttaattctgaactacaatcaactgtatcatatgagtttggtcatgtggaataaatcactggtaatcattaaacatagcggtagttctcaggtgttgatactctgttttcagagtgtcctacaaacaatttgctgtaaacactggactgtacccatgagtccatatgccacatgaacacttgatccttggtgcaatagcagtgcccgtggctaggttgtctttttagagctatgtcacacatgaggaaacgcacaacccaaggccagtcaggaagtggcagaggtaggacctttatagcaggtgtggtagctcctcgggagcttcctacactcctagggactggctattagaagaaaagttgtctgggccacagacgcagtattcgtactccaggctgtgtttctgcaggtggcctatagcggtggggcatgaggctgtcgataaaataaggtttgtaacatcagtctcagtattccaccaagcttcctagtggggaagcatcacttaggcaagggatttacattaactggtggctcaggaaaatgtgtggccgggactgggctcctgtgaattgactcagaaccacctggaggagtttttacagctcatgcattctggtcactgggtggctcaggctgagacccaagtgcatgtctttagagagttctctggctgtcgtccccctactctaaggtgaaatctgctgctgcagactcctcctttctatgtccacacataatgtttcaatgttttaaagaaagcctctgtactgtccagtggcaacttgacgtcttagtggccactcccgcaatcctttaggaactcttagtagcttagcttcaccaggattgcaagaatagaggcgtgctgtaggtactgtgtttcgatgacttttcacttggtttgtctttaatgctaacgtgaaataaatcactagtcttggtatgttttttcattgctctttccacatttgtatccgttactttagatgagagtgagggaatacctttgaaaagaaggcgtgtgtcctttggtgggcacctaagacctgaactatttgatgaaaacttgcctcctaatacgcctctcaaaaggggagaagccccaaccaaaagaaagtctctggtaatgcacactccacctgtcctgaagaaaatcatcaaggtgagttgaacaagcagcatcccattcacgcccagtggctcacacaccgggtacctattcctttccaaatactgacacaagtagaattatgatgaagacctttatttatttattaaagaaacaagtttttaaaaagacgaatgaaagctcattgatgtgggcaccagcaaaggagcccctgggtccctgaccgtggtgctgatgcgaccgagtcgggggagtccttgatgttgtccttttcgtgcagaagttcccagacacccacgcttacagcactgcgtaatcacctgcaggcaccgtcagaatagccaattacaaagattctggatacattaccacgtcgacccataaggattgttttattttcttttagagttacaaggctatagttaaggcatttacctggtgtgaaggaaaatcaatggcacatcttccttttacaccttcagctctttagaatatttgcttgcctgttcctttgctgtgttgtccttcctgggtttcacacctctgggaagtcatggccctatagctcataacctttgtaatagggcctgggcggtctttctttccttctcttcccagcaggagtggaaagtgatgtctggctccctttccattttacactggctcccaggggcaagcagtcctccctccatgtggactgccgggggctgggtgctcacagctggtatttactgggactgagatcagaccctgcttgtctttcactgatcaggatgttccttccacctttttacctgaaatgacctcacttcagacttggcttgcttctctttccttttccttaaatgactgagacagtctcacctctaccatagtcttcaaagacagtggcttaagcatttgatgcttcaagatttaaacagctgaaattcttaactgaataggtttttatcagtcattccagagatgttagatccttgttaaggcttcttgtaaacaattttgtcttgtcaggaacagcctcaaccatcaggaaaacaagagtcaggttcagaaatccatgtggaagtgaaggcacaaagcttggttataagccctccagctcctagtcctaggaaaactccagttgccagtgatcaacgccgtaggtcctgcaaaacagcccctgcttccagcagcaaatctcagacagaggttcctaagagaggagggagaaagagtggcaacctgccttcaaagagagtgtctatcagccgaagtcaacatgatattttacagatgatatgttccaaaagaagaagtggtgcttcggaagcaaatctgattggttagtctgacattagaatacatatattaaggtgaattttttcatgaatgctaatttttgaaaagtttcgtcttttccctttgacagttgcaaaatcatgggcagatgtagtaaaacttggtgcaaaacaaacacaaactaaagtcataaaacatggtcctcaaaggtcaatgaacaaaaggcaaagaagacctgctactccaaaggtaggggcctcactgaatggctgctttacacataccggtgtcatcgaagcttgcattcagtgtggatttatgctttaatgtcctgtttacctccttcctgttttctacagaagcctgtgggcgaagttcacagtcaatttagtacaggccacgcaaactctccttgtaccataataatagggaaagctcatactgaaaaagtacatgtgcctgctcgaccctacagagtgctcaacaacttcatttccaaccaaaaaatggactttaaggaagatctttcaggtaaaaacgtagtcttagatcttataaatcttttgactctactgttttttactgtgttaatgtttgttttgctaactttgtttatctgctgtgaaagagattataaaataaacgactcaatcacccttctggggtcttagtgttcagggaagataaagctgttttggcttgcaaagacaagtctctgctaatttttgggatcacatgtcctgcatgaaataggtgtggaaatgtcaaatgcatgtctttaccctggagagcagcgtatacatagaaagctggaaggtgctttacagtgaagagagttaacttgttaatctgcaggtacaataatagtttatcccaggtgtgggccagttgttgttgagcaacattttgcttcttcaggattgactttctaggtagcttaactttcttgaaagaaagccctatgagaagattcccataaacgattgttgaagaaatatttccattcaattcccactctcagtaaattgtggcctgacttgtgtaatttaaagtggggatggccggcgcagtggctcacgcctgtaatcccaacactttgggaggctgaggcctcctatcattccaaacagaatgataatgatattagattttcaaaaatatatattattacttgacagtactaaaaatgggcagctctttgtcattttctaaaatgtgggtacgtgttatttgtacttaaaatctagaactgagcacccaagactttgagaagcatgaaggcatttggcctctagatcctagcagggaggcctatgggtctcaggagcccgtcaccagcctccgtgctccagagctcacgtgtggggtcttgttaggaggacccagaggtcagctaacttcatttgtttcctttccaagaaaagcaaagcgaagagcataacatatcttctctgtgctctcttttttacaaaatgagtacattattaatggaatcactctttttatgaggcctatgtaccaggatttcaagggaggaatctactgttatttcccaccatttgcacgttacatgtgagggctgggatggttgtctgcatgttagcaatatgtcaatcacttttcaaatattttcatttaacaggaatagctgaaatgttcaagaccccagtgaaggagcaaccgcagttgacaagcacatgtcacatcgctatttcaaattcagagaatttgcttggaaaacagtttcaaggaactgattcaggagaagaacctctgctccccacctcagagagttttggttggtttccttgtttcctaacactgtgatgttttgggataggaacatacagtattatttttttacaagcagtatgatattacttctctaaaacaaatgttcctggcacaaaataccatttccgtcttctctgttctaattgaaagggagatttcaatcagcagttgaactaacattggcattcattgacttatatagaaagaaagactccgttaatgtgtgtaaatgacctgtgtacacttttggcttctttattgtaagtaaccagggtgacatagcaaaaaaatacaatggtgtctcaccatatttacatataaattactcatattcaaaattactgccaattacaaaacagaaagataacagtttgtatactgtgcaattattcctgctaaccttttaggtgggagcaggcccggggtaagtgtgagatgggagatgagaatctgtctaatctctcatttggcactggtcactgtattcctgtcacagagggaacagcttgctaccctgaagatgtttgcggtaggtaaatatttcctgtgtaatatggaccctaaccacataaggataatccatgttattttattggcgatttaaggcaagaaacagctgtttgtttctaatgtttgaaggaaaaaatgcctatatttacgtcaatgacacagggcatggcaacctttggaggaaccttctgaagcagtatttttaccttctatgatcatttcagcatctaactttgcttaatgatgaccccactatagcaccaaataacattattcttaattgtgcatggctcttataagacagatttatagacacataagtagcctcatgtcgttcagtgaatacgaagctaaatatttagttttttaccatattttatgaggctgtaatactcgattgacatgagacactaatagaatgtttttattgtgtatgtttttatttcaggaggaaatgtgttcttcagtgcacagaatgcagcaaaacagccatctgataaatgctctgcaagccctcccttaagacggcagtgtattagagaaaatggaaacgtagcaaaaacgcccaggaacacctacaaaatgacttctctggagacaaaaacttcagatactgagacagagccttcaaaaacagtatccactgcaaacaggtcaggaaggtctacagagttcaggaatatacagaagctacctgtggaaagtaagagtgaagaaacaaatacagaaattgttgagtgcatcctaaaaagaggtcagaaggcaacactactacaacaaaggagagaaggagagatgaaggaaatagaaagaccttttgagacatataaggaaaatattgaattaaaagaaaacgatgaaaagatgaaagcaatgaagagatcaagaacttgggggcagaaatgtgcaccaatgtctgacctgacagacctcaagagcttgcctgatacagaactcatgaaagacacggcacgtggccagaatctcctccaaacccaagatcatgccaaggcaccaaagagtgagaaaggcaaaatcactaaaatgccctgccagtcattacaaccagaaccaataaacaccccaacacacacaaaacaacagttgaaggcatccctggggaaagtaggtgtgaaagaagagctcctagcagtcggcaagttcacacggacgtcaggggagaccacgcacacgcacagagagccagcaggagatggcaagagcatcagaacgtttaaggagtctccaaagcagatcctggacccagcagcccgtgtaactggaatgaagaagtggccaagaacgcctaaggaagaggcccagtcactagaagacctggctggcttcaaagagctcttccagacaccaggtccctctgaggaatcaatgactgatgagaaaactaccaaaatagcctgcaaatctccaccaccagaatcagtggacactccaacaagcacaaagcaatggcctaagagaagtctcaggaaagcagatgtagaggaagaattcttagcactcaggaaactaacaccatcagcagggaaagccatgcttacgcccaaaccagcaggaggtgatgagaaagacattaaagcatttatgggaactccagtgcagaaactggacctggcaggaactttacctggcagcaaaagacagctacagactcctaaggaaaaggcccaggctctagaagacctggctggctttaaagagctcttccagactcctggtcacaccgaggaattagtggctgctggtaaaaccactaaaataccctgcgactctccacagtcagacccagtggacaccccaacaagcacaaagcaacgacccaagagaagtatcaggaaagcagatgtagagggagaactcttagcgtgcaggaatctaatgccatcagcaggcaaagccatgcacacgcctaaaccatcagtaggtgaagagaaagacatcatcatatttgtgggaactccagtgcagaaactggacctgacagagaacttaaccggcagcaagagacggccacaaactcctaaggaagaggcccaggctctggaagacctgactggctttaaagagctcttccagacccctggtcatactgaagaagcagtggctgctggcaaaactactaaaatgccctgcgaatcttctccaccagaatcagcagacaccccaacaagcacaagaaggcagcccaagacacctttggagaaaagggacgtacagaaggagctctcagccctgaagaagctcacacagacatcaggggaaaccacacacacagataaagtaccaggaggtgaggataaaagcatcaacgcgtttagggaaactgcaaaacagaaactggacccagcagcaagtgtaactggtagcaagaggcacccaaaaactaaggaaaaggcccaacccctagaagacctggctggcttgaaagagctcttccagacaccagtatgcactgacaagcccacgactcacgagaaaactaccaaaatagcctgcagatcacaaccagacccagtggacacaccaacaagctccaagccacagtccaagagaagtctcaggaaagtggacgtagaagaagaattcttcgcactcaggaaacgaacaccatcagcaggcaaagccatgcacacacccaaaccagcagtaagtggtgagaaaaacatctacgcatttatgggaactccagtgcagaaactggacctgacagagaacttaactggcagcaagagacggctacaaactcctaaggaaaaggcccaggctctagaagacctggctggctttaaagagctcttccagacacgaggtcacactgaggaatcaatgactaacgataaaactgccaaagtagcctgcaaatcttcacaaccagacccagacaaaaacccagcaagctccaagcgacggctcaagacatccctggggaaagtgggcgtgaaagaagagctcctagcagttggcaagctcacacagacatcaggagagactacacacacacacacagagccaacaggagatggtaagagcatgaaagcatttatggagtctccaaagcagatcttagactcagcagcaagtctaactggcagcaagaggcagctgagaactcctaagggaaagtctgaagtccctgaagacctggccggcttcatcgagctcttccagacaccaagtcacactaaggaatcaatgactaacgaaaaaactaccaaagtatcctacagagcttcacagccagacctagtggacaccccaacaagctccaagccacagcccaagagaagtctcaggaaagcagacactgaagaagaatttttagcatttaggaaacaaacgccatcagcaggcaaagccatgcacacacccaaaccagcagtaggtgaagagaaagacatcaacacgtttttgggaactccagtgcagaaactggaccagccaggaaatttacctggcagcaatagacggctacaaactcgtaaggaaaaggcccaggctctagaagaactgactggcttcagagagcttttccagacaccatgcactgataaccccacgactgatgagaaaactaccaaaaaaatactctgcaaatctccgcaatcagacccagcggacaccccaacaaacacaaagcaacggcccaagagaagcctcaagaaagcagacgtagaggaagaatttttagcattcaggaaactaacaccatcagcaggcaaagccatgcacacgcctaaagcagcagtaggtgaagagaaagacatcaacacatttgtggggactccagtggagaaactggacctgctaggaaatttacctggcagcaagagacggccacaaactcctaaagaaaaggccaaggctctagaagatctggctggcttcaaagagctcttccagacaccaggtcacactgaggaatcaatgaccgatgacaaaatcacagaagtatcctgcaaatctccacaaccagacccagtcaaaaccccaacaagctccaagcaacgactcaagatatccttggggaaagtaggtgtgaaagaagaggtcctaccagtcggcaagctcacacagacgtcagggaagaccacacagacacacagagagacagcaggagatggaaagagcatcaaagcgtttaaggaatctgcaaagcagatgctggacccagcaaactatggaactgggatggagaggtggccaagaacacctaaggaagaggcccaatcactagaagacctggccggcttcaaagagctcttccagacaccagaccacactgaggaatcaacaactgatgacaaaactaccaaaatagcctgcaaatctccaccaccagaatcaatggacactccaacaagcacaaggaggcggcccaaaacacctttggggaaaagggatatagtggaagagctctcagccctgaagcagctcacacagaccacacacacagacaaagtaccaggagatgaggataaaggcatcaacgtgttcagggaaactgcaaaacagaaactggacccagcagcaagtgtaactggtagcaagaggcagccaagaactcctaagggaaaagcccaacccctagaagacttggctggcttgaaagagctcttccagacaccaatatgcactgacaagcccacgactcatgagaaaactaccaaaatagcctgcagatctccacaaccagacccagtgggtaccccaacaatcttcaagccacagtccaagagaagtctcaggaaagcagacgtagaggaagaatccttagcactcaggaaacgaacaccatcagtagggaaagctatggacacacccaaaccagcaggaggtgatgagaaagacatgaaagcatttatgggaactccagtgcagaaattggacctgccaggaaatttacctggcagcaaaagatggccacaaactcctaaggaaaaggcccaggctctagaagacctggctggcttcaaagagctcttccagacaccaggcactgacaagcccacgactgatgagaaaactaccaaaatagcctgcaaatctccacaaccagacccagtggacaccccagcaagcacaaagcaacggcccaagagaaacctcaggaaagcagacgtagaggaagaatttttagcactcaggaaacgaacaccatcagcaggcaaagccatggacacaccaaaaccagcagtaagtgatgagaaaaatatcaacacatttgtggaaactccagtgcagaaactggacctgctaggaaatttacctggcagcaagagacagccacagactcctaaggaaaaggctgaggctctagaggacctggttggcttcaaagaactcttccagacaccaggtcacactgaggaatcaatgactgatgacaaaatcacagaagtatcctgtaaatctccacagccagagtcattcaaaacctcaagaagctccaagcaaaggctcaagatacccctggtgaaagtggacatgaaagaagagcccctagcagtcagcaagctcacacggacatcaggggagactacgcaaacacacacagagccaacaggagatagtaagagcatcaaagcgtttaaggagtctccaaagcagatcctggacccagcagcaagtgtaactggtagcaggaggcagctgagaactcgtaaggaaaaggcccgtgctctagaagacctggttgacttcaaagagctcttctcagcaccaggtcacactgaagagtcaatgactattgacaaaaacacaaaaattccctgcaaatctcccccaccagaactaacagacactgccacgagcacaaagagatgccccaagacacgtcccaggaaagaagtaaaagaggagctctcagcagttgagaggctcacgcaaacatcagggcaaagcacacacacacacaaagaaccagcaagcggtgatgagggcatcaaagtattgaagcaacgtgcaaagaagaaaccaaacccagtagaagaggaacccagcaggagaaggccaagagcacctaaggaaaaggcccaacccctggaagacctggccggcttcacagagctctctgaaacatcaggtcacactcaggaatcactgactgctggcaaagccactaaaataccctgcgaatctcccccactagaagtggtagacaccacagcaagcacaaagaggcatctcaggacacgtgtgcagaaggtacaagtaaaagaagagccttcagcagtcaagttcacacaaacatcaggggaaaccacggatgcagacaaagaaccagcaggtgaagataaaggcatcaaagcattgaaggaatctgcaaaacagacaccggctccagcagcaagtgtaactggcagcaggagacggccaagagcacccagggaaagtgcccaagccatagaagacctagctggcttcaaagacccagcagcaggtcacactgaagaatcaatgactgatgacaaaaccactaaaataccctgcaaatcatcaccagaactagaagacaccgcaacaagctcaaagagacggcccaggacacgtgcccagaaagtagaagtgaaggaggagctgttagcagttggcaagctcacacaaacctcaggggagaccacgcacaccgacaaagagccggtaggtgagggcaaaggcacgaaagcatttaagcaacctgcaaagcggaagctggacgcagaagatgtaattggcagcaggagacagccaagagcacctaaggaaaaggcccaacccctggaagatctggccagcttccaagagctctctcaaacaccaggccacactgaggaactggcaaatggtgctgctgatagctttacaagcgctccaaagcaaacacctgacagtggaaaacctctaaaaatatccagaagagttcttcgggcccctaaagtagaacccgtgggagacgtggtaagcaccagagaccctgtaaaatcacaaagcaaaagcaacacttccctgcccccactgcccttcaagaggggaggtggcaaagatggaagcgtcacgggaaccaagaggctgcgctgcatgccagcaccagaggaaattgtggaggagctgccagccagcaagaagcagagggttgctcccagggcaagaggcaaatcatccgaacccgtggtcatcatgaagagaagtttgaggacttctgcaaaaagaattgaacctgcggaagagctgaacagcaacgacatgaaaaccaacaaagaggaacacaaattacaagactcggtccctgaaaataaggtgagaggaagtattacagcatcactcaatatcgtcttggatagttgtgaatttctgtgttatactttgcatgtaacctgacgttataagtggttatcctttccccagagggtttcctttaacactgaataactgcaggccatggtaaagaatcttcttgggacctatagagggaatagactaatatgggaaaagaactagtcaaacatgattaatgcaaacttagaagagtttctcaaaagccaaatgagtaatgttcatcttcaaatgtttaaaaaattgatcagaggataggtgggtggttcagttctatgttctggatactgtcaccaagaccaggactgggttaaaaatcctatctatgtcactattttaactatcagaacaatatcaataaggaatgtgtattcttgagaaggggaaactgtctggactgttagatagagaggctcccactgcatgcagagaagtttggggaaactccagaaatggcaatttcctgttctgccttagcagtgatggttaaaggaataggaattcatttactccctgtaaatgaatgaataacggaccttctttctataatgtaaactgtaaaaattagatttgatatatatcttattaggcattgttattgaaatttatcctgaattccttatttataatttgtcagcagagacagtcatttctccataggagcaaagtaccaaggcattaccttgactatcctagatgacaagtctcttagacaattcatcagtgtgtgattttcaaatgatttctccttttaggttactgttgattgtgctccctgttgaattttgaagtttgttttactaattattggaattttgtggatgtcttctcatttctttagggaatatccctgcgctccagacgccaaaataagactgaggcagaacagcaaataactgaggtctttgtattagcagaaagaatagaaataaacagaaatgaaaagaagcccatgaagacctccccagagatggacattcagaatccagatgatggagcccggaaacccatacctagagacaaagtcactgagaacaaaaggtgcttgaggtctgctagacagaatgagagctcccagcctaaggtggcagaggagagcggagggcagaagagtgcgaaggttctcatgcagaatcagaaagggaaaggagaagcaggaaattcagactccatgtgcctgagatcaagaaagacaaaaagccagcctgcagcaagcactttggagagcaaatctgtgcagagagtaacgcggagtgtcaagaggtgtgcagaaaatccaaagaaggtaagccatttactgtttccctgttttaaaagacacagaatgttttgatgtattttttgcccaaggttgcaaaggcaaacaaaaagcattatcttcaacagcactctgccagctcccagttacattaatggaaggagcattatgctaagacataaatttggtcattttagttatattttgttgtgtctactttgggaatttcacttcaaatagcaaattcacgttatgaagactttcttcagaaagaaaaggaatttgtctagtggctaatttctgactgcttatgatgtacctcatgatacaattgtaggtagatgtcttcagcctttctgtagttcaaaatcacctcttgaaacaggaaaattctttttccaaaaaaaactattgaaacagaaaaatttccaaggcattctttggaaaggcagaaggaacagaagttgggatgtccctgagacacatgctcactatgtgagagttcctggtcagtgggggatgcgtctgccctccaaccctcctccagccagagactatctaagctaatgaactttaagtgctactgaaatcacatcaagttgagccactcataattacaagcatgtggacaaatccataagaatgattagattccattagtgttcttctggggaatacttggtttagctaaaataaaaataggttgaattgctccctttttgtgagcaattcacaaaaatataatataaatttaattcttagcacacacaaaatttggacctaaaactaccatattctgagttcagcaaacgaaactcatgtagcaataacctcttcagatacagaattctggcaagtacagctgtccagacagaccctcttcggcacaaactaggaagcttcaactgccaagaaaaggaaagattcccaggtgtccccagtacctgctgcatagccaggcagccagtggagggggagggcttgtgtgtctggatggtgggcaggaagtcctagtggggagatgcccatagactgttccagagagggaagaggagaggctcaagaagggcactgatgcccacacaggtgtcctaagtcagagactgtacttctggggcaggctggaagcagaagacacccgacagtgccagacaaggtcctagaaaccacaggcacaccagggacgcaacagctgacgtgggtcagcacgttcacccgtcgagtcttacaataaaacgcaggctccaggcgcttaccgaattcacagtctggaaggtgctgcttcctcagaatgaaaccaaagaagggtgaaagcgaatcttttaactaggatgattcctaaacacagagcaaccaggcccaaggctgagccaggcctggtgtgttctgccgggggcgttccagcctcttctcacacacaagcacccaggagacgcccaacacacacatgctcctctttgccgagctcttcggtgggtgtcggtagtcctagaaaatgcatatataagatagattttttccagtaagaagcttgtagccatgcttttcaccatggttcctctcccttagccaaggggtgagaactactgcaagagtaaaggccaaggcaggtctcctgcatgcaagttgggcatgcttctgtctacaggggttccttggtttaggagacccaaaagacttaatcctggttggattcactttttctgagtgacattttttagtttgtgaaaatgtgtgcatcgatgaagaaattttattatgaattagcttaaaaatgcattaggaacttctgtatgaaaagatcacattatttaagtgtaaaaaaactgcataataaaagcagttcaagtcaagaaaaacaatgttaatggaatatattttaaaacttatttccaacctcaaaattaattttctgcaactaaggacctgcataatacctagtaagcctttggggttttgcagaggaggtcgattctaaaaatgggtgtttaaattacttaagagttctattttttttcttcccacacaggctgaggacaatgtgtgtgtcaagaaaataagaaccagaagtcatagggacagtgaagatatttgacagaaaaatcgaactgggaaaaatataataaagttagttttgtgataagttctagtgcagtttttgtcataaattacaagtgaattctgtaagtaaggctgtcagtctgcttaagggaagaaaactttggatttgctgggtctgaatcggcttcataaactccactgggagcactgctgggctcctggactgagaatagttgaacaccgggggctttgtgaaggagtctgggccaaggtttgccctcagctttgcagaatgaagccttgaggtctgtcaccacccacagccaccctacagcagccttaactgtgacacttgccacactgtgtcgtcgtttgtttgcctatgtcctccagggcacggtggcaggaacaactatcctcgtctgtcccaacactgagcaggcactcggtaaacacgaatgaatggatgagcgcacggatgaatggagcttacaagatctgtctttccaatggccgggggcatttggtccccaaattaaggctattggacatctgcacaggacagtcctatttttgatgtcctttcctttctgaaaataaagttttgtgctttggagaatgactcgtgagcacatctttagggaccaagagtgactttctgtaaggagtgactcgtggcttgccttggtctcttgggaatacttttctaactagggttgctctcacctgagacattctccacccgcggaatctcagggtcccaggctgtgggccatcacgacctcaaactggctcctaatctccagctttcctgtcattgaaagcttcggaagtttactggctctgctcccgcctgttttctttctgactctatctggcagcccgatgccacccagtacaggaagtgacaccagtactctgtaaagcatcatcatccttggagagactgagcactcagcaccttcagccacgatttcaggatcgcttccttgtgagccgctgcctccgaaatctcctttgaagcccagacatctttctccagcttcagacttgtagatataactcgttcatcttcatttactttccactttgccccctgtcctctctgtgttccccaaatcagagaatagcccgccatcccccaggtcacctgtctggattcctccccattcacccaccttgccaggtgcaggtgaggatggtgcaccagacagggtagctgtcccccaaaatgtgccctgtgcgggcagtgccctgtctccacgtttgtttccccagtgtctggcggggagccaggtgacatcataaatacttgctgaatgaatgcagaaatcagcggtactgacttgtactatattggctgccatgatagggttctcacagcgtcatccatgatcgtaagggagaatgacattctgcttgagggagggaatagaaaggggcagggaggggacatctgagggcttcacagggctgcaaagggtacagggattgcaccagggcagaacaggggagggtgttcaaggaagagtggctcttagcagaggcactttggaaggtgtgaggcataaatgcttccttctacgtaggccaacctcaaaactttcagtaggaatgttgctatgatcaagttgttctaacactttagacttagtagtaattatgaacctcacatagaaaaatttcatccagccatatgcctgtggagtggaatattctgtttagtagaaaaatcctttagagttcagctctaaccagaaatcttgctgaagtatgtcagcaccttttctcaccctggtaagtacagtatttcaagagcacgctaagggtggttttcattttacagggctgttgatgatgggttaaaaatgttcatttaagggctacccccgtgtttaatagatgaacaccacttctacacaaccctccttggtactgggggagggagagatctgacaaatactgcccattcccctaggctgactggatttgagaacaaatacccacccatttccaccatggtatggtaacttctctgagcttcagtttccaagtgaatttccatgtaataggacattcccattaaatacaagctgtttttactttttcgcctcccagggcctgtgggatctggtcccccagcctctcttgggctttcttacactaactctgtacctaccatctcctgcctcccttaggcaggcacctccaaccaccacacactccctgctgttttccctgcctggaactttccctcctgccccaccaagatcatttcatccagtcctgagctcagcttaagggaggcttcttgcctgtgggttccctcacccccatgcctgtcctccaggctggggcaggttcttagtttgcctggaattgttctgtacctctttgtagcacgtagtgttgtggaaactaagccactaattgagtttctggctcccctcctggggttgtaagttttgttcattcatgagggccgactgcatttcctggttactctatcccagtgaccagccacaggagatgtccaataaagtatgtgatgaaatggtctta

SEQ ID NO: 66 - DNA, 32742 bp, Homo sapiens
  source 1..32742: mol_type = other DNA
tcggccccgcccccgcgccccggatatgctgggacagcccgcgcccctagaacgctttgcgtcccgacgcccgcaggtcctcgcggtgcgcaccgtttgcgacttggtgagtgtctgggtcgcctcgctcccggaagagtgcggagctctccctcgggacggtggcagcctcgagtggtcctgcaggcgccctcacttcgccgtcgggtgtggggccgccctgacccccacccatcccgggcgagctccaggtgcgccccaagtgcctcccaggtgttgcccagcctttccccgggcctggggttcctggactaggctgcgctgcagtgactgtggactggcgtgtggcgggggtcgtggcagcccctgccttacctctaggtgccagccccaggcccgggccccgggttcttcctacccttccatgctgccagctttccctccgccagctgctccaggaagcttccagaagcccctgcgcgggccttggcttgcagcaaccctttagcatacttaggcagagtcccatatttccttcctgctggaggccaagttctaggggccttctggttactatggctggtgtttgtgtacatcataccctaactgtattcatcaacacttagagtaagcaaggctcgctggagagccacacacactgggcaccgtaatgtcggttataacaccgcagaggagttctgaactatgtatttcgcactcctgggttcatcatctcctgaaatctcagggtggtgtttgctctcagttgcttcagctgagtagctggctttctgtcctggaaagcagactttgtacatgtgtgtgcaacctatgcctgctgagatcatcatcagacagggaagcggcttggtccagagagctgttctcagtagaatgttaagcacagagagctgagaattagactggttatttacatagacatccaaatagaaacctatagagtatctgttaagtcaggctctcccgtcatctcccccatccctgggcaggtgtctaggagatggttttgttattttcagggccctctcaatggctaaaacactctgggagatgaacaagattttaaaaacccaaagcttagcgcacctggtgggtgggggtgtgaaaactttgaaggaaaccgcgtcaagagcctggctgattgttaatatcacgttaactcagagggccaggatacttgcccagacccggagtctgcctgcaagtagcagaggagagctggccttgctctgccgcgtgtctttcttcctgggccctctgtctcgggttggaatttgaatagtggagtagtgtctgccacagtcaggggcctggatgaagtagaccaccagtacggagctatactcaggtacttttcaatgtatatatcttcattaaaaaaaaaaaatctgggccaggcacagtgggtcacgcctgtaatctcagcactttgggaggccgaggtgggtggatcacctgaagtcaggagtttgagaccagcctggccaacatggtgaaacccagtttctactaaaaacacaaaaattatccaggcgtggtggtgcatgctggtaatcccagttacttgggagactgaggcaggagaattgcttgaacctgggaggcggaggttgcagtgagccgagattgcgccattgcactccaacctgggcgacgagagtgaaactgtcctgaaggggaaacaaaaaaatctgtatcaaaataaggatttaactaatagtattaggcactactttaaaaaggctttgctgttagtaaggttgaaagaaatagagccctaggtatacattgggtagcaccttgttcagctgctcagattcttgaaccttgttgaggtcttactttgatatcacctgggccttacttttcgttgtttgggtttcctccccaggtgtctcaatcagggcctcctctgtccttttgcagggaagaagggggtaggaagggcctgaaaaagaacttgccttccccattgccccctcagagtttgttcctctccagtcctcttcccaccctttcttaggacaccaaaaccctgactctttcagtattttataataaaataaagttactaaattgtctgttctgttttgcagaggacacacatttaggagccagtgattcagaccttccatttttctttttggtgctaatgctcttttcagtatattctctttgatagaaaaaaaatggaggcaaaactgaattttctgcattatcttttcctttagcattattcttgtttctgcacttcattctgacccccttccccagcataaagttccatgtccagatccacttgccctgagatttttgacttccgtttgggactctagtccctccaggggacacattgagcctcccagaccctgcagggccctgtgctcattcggctcttgggctgttgctacggtccttcctgaccctctgtttcctgggacaagtagtttttaatgcagctactttctgaaagagctggggtcttaccgcagaatattattttattatttttagagacaaggtcttggtctttcgcccaggctggagtgcagtggtgagatcatagctccctgcagcctcaagctcctgggctcaagcgaacctcctgctttgacctcccaagtaccagggactacaggtgtgcgccaccatacctggctaattgttgttgttgttgtttttagaggccagggtctccgtatgttgcctagggtggtctcgaactcctggactcaagtgatcttccctcctaggcctcccaaagtgctggaattataggcatgagccaccatgcctggcctcgcaggatattatttaaacgaaacctgaaggatttaaaatcagagaagacacataaaccatcacctgactgtggggtgagagtggtctttatatagacactcatgatgcacaagccagcccttcgccccactcttgttttgaagtgaaaggatttatatgggagggaggaggtttgagctgtgcaggagggtccttggttggcatgaggattttgtgaacctacgctgttagctctgcaggcctgtcttggacataggtaagtagaagttggagaccttgtgttgtggaccaaatgttgcaagatgtgtgttctgtggcttttcattaactgctgcatatctgctggttggtggacatagtctagttttcttttgacttaaaaaaattaacagtacagcttatatcggagggctgcatagtttgggggaaactaatgaatatagtatggaatgtaatgaatgactgacttcttcatagagctattgaagtgatttatgaagaggaagaaatcatttttgtgactttgttgatctttgaagtattagagtggctttggcaggtgtggatcacccggaaaggaatcaaacactgagtcctgccaaggtgctcggtcccggcagcaaagccagtcctcagcagcctgcgctcccgaagctcctccagctaagtaactgaataggccgccctgggagctgcccatgcggatgctctgaatggtgaaacttggttttgacaccacaagttgttttcagttaaatcagtggctcagcagcagagcagggttctccaaggaggcctcgtgtccccttcaccccacctggaggtagctgttctaaaaccagtaaaaaattctacaaaaacattttcttagggttgttaaattagtcatagtgtgtgtaaccatgaaaggaatggtgagagtgcaataaatgcctggtgtgttcactctcctactcctaaaagtttcttggtagaataatttcctacctgtgatgcttgcgaagtcagcagaggctcccacccagccctgccgcccattcccagaagtctgggctgggggacaccgaatggatagtccaccagcggcgtggcttgtgaaaggaggtacttgttaaatctatgtgtttttattatagacatcgttctgccagtcgcaataatgtgtttatggacatttttctgcaagcacagcgcgggtggcagtttttactgacaaattgagtcatatgcatagaggtttagaaagcgcttgccttattgacggatcaggcaattctggcacgggatgttcagagatatttaggtgggtgaagagagtgaatgaatctcagggcagagaaggagatggggcattatatgttgaaatgcaataaataatcgctagttatttatcatttgtttttaaacttttagctacattgtacttcccagtcaagaggactccggtgggcagccggggatatcatgttcaggtgtctctcctgcttgtgtggggtaagagccactactggaatgcgattccagcaaggcctgacgagtcacagccccttgaacctgttgctctccgtaaagtgggatcttcacaggcaacagtggaggagcgtttgagggtgacctgggccctctgcatcagaattactgtgggtgctggctagagaggtctctcgattgcagggccccatgggagacctacaggaccagaacctggggatgccaggggattctggcagaccctaatgcttgagcacctctagggaaggccttaggatcctctgggaagtagcactctccagcccaggcaagatccgagtcccccttccagaagtatccatcggcagttggcattgctgcaggttttctgtgcatatgggtctgagtacggttttgtaactcctgagagacgtgaatctcttcaaattgcaaacccaacatgttattattgcttttgagttttcagttttgtggttatgacaagatgcagatgttaccaaaactttggcgtcagttttacaaacacacgcgaagcacgggcaacccgtatcatatttcaccccttctttccttttgagagggttgtcttgtttttaatccccctctgggtcaaggcattttcctggtctcaggtgagggtgcactttcagaggcacagctgaatacattttgtgggactgaattgagcttttctacaggaagtgccaggccgtgtgtgggagtgatgctgtttcctagctgggtccccctgggcaactcttagccctccaggcacctcctcatccattgggtggggacgattatgcttattcggtctacccgggtaagtataggcacacgagacagtaaatacatatttttttaaaagtaaaatttctatccactacatggatagaaattttaatttggagctgagtctcacggaaggatgaaacgagaagacggcgaagaaccatttcgagccctcgttttccccccagtccaatccgaatctgtattttgcagatctgcacacacccaagccctcactgggggcatgtgcacggtggtcagaagtgcaccttctgggaacagatgggcttccgtttggacctgctttacaagttacaatcctgtgcccttgagcagagttacttaaccttccaaggccagatttctccaaaagcagggccagggacagttcccatccagaaggaggcctggcgctggggaggcctgaatgaaggcggttggtgtttgcggatgcagagtcgctctgttttggtggaggcaggactggaggtcgggatcacttggccacatttgccacctctggtgcgtctgaggtcacagtgcattgtctgtgtgcagcataaggtagttccctattcatttactaggtccctgaagtccttttgtctgtaaagaggctactggctctgccacctgcttctgtcttttcacagtagacattctcgacgtggcagcattctaaaggttcaggtgtgccacatcggcctagagtgggcaggtgggcttcatgtgtgctcctaggggcacttggcagttgctgatagcccgagacactgggagccttgacattattcatctgttatattgaaagaacttcccaaaggacggacacaggatctgacacgatggcagtggccaggaaccagcagtgacaccagcatgtgacagtattttcccatgtgtgacggccgtttagatcacagcagtgaggggtaacgcaggtccgctgggtaaacttggtcaaaaatgggaagtctgcagcatttcgtgtgtttgtggaaatgggccttatttttatttggggtgtctccttaatctcctgtcatggttcagctcaccctggtggttattctgggcgtgctgcgcttgttgccttgtacagaccaacttaggaaaggctcaccaccaccccatgaaggagaaggcgctgtgagtgtctttattttgcatatgaggaacccgggcctcggagagtttgagtgacttgcacaggtctcctgggatagaggtagagttttgttttcaacccagatttatttgataaccaagtgcaggctcataaccacttgtgccaggctggctttgcaacgatgagcctgagaagctgttagaagtcctttaaggggcaagacagggtgtaaacagacacagacctgtttatgtagctaatgttttctgaacatcaatgtgaccaagtgttgtctttagcattgtgggaaaagcaattcgcccaagtgtattcctgcttgaaggcgttgagccgtagctgaggctgggtgcagtgaggacttggggatggcaaagctgtccctgcgtgtgccttgtgcctaccccgcaccccactagagagtggaacgaccagggcagtggggccagaggaaagatgggaggatgcagagggccagccatgtcccgggactgtgcacacgcttcaccatgtccctgcaggccagggacccatgcctgattccctctgaaacatttgcgggactgtggctaccggtcaggtttctccaagtggcccaaggggtgggcattttgagcagagcagtgggactatggatgcgggtacatttggggacctggccatagttgaatttgagcagggtgtggcaagcatgtggggctggacaggaaggcagagctagccagtggggccagggcctgcggagcccaaatgctgcgctgggtgaagggccttgggagtcttgtgagtggggaacactagcctgtcagtgcttcccagagaagatcacggggctggcaggggactgattggggcagaggatgcaggatggtggcagcaggcctggcagggcggggacagttccaggaggtatagctggggtcaaccctggtggcttctggtgagagcggagcaggtgggagtcgcagagtgtggttgtgagggactaagtttagaatcgcttttcttattgagagagacgaaagccttggtgtgtgtgctttttatgtgagggaagccagataaaggatctggctttggaagggtagacaggccgccctctgccctgcctggcatctgggttctgaggcgggagatttcccgactgcagccgcgttcaggcgaggatggcagcggtggacccaggctcattaccattgctcccaccccagcctgtccctgttgggggcaacctgtacgtcctgcaggagtcacggaattttaaaaaccaaaccgtcaggtgttagaggtacagtcacatcagaatgcaaattagaaatagtgtgtgctggggccttaaacaccatgacgtgtttcgtgggctggtgcggctgagtgtgcccctgggcagcagagattgacgagggtggctgggcttcctccgggccctgggctcgcagtggccttgtcttcaaggggctccccgtgtggtagggagacgtgcttgtcacacccatacattttgtaggtactggtgagggctggctagactgaatgaggtgaagagcctggcctttgttggggggggtgttggggagcttggtaagtggttgaagatgttgaagaagtcccctctgaggaggtggctttcgagtggagatttgaacagtgagaggtggcaaggtctggggaggaggcttccaggggacgagtgagagctgcaggtgcctagatggctgcaggtcggtgtgttggaagcacagatgggaggtcctatgagggtcacggggtggggtggggagcattgaggccactgttgcaggcctggattcactctaggagtgttaaagccagggtctcagcctcctgcagttgtcatctagttaaagtcatgccagcagggcagggctgtgtgtgtctgggtgatgggggatcagatgagaaagtgcgtgccaccctcagcacagtgcatgagaggcgtgaggcacggcggatgctgcgggtcttataaggcctttaacgctcgaggggaagttcctagaataatgggcgaagaaaaggaatgatatatttctaaaagttactgaatttagctagctagcccaagaaaagcccatgtgtgctattctttattgtgcagaaaaattcgtttctgtcaccattgtgttatcatcagattaagctgtcgagtcagatggatgctgtggttgtgcggggtgcgggccgatcagcacactcccagtgcctctgcaggccgtcagcctccagcccaggccagcctgagaggcaggcgacgtgggaagggaggggcttcccaccaggacacaggaggttgctgaggaggttgcttccatggtgccacttctgaaataagaactgttccttggaaggaatgcacaggttctgaagttagtgttcttaaagttcaacgttatctaccctcttggccatagttgaccaccctgtggtcatccttggcccagcaagagcacaggctcttggaaagccacaatccatgaccatattcacagctgaccaaccatttgccaggaggcaggactttctgtgctaaaatggggatgtcccaggcagactggggtgggtggtccctgcctccctcggctctcattccagggtcctcctggacatcactgctgtcactttgccactagcttgagtccacctgggccttgaggcagaagcagtcgttgaattttctttttttttggttctccggaagcatgggcttataagccttcctgttgtattttgccatgagtgtaattagaacatctcccagagcctgggtcacttccctttagctggacatggcccccgctgtccttgtcacattttttggattgtttgtcactccagaaagccttcagggtcatggttctcacttcctcagacatttttctcttctgggtgtgaggatcttttgctcataagacttgccttctttgggcctgagacgcttctcccccagctgtggagatcatgacagttgcagcagacggcttcttggaaaggtagaaggctctggtgttggctgaggagaagcagctccgtggtctccaggggtgtcctgggttcccaggaatcccatggctcctgggggaaccgctgcctggggcagtgctggttccatggtctgttggggttcctgggtgctcacactgccccagcttagccggcgtgactcaggatgctaggacccatcgccaggctgctgggagtggctgggtggggaggtcagctctggcaccaaggccatgctggggctgcagggcttggctggaaggggtgctgccctgtgtgtcctgctacaaggggccggggaccctcccaactcagggtgtcctgcacgcccacactgcctccctcttctatctttaagacacctgggaagcttctggacatgtcaaacccacaccagactgagtggcagggtccaccacaggagtagcttagtgaagaccagaaatggttttgagctgggcactggcacagacagggtgagagccagccgcatggtcctcgcagcctccccgcctgtggacccctctctcaggccaggcaagtctgtgggctcgtgggaccccggcagtgctggcctcctgtgtttgggcctctgcatctgtgctctgccctgaggttgggtgagtgggggactcgtgtccctctcttcccagagcagcctctgctctatcctcagggaacctcttctgacccgatccccacgcagacatgctctgctgccctctctctcaatcttccccactctcacttcttccagaagctacttcagcccccacgatctctctctgtctggggcccttcacacaccactgttttctactagacttgtattgtttccatctcttgatggtgggatgctagattggatgctctccaaggcctggtgtgtggtttctactggatggaaggcccagcacagagtgctggacacagggtgctgtggactgaaccgtgtccccaagattcacaggctgaagtcctgacctccaatttggctgtatttggagacagggcctttaggaggaaattaaggctaactgagtcataagagtgggatcctactctgctaggattgatggccttggcagagaaagagaggatcttttttcttagaagagaaagagaggatctctccctcccataccgtgtgaggacacagcgaggaggaggctgtgtgcaagccaggaaaggagccctcactggaaacggaatcagccaggaccagcagctctcacttgccagcctccagaaccgtgagaagataaatgtctgttggttaagcccccagtctggtattttgttacggcagcccaggcaaaccaatatataggtgaattacagactaaagttgtttcaaaggcacaaaactcatcaagggattgtgtatgaagttggaatttggggctgaggataactttgtcatcagacagtgctccaaaaaggcactgttctcaggtttagctcttggcatcccaaaagatatgagtgtattgcagtaaaaaacaagtaacaaacagaaacccagatttcatgaccagaaacatcagtggttgtgggaataggggacagcaggcaagacaggagactccagaagccagcagaccatggaaaggcctggtgctgtcctggccctgggtgggcttgctctggtaagcggtagaggaacctgcgccctgatgggaaggagagaccagctcaaatgctgccagactgggtttttaaaaccagtctctacaggttcattgggattctttttgttggttggttgattttttccccccctccagattggtcagtatacacacactaatccagcctggttcaaaggacagcatgtggtcgtctggttggacaccagctacatctctcagaaccatactctttgctgcttttcaggctaagatagctctctgagactgtttggaggtctctgttgatttaggggccttgcaagacatttcttgctgaaagccccgctggcccacacctcaccaaattggcttatgtggctactgatggggggacatagaaaaggtagatagaaaaggttaaatttacttctgtctaactcaccaattcatgctgtggattgtagatctgcaaaatatatcaagttcacagggattttatgattgttgcaaaggaaactcaaattgtcagccttttcctgaaggatcttgccattcctaagctctggctatgcccctacttctggctggctgtggccttgcagtgcaggctggcactgtgcccctggcatctggctttggggggcccagctgtgcagggagcagatgctgtggtgaatacaggtgaagccagagtcctggcttggggaatgtgttctgcttcctgtagtgctctatttgaagtgtggatttcagttcttcgttatcttttatttatttatttacttattagcacagcttgtttgttgttcagttccatagtgagaatctctaagaatatgattaaccttgagggtcatcttatcctgtaattattaatgattgattctgtttatccttgaaatcaataagagaggcataatggtttggtctgtagttgggcgtgatttcttacatttcgtaaacacggttctgtgacagcagttgtatcagtttattacccagaacatgtttgatgaatctgaagtgtatgattagttttatataattattgtgatatgtagtgttccttacatgagttatgttaatatggcaaatagtgttaacatctcctgccactaatagttagggtggggacatataataattgatcttcctgggagtgctgtaatgtaaaaacaattcaggctgttggaagtatattttacaagtatgcgttgggccttggggatgttatattgaaaaacccaattgtacagttaccatgggaacccaattaaaatagattggttgatttttttttgtctttcatcttgaccaaaaatctaatgtattttaaatgttttcatatggaattgtagtcatatactgacttgctgtgccaaagtattctgctcgttttttccaactttaagctaaaatagtgaaaagttctcgagtggatccttatgagaacgtctcccaaagagaatcagtcatgtttttgtggaaaagtttgtgtgagtgatgatggtagagtggaggtggtggaaagcttttatgaaaaaagggagaacaagcattttcctacgagggcagacaagaaccctcatgttcttcctttggtggaggacatgagtgtgtttctccgttctcacgtttgtagaaggtgagattaggtccctaaagggccctctccgtgttgtggaggggttggggtgggggtggagtggtggggtgggatctgtgtttgccctccttgctgggggtcctcacattgtttggtctcagagcctttttgcacagttaaaacttatgagggatcccaaagagattacctgagttatatattaataccccattagaaattagcagtgagaaattttaaaatattgattcatttagacaataaacctattagctttttgcataaataacattttaaaataaaaactagctatattttccataaaaaccaattagggaggaatgttatcagtttccattttttaaaacttcataatgcctggatgaatagaagacagctagcttctcctgcttcattcagtctgttgtgatatgtttgggttgaagcgcatcaagagaatctggcctcactcaggtaagtaattaaaagggaatagtgttttaacagcttcctcagataattgaggatgttctcctttgacactacatcaggactcggcaagtggtaatttcctgagggtttgtagcagggtgcaatccgagacccgctctgtgaactttttgctctctatgacgttaaaatccacaggtatgccttgcactttgagtgattttgtagcgtctttcatcggccctgtggaaaatgttgcttcattgagttatacagatctttcaaatattgatgtttcctaatacagtcctaaaaataatatttgttaatatcaccacctttctccttaggaaagtcatttagtattgggaagccatggtggtgggtaccagtattctaacattttaatcatcacttgaaagttctggctgggcacactggctcatgactgtgattccagcactttgggaggctgaggtgggaggatcacttgaggccaggagttggagaccagcctgggcaatatagcaagatcccgtctctacaaaaacattttttaaaaagaaagttccccttttatcatcagcagcagatactgtcagttgtgttcattacaggtacagactattcatttttgagaaaacatccgccagatatgcaagtctgaataactgttgtttgtgagtcattcacactagcaaagcttttgttctaaaatgaagttggtaagttcatcagcagtctctgccatttgcggagccctcctggtggcagcgtcattctggtttgtggcagaagtgctttgctgcgcttcccgttaggtcacagaatgtttagaaggtcaagatttagtgaagtttgattgcttcctcagggcattctgaagtgaacctgcctgttgccctgaccgtgccttcctcctagagtttggtgtcaatatcttggcccttgcggaggcatccacggttttccccagcatggcttctgtgttgtctttcaccgtgcggtgtgtggtcagccatagtttgtgcaggtgccctttagcagatgggggatgttttactcttttctgcagtgaatatggtggataactctcattggtttccatgtcttcaaccaattttgtgttcctggataaatgcccacctggacttggtgaattactgttttcatagattgctggatttgacgtgtggatatgtttgaggattgtgtgtctgttcatgagaggtgttggtcagcagcattcctggagtgtctgtctgctttgttaggagggcaatcttgcactcataaaatgaggcctcttctatattttggattagtttgtgtaccgttagcattgtctcttctttaaatgcttcataagatttaccagtgaagccatttgtgtttgaagttttctttgtgaaaataacattaactatgaattcagttttttttagtagctatagggccattcaggtcatttatttcttcttgagtgactttttgggattttgtatttgtcaaggaatttgaccatttcatctaagtttgttgaatttattggcctaaagttatttttatattcctttattatccttttaatgtctgtgggattttgagtcatgtccttatttttattcctgatattggtaatttgcactttgtccccttttttgctaactggtctggctagaggtttatctgtttcttttcagagagccaactttcgttacttgatttttctctcttactgatttctcctgtttattattgctttcttgtgcttactttcagtttagtttgctttcttttttgtagtttcttagggtagaggcttagatcatttggttttcctttcttcttttctcatataaacatttaatgctaaaaattctctctaagcactgctttaggtgtgctcacagatagacatgctgtgttttcattttgattcagagtggcgtatttcccaattttccttgtggtttcttctttaatgcttgggttatttattagtacatcatttaatttccaagaatttggggatttaaaaaatatttgggtactttcccagtatttttctgttattgatctgcaggggtgagttaccttgtaatcagaggacatacctgttatgattttaatcctcctagatttgttgagagttgttttacagcccagaatatggtctaccttggtggatgtttgaaaagtgtatactctgtggttcttgggtggagtgctctttaaatgtagttgggtaaggtttgttgataatgctcttcaagccttctatatccttattgaattttgtttccctattctaaaaattattaggagtattgacatctccagctatgattggagacttattacccctttcagttctgttggttcttggttcatctgttctaagtgatttcattaggtgcatacatgtttagaattttaacatcctcatggggaattaacctttactcttatgaaatggccttctctagttttgttgtcatattccttttttgaaattatttgatattaggatagccactccagctttcttttgattagtgtttctgtggtaactgtttttccattcttttatgttgaacctgttcttgtcattacatttaatgtgtgtttcttgtagaaaacacagttgggtctcttgctttaaaaaatctaatctgacaatgtctttgtaaaattggagtatttagaccatttacatttaatgtaattattaatatggttgggtttaagtataccatctggctgttcatttgtcattcaccaatttgttctttttgcccttcctccatcttccgtagcttcttttcagttatttggatatgtttttgaatgattccaatttaacattctgtctacactgttggcttgttagctatctctcttcttttttagtggctgctttaggatgtgtaatgtacatacttagcttatgcttatcataatctgcattcatgtgatataatacaacttcacatgcagaataagcaccttaacaaaagtatgcttcaatttctctcatcccattttttgttatattattgctacatatgtaatattctccaatatatagagttactatttttatgttgggcaatcagttttcttttaaagagatttaaaaaatccagaatttacatttatttgcatatttactgttttttgaaatcctcattcctttgtgtagatcctagtttccattgagtaccattttttttacacctgaaaaccttgtaccatcatttctcaagtgcaggtctgctggtgtctgaattgtcatgcatttgtttttgttttttgaaaaaagcctttgtctcacctgcattcttgaaaaaatgtgaattctaggttgacctgtttttttgctttttaatactttaaagatgttgttccattgtgttctgccttgcatagtttctgatgatcagtttgccgtcattcttaaatttgttcttctgtatgtaatctggcatttttgccacctctggccactaaggttttctctttgtcacttgttttcagctgtttgattatttgtttttatgtttcttctgcttgggtttcactgagcttcttgcatctgtgagaatgggttacatatcccttatctgaaatggttgggactagaagtgtttctgattttggattttttttggattttggaatatttgcatagatagataggtagataaatagatatatagatagatagatatagatatagataccttggggatgtgacccaagtttaaacatggaatttttgtttcacatataccttatccacatagcctgcaggaaatcttatgtattattttaaataattttgtgcatgttacaaaattttgactgtatttcaactgagacctgtcatacaaggtcaggtgtggaattttccaattgtggcattgtgttggtgcagtttttgggttttggagcattttggattaggtgtgctcaaccttgttttacctcatatagatttttcatcagatttgaggaaatgtcactgaatatttcttcagatatttttcctgcctcccctttttctgaggctccaattgcgcatgtgctgcttcatactgtcctgtgtctccctgagccctgctcatttcctcagtctttttgtgtttctgtgccttgatagtttaaaaaacgttattttctcattgttgctattttttccttctgctgcatctaatctgtacatcctatcgattgtattttttactttagagactgcattttacatctctatatgctccatatgggccttttaaaatatcttctatttctcatgtcatatgtgggttctcctctatcttctcaaatatggagcatgtttataagaactgtttttatgtcccagtccccttgttttacgcatctctacttttctgggtttggttctgttgaatgatttttctcctgattgtgggttatatccctctgcttctcatgtgtgtgtgttttaaatgggatcctagacattgagagttttgttgtggagtgctagattatgttgtcttttaaaaaacagttttggactttgttctgctgcaggttcagtttcttgaaattgtttgtatcctttcaaggtatcatgctttttttaaaaaaaggttttgttagggcaggtccagaccaggttttagtccagggatagtttagtcctactatttacataatgtctttactttataagggtgtgtgtatgtgtatatatgtatgtgtgtgtgtattatatatatgtatgtgtgtattttatatatgtgtgtattaaatatatatgtattacatatatatgtatatatatgaaaaataaggcagctctgaggtctttacctgatgaatgttgtattaggagatctttccacactggctggtgagaacatgaaatattcccagctctgtctgtgatcaggaattatttgggctgctacttctgggcatctttctttgacctcagggagttccttctcaagcagtgtctcagtagttaggcagaggccacagggactcttctggagatgcctggcgtgttctctgagtaggcccttcttccctggtactccatcctgatgattctaggtgttttgttctttttgaattctaatctctctccccactttggtgagagcacccactggttttgtgccagatgaccctcctcctccttggcacagcctggaggctgcatccagccgttctctggcggctggctcacttcacttccctttccttggggagcatagcccctggctgctgttgtccttgttctgaagaccattgttttatataaaagttgagcacccctaattcaaaatctgaaatgctacagcatctgaaaatttttgaacattgacatgctgctcaaagctgatgctcaaaggaaatgcttattggagcattttggatttttggattagggatgctccaactgtaagtatttgcaaatattcccaaatccagaaaaatctaaaacctgaagcacttctggttcccagaatttcaggctactcatcctggactttatttcgttttagctgttacatgtggttcttgctgctctgtcatggctagaagtgggatccccaccaagttattagtggactcataaaaataaaagagaggcctgctgggctgttaccagactgagattgctcagattacacaaagccctctggccctgaccccagactttttaccagcctgaagtgggtgaaaagaaagcttcactgactgctttctaggcatgtttaagcctgcttattctggccctcacagaataagaattcaaaggacaataattttcaagaagacttaatttaagttcatctaccttattagacttgatatagatagatagcctttttaatttttttttctcatggaaacagagttgaagaaaactaatttaccttctaaatttaggcacagctaaccaagtcaaggtgtggttctgttcttctctgttctcttctcttctctttttttttttttttttttggtggggggtagacagagtcttgctctgttgctcaggctggagtgcgatggcatgatcttggctcgctgcgacctctgtctcctgggtttaagcaattctcctgccttagcctcccaagtagctgggattacaggtgcccatcaccacgcctggctaattttttgcatttttagtagagatggggttttgccacgttggccaggctattctcgaactcttgacctcaggtgatccacctgcctcagcctccagaagtgctgggattacaggtgtgagccactgcgcccagccggttattgtattttctgtatgctttttggtcgttcagctcatactcagtctttccctgtactgtttgagaaattcacaagtgaatcccagatcacaggtgtttggtgaaattggtataaaccttaactgactttctgttaagaaacataaaaaaatttatttgtatttctactctgaagaaggactgttcaaactttatatggaggggacccaagattgggaaggcagaggaaacaaagggcgtctttgattcacattatttttctcttgtcatcattgcaggcttaagtgtgtgtcatcactagaaatgtattctgttgatgtctgtcatttcagcattttcatgttgtcaaaaatgagaccagacagaagaagagtgtattctttcctgctagaactcgcacaacactgtcattaatgcctctggcagtcaggactttaatcagttaaatgtaatagtggtgataacgttaaagccttgtatggcagtctacccgggcagcctagagagccctgtgcaactctgcatttgaaaaatcaatcaactagggctgtcttttgtcctgggctacttggatagctggtatgaaccacccagcactagcctcctgcttgttgagatgacacttttcctgaagccatgcccactcttgacaaagaataattaggtgccctgcataagtgtatggggacctgcaggtggcttggatggtttgccctgctctcatgggggtccacatgagcatacagaatggaagaagtcatgatggttgcagtggttcctcagaggaacagtgagtttttcaagtaggactctgattatctgtaaaggccaaacttgttccagtgacatcacatctctggggttgctaggaagtaaaggagaaaatgggttcacttgcacagttttggattacatgtaagttttaaagaataggaatgtgtgtgtgtatgtatggtatatacactatattatcattaccaaaaatgatgcctcctatagacttttggtagaaaggaaatttctttctcttctggttgtctgaattttgttttcctttttttttgcttccctccggaagggaatcaaaaaattgtatatatatatgtacacacactatatatgaaatgcctgttcatatcctttctgcctgtgtttctgttgggatttctttttcttattgatttataggattattttatatagtctggattctaatcctttgtcaggtatattggctgcaattttcttctcccagtttgtggcctgcattttcattttctttatacactgctaaccatgtaggtgtatgtatgtatatattctgattgtgggttatatttctttgcttcttatgtgtgtgttttaagttggatcctagacattgagagactgtgtgtgtgtatatatataccatataggggtgtgtgtgtgtgtgtgtgtgtgtatatatatacacacacaaacacacataggtgtatacgcaggtatacacacacacacacacataggtatacacacacacacacacacacacacacacacacacacatgaatatacctatatggttagtagtgggaagccaagctgtttctcactgtcagatggttaagttttgaaattttctctcattctactcaagggtagaatgattggagtgtcagtgttcaatgctacaggacaataacttttgtaaaaatggttaaagcagattagaccccagtcagttaatccacctcctcaccaaaacttggagttatcatgctactaacactgctaacctactgggtaaaaatcctgtctcatagtgatcttaattagcacttccgattgagagcaaccttcagcatcttttcgtgttgccattcatcttttgcgaaatgcctgttcataccctttctgcccatatttctgttggattttctttttgttattaacttataggattatcttatatagtctgaattctaatcctttgtctgttatatgtgctgcaattgtcttctcccagtttgtggccatgttttcattctctttatagtgccttttgatggacaggagtttctaattttaatatagttgcatgtaattgaatttatgattcttttcctttatagtttgcacattttgtgtctcgtttcaaagtgcttccttatccccagtcataacaattccactattttcctatgaaagtatcagttttccttttcatatacaagtctgcagctcatttgaaattaacttctgctgtggtatggagtggaagttcagttcttttttaatatgaataatcagtggctccagccccatgtatagagtaaccccacctttctccagggctctgcagcggcttcactgcaaatatatgacaaacatgtgacatgtggatatagagcaagagaggcactgcagagccctagagaaatgaggagagacacagtaaatggtgctggagctgctgactattccaagtggacgcatgcctttttctaggctctcctgttccattgatctttttgtctttctgtactaacgccacaatgcattaattactatagctttaggctaactcttaaaattgatgagtcagccaggcacagtggctcatgcctgtaatcccagcactttgggagactgaggtgggcagatcatgagttcaggagtttgagaccagtctagccaacatagtgaaaccccatctttactaaaaatagaaaaaattagctgggtgtggtggtgtgtgcctgtaatcccagttactcgggaggctgagacaggggaattgcatgaacccgggaagcggaggttgcagtgagctgagatagcgccattgcactccagcctgggtgacagtgcaggactctgtctcaaaaaaaaaaaaaaaaaaaaaaaaaaattggtgagtaaatcctcatatcttgattttccattttcctcttcaggagtttcttgattcttttggggcctttgctcatccattcgcatttcacaatgagcttgtcacattcttagactaacctgtttggtattttgattgacgtccttgggtctgtagactaatgtggggagaataagatctttaggatatgaatctgcctcttcaggaatatgcgctcttgcactctctgtctctcttggatttccttaatgtctctcacattttaataagttttttcataaacagcttgtgcaccttttgaaatactccccgtgtccttattttttgttgttgccattaatattataaatggtatctttttctaggattagatttttctttatgactgatatgcggaaatgctattaattttcatgtcatctttaatttactttctaattttttaaaatgaatataccacatatatattctttgttttttctacatagacagagttttgcttcttctactctgtaaaccatttctttcttttacttgtcatattgcactaggatctccagttccattttaagtcgatgtggggataatacactcatcttgttgcttattttaaagggaaaactgctaactcttcattaacaaaaatgatgcttgctatagacttttggtagaaagaactttccttctcttctggttatctgaattttgttttcttttttttcttttttcttattttgcttccctccaggagggaaacaaaaaattgtcagaaactatttcagagctgaagaaaacttcttaatctccttctcctctactgttccttgaaaactttttaaaaattatgaacaggcttcaaattttattaagtgatttttctgcatctatttaactgtttatgtggttcccatccccatatctgttagtgtggatcatgacttctagggaattattaatgttaagctatctttgcattcctgggatgaacattacttggccactaagaatcatcctttaaacacctgctctagaccaagcttattaatttattgcttttaactttggccaaactagtggtttaattgtttttaaggttatttattctttattgttattaagattattcttttttaaaaactggttaggttaattatatgaagctatatttttgcacagtctatctttttctaccctttagctttcagcctttgttcttatatttaaaatatgtgtaaagtaatatagttttaaaaatatccagtttggtagtctttattttttaattatttagtccagtcacattaaaataattatagttgagcttacttttaccatcttgctatctgtcttctatttgtcccatctttatttgttcctgtatttctaatttattttgctttctttatgattaatagtttttaaaaccatttttctcccctttctggttatacagatttgtatgtttcatttagtgattagcctagagattataatatacaccctggacttactatagttcacctaaattgctactttgccacttcctgaatagtaaaatactttacaaaatgttagtcatttccctttctcccagcttggatgctgttgtattttaattatatatacacatttaaaatgcagtagtcacttttgtcactgtttaaacgtttggtgtttgtgtcaccgtgccccatgcttgccctccagtgctctccattggttctccatcatcatgccttcgtctggggtgacttctgcttgaaggacttgtttgtttacttagtttttaatgctagtcaactggcagtgaattggtccatttttaaacactaatagttattgattgttgagttagcaattctttaccttataaaatatgacattccatcgtcttctggtttctgaagtttgctgaaaagtcagctgtcagtcttattgttgcacttttgaagataatgcaaatgtttttactctggctgcttttaagattttttctttggtttgaagctaattgtgttatggttctttgaggttttcttcatatttattctgcttagggtttgctgaacttcttgaatttctggattgctctctgtcatctattggcaaattcttgaccctgatcccttcaaatattgctctgcctcatccaatctgtcctttcctctcggagttgaattataggtaggttagtccttttgactgtccctcggatctctattcttgttttctttccattcctttcccctttcttgaccacagtttggatattttctgctgagctctctggcagatcacggaccttgttttctgatgtgtccagtctgttactaaacccatccaatgaatcctgaattacaaattttgtatttttcagttctagaatgcccgttttgtactttaatatatattttaattctatatttaaaattcttctctttcccacttatgttgtctgtcttttcctcttattattaagtgtatccattgtaattattttacacttcttatctgctagcaccagtattgtggacatctattcctctgcttgtattttcttcttttttcccttctctttattattattaaatacatgtttttgctttttgcatgcttttaaaattgtgagtgtttgctggacttgtgcataaaggactgtaaaacctctggattgtcgtgtttttcatcaaagcaaaagctctctttgcccttggttaggcatatggagtgaggggtgaaggaccttggtttcatgagggattgatctgggtcagggctggcctgttattttactaaaactcagtccctagttggaccttccctttgagcatggtcttttgattggaagcccatggtctctttctcctcagcctgtaaatgctttgggagatcccttggttctccccttagaaggttttgagctgagctctttagcttcccacgtcccctgtttcaaagtctcctaaatgtcctgatgggagatgtgactatgtgtgaagcaggcccttctctctctgtctttccgcctacctttcctcccaccccagtctcgtaagtgctattagattaagggatagtgtgcttttccttttaggagccctcacttgacccagctctctaggctcatgaacgcagccccataggatagcaaattgattgcacttttggggttctgattctgatctttcatgccatccccaatgggccacccagagcttccctggtttcccttcccaggtggagtggctttgtgtggactgccacggtgctccccatctgcacccaggatcagcaagtgtttctgggcagcaaagggcagtctccactgtacagtcccagtccccctagtcctggttgcttccacagctctataacattttaaaagacgagttttgtaatttttctgactttttccagttcctgtgggaacattgggctgcctccattagttcgttttgcttggaaatgaaagtccattctgagcacttgcttgaaatcttgattgaagtctttgatttctgctttctccttggtcatgctttctcctgtcatctatcttcctttgcccacacatttcataaatgcttatttcgtattctacacaggttgctttaaatatctgcaatcctgtgggtggagtgtgggctttgtggttttcatctttctgtgatttcttgtaactcttacgatgacacgggaccttgtttgatgacttggttgattattaatttatatgggctgagcctgatctgtttgactcctgagtgcctaaattagggatgcttttccctaagggtgggtgtttgggtttctgttgcctggaaccagggggtctcaaggcagcaccactcagatctaggactttctaaggcttctcactcaatcagggccctcgggttgtcagggaggccccagtggagcgtctggaggtcatgaggtgtgcaccttctctgctgatgctgcccactttccctctgcttcctccagccctggcttactctcctttttccaagtgccccgattctctttggattgcccctgcttactagagaggccattcaggaaactttgaaacattgccatttattcaatatctagtgcatcgtagtcccttaatccaaaacaactggtttggtttttgcataaagctaccagaagataaatatagataaaaatcttgaagatttagaaaaagtaatattaaaatagatccttagatatgttcttatcaacatctgcaagtgttcatcccaatatggattccatcagttagaggggttttaagaggggtcactgtgcgccaggcccagtgtgggatctgggggaggttgtcaaagttgtcttctaatccagaacaacttgctcactaatatttatatttctgccttcaatctgggaagcagcccttttcagaaaggtttgctgcaatactctctaggggacaaagctgagtgaaactctagaggcttgtcttatacgcatagacatcacgtgcacacttacaccccagtcatttccgcatgtgggatcatcacagttgtgtgtttgactttttcacctgaccttgtaagtgcttagccatatattgaactctttaatatcatttttggagatggcatagtgtcctactgtaaagatataaccttcttccattgttaggaatttagggcaatttcatatctgagactctgtcttaaagaattaattaaaattttgtgcacaaagatgtttaatatagtgttttgagaagtcaaaacacagggaagacttcttgtgtcttacactgagaaattcttagccagcctcttagtttcctgaattcaggactgtgttgtgtaattttgaagccccaatagtgatatggtcatttttttcatatcttcattcaaaaaacctcagtcacctggggagtgggtggggtgtgtgctggaccctgaccttgaactgtccagacaagttcctaaccacgtggagctcaagcttccctggggcttacctgaatgacctgctcagtggccagccacttgctgcgtgtcagccggtgaactctgggttcctggcttatcagagacttcaagtcctcattaccttctgggtctcagtttccctaatatgtgcaatgacaggattggccagggctttccaacagaagtttttgcaatgatggaaatgttctgtgtctctgctgcccaatgtggtagccactagtcacattggctgctgggcacttgaaattgactcctgtggcttagaaactgaattttaaattttattacattccaattaatttaaatttaaataagtagccacatgtggctaacagctgcgtatggacactgccagtctagacggatatgatgcttgtttaatggtcttaagaggtctttagagtctattctaatcctgacatctggttttctttgcttgtttgtatttatttgttcctttatttttaccacgactgctctgagtaccaggaactcctttttgggatgtcacagatcaccaacttccttctctgtgctgtgtcaatagggacgtcacccctgtggggaaaggaatttgcctgaacaagacactaaaaagataaaataggctgaagcggagaagaataaaagattgtgctggcatgagctagttttgcaaaacccatttaaataaactcaggatattaccgaccccatgcacacattctttccttgactctgcaatgttccgttaaaccagattgtgaatttttttcaggattaacaatttacatttatgattctattttcttttataagtaactgctatttgtaaatgagactaattatttgaattcatggtacaaataacgtaatttagagttacagaactcttgatcctctgggtctaagcaaaataaacgtagtacctaatgctggaatagagcaagagttttctttgaatctcaaaatatctgcattgtgaaactgggttaagttattttggaaactataaatagtcacttggtaattaggtgtttggttttatttgttctaatggagtgcttattacagtcggtgcatttttaccccacggatcagaagcttttataggccaagtgatgagagaccatcttctacatttcatttgctgattgtgactcatcactgatgatcgatggactgctgaactttttaattcctgtttgcttgtagagaaagaaaattctcatctcttttgataggtcctactccaaaattctgcagccgttttgtacaatcataaccttacacgatatcacacaaaggcagagaaacgattgcatggacatgccttcctgtcaaacgtgtatggaatctggcccgtcctaggcttatctctttccaccaggattcttcttcccatttttctcagcagagcatcttcacgtagttcacatgacatcagaacttcatcaggatgtaagttcctgcagaaataggcctgtgtctggtcagtaaacagagaatgtaatgacattcccagagcattcacaggccagagtctggtgtcctccccagcgtccagcaggctgcggatggatggcatgcagctgacaagattgatactgcattagacattcctggaggtccctgcggctggggactggcactcgcaggcctccccctgcacacagctgtctttggagagcacagagcaatgggaggcggttttgttttactatttgccatttagagtctcacttttaatttatcctcactctttaagaaataattggtaatttatttcttagagatcaaatgttgctacaagctgaaaactgttttataaatatttcaggaaacttgaatgcctggaattttcatcgtcacgcttaagtcttcctccaaaaggggatggacttcgttccatcccgctccaaaagctggtccgattcttgcctgggtgttgtatgctatttgccttttccataggctccaataacaataagtacatcttaaaattgatgaaagtttaatgaatggctagcaagcagagagactacttttataacaagattaataccttggctcaggggacataacattttagtaaaatcaaaatttgtatagttatcctagcggtgcttgcaacctctggcttccatataaaaatgtctaaataaaatactggcagccgtctctagccattatttccatctgctctaggtggcctgacccggaacccactcagggtggtgcactctgggccggggtctctgggatttctgtcgcatcagcttgtgcagccgtggaatggggatggggcactgaggctagctgtcccgtgctctagaggttcctgggaaaaaaatacagagagaaataactcacaagggagccagcatttggtgttgttttaaataaattcattcatcatctataccttttccccttttaattactacactttaaaagggatcttggtatatatttatttttgttttgttaatttttttcttttttaaaaaattaattgtagagatggggtctctctacattgcacaggctcgccttgaactcctggcctcaagtgatccgcctacctcagcctcccaaagtgctggggttacaggcatgacccactgtgcctggccagttttttttccccctttttggcaagggaaggctatcggggtagaagttctgaagcaagtactctgaatggtttctgattttaatagggggagcatcatttcctgatctaatttataatgtgatataaagctgctggccagctgacactaatcttaatttatgatctatttaacctttatatttcctagccacagctcgtaccactcccccgtctctgcaccagcatgtttcagaggcaggcaagcagcatcagttctggatcctggaggcaaggggagggttttcacggaggggcggtgcacagctctgtgcctccccggtcagctggtccggcactgcagtcagcagcaagggcgtggtgagggccctgcagattcttcacactgtcctggtcctctctcctgtttctgaatggcaggactttggggtcagattagaccctgcatgtacatagatgacaacggaatggctttttggggggactttttattttgagataaattttagacttgctgaaaagttgcacaaatagcacaaagtttctgtatgcagccaccatctggtttctgccagcactaacacctcacacttaccacaaccagggcgctaacacgggtgcactactgtaaaccttgccatctctcctttgtctcctctagtgcaatggtctgaatttatgcttcctccaaattcctgtgttgaaactctacccccatggtgatggcctttggaggtggggcctttgggcaatgactaggtcaggctggagccctcagaatgggattagtgtgcctataaaagaggactgagggagctcactgtcctcttccaccacgtgaggacgcggcgagaaggtgctctctgtgaaccaggaagagggcccttatcagacacgggctctggcggcaccttgatcttggacttcacagcctccagaatgtgcgagatgaatttctgttgtttacaaagcacccagtctaaggtattttattccagcaaccagaaggaactaagacgtctaacttgtgacagttcctcttgccttgttttttgtgaccctggaccctttcgaagaatactggtcaggtattttgtaggatgcctctcgtttgggtttgctgatgttgtctcacagagagacagaggttacgtgtttttggtaagaaggctcagaagtgatgtgcccccttgggccatcctgtcctggggacatatgtctgtcagttactgtgatgttagcttggtcactgggtatggtgaatctcttgtgcatttcctcttggtaattgaagttttcccattggtaattaataccttgggggagatattttgagaccattttggttctgctcaggctttcacccactcatcttagtgaccgtgggtgtgtcttgcctgtggcagttattactgtactgtttccctaatgtttgtatttccctccttcccttttcatttaccaacgggaactgttctgtaaggaagagctgtcttttctttcccttttatttattagtcattgaattattcacatcagcgtagactcatggatatttattttaatttctggggtatagtccagtgctgtctttacttaattttgttactcaaatagcccccagtttggctttttggaaactcttgggtttggctcctatgtcttttggacctgcccatcgtttttctagcgctttcctactttctgggatcatagtatgatccaggtgtatcttgtgttttccctgccccagccctggattcagtcacttctccaaggagcctctcttccttttagctggaggatgatgtttagcagccaagatctgggtgctgagtgtgcttgctgctgctgagtcactgctcttcctgcccttctcagtagggggagctaggggctgtatgtgtgtctactgacccgtgcatctgcatttatttctgtgtctgctgtctgcatgcatgttaaaaactgcaagttcatctgatgcctctaacttgaattcatcacagcaggttttattctaatctctgcctttcctctttgtagctgccttctccaacattgagaaacctggccctctttatctgcaacatgtttgcttatatggtggcttcctttaaaaagaatctggtaaaacctgtgtcattgtgtttcagccactagatgcagatgaggcttagtaggaaaagccctacttgtgaagaacagtatttcctatgcttgcttggtggaaaaagtcacagaattttctatagaattctctgtaaacatggttaggaatatagggttgacatttggactcaaatagaaaatgaaatccttttgtttcattacttatttcgttactcagctttcaccttgactcttggaaaactgatggcatgtttccaaatggatatgccagctaattagcttatttctcaaatatccatgttggatgtggaaaacaaataaaaataaagcaaggaagaccctctactgttgttatgtgaagaataacaattacctttaatagcattttctgctaatttagagatttttctttttcttacacttattttctaactcctatgatttgtgtaattcatatcttatacctacatctgattcattatgattcttaattctctttgttgtaaacagaaatattgaaaattcattcgatgaacctaaaaccctttaaaaggtctggttaaattttaacattaagggtgatacagtattcatgctatagaacacagacagtcagaaatcttatgaagtgttggagactttaatggatactgtactatgtagaatctgatcacgagactcctgcttcatcacgtttttactcgaattgggtttcctggtgacaaaagactgtgaagtagctgacggaaatacatccttatgtcagttttcacccgatgactgaaaattgttggatatatgcgtgaaa

SEQ ID NO: 67 - DNA, 32746 bp, Homo sapiens
  source 1..32746: mol_type = other DNA
ttgcccagactcaacatggcggctacacgtcgcctgtcagtctgtgaagcctaccccgggcgtgggccgcagcgtcgagtaacgtcattcgaaccccgtcgcgcccctttgtgcgtcacgggtggcgggcgcgggaaggggatttggattgttgcgcctctgctctgaagaaagtgctgtctggctccaactccagttctttcccctgagcagcgcctggaacctaacccttcccactctgtcaccttctcgatcccgccggcgctttagagccgcagtccagtcttggatccttcagagcctcagccactagctgcgatgcatgtgatcaagcgaggtgagggggggacgaggtgggcgagaaggaaggtgaggggatgcgggctgccgccgccggagctgatgcccagaccgcccgcccgccttcgctgcttcccgcctttcccgcatttcccgccgcggccttccgccctgtcagcccgctcggccttctgtcttcagtcagcctgccccgaacctccttcgggccttcaggctgcgccccctcggctttgtcatcctgccgcctttcaaaaggataacacttaccccgtatcgagtagtgactgcgtacgccgagcacttgccaggcactattttattcctccctgcaagcctctgagagatgattagcttattacagatgaggaaactgacgctcagagcgaggtgtcgccgactgacccaaagtcacccataggtgacaatacggtttgatttgaaaaccgtggggttggtgagctgtcttaggcacagggtcggggggcagctaggaaagaaggagggggcctctctaccctccgtaggcacttgtcagtttactgatctcttttgtggggtgaggataggagtgtggcgtggaaaaaacagatcccagacagacagcaccctcgagttcctttcccttcatgggaagagatgctgaatcagagaagggtggctgagacatcttctgacaagatggggactgggaagagtcaggaactcgtattctttctcaacagttctttttcattagacttgccaagtgcccgctttgtgcccagccctttgcttggctttgtgagattgtaggaggagacagtccctgccttgggaacaggcttcatcgggttggaaaaacaagagcaacatacttttaacaaccgcatgagatacgtatgaacaagttttgagttgaacctacttgcctttgttaaagcaatacaatgatttcaaaattgtaggcacttagtaaatactggttaatcgactggttgtttctattttgtcctctaggctgtgaacatttcaaagatggagacttgtttgagacagagtcttgctctgtcacccaggatggaatgcagtggtgtaatcatagcttactgtaaccttgaagtcctgggctcaagcgatgctcttgcctcagcctctcaagtagctgggactataggcatgcaccaccatgagtggctaatttttaaaaatttctggtagtaaaggagtcttgctgtgtttcccagtctggccttgaattcctggcctcaaaccatcctcccttccttggcttcccaaagtgctgggaatacaagcaagatggagacttttctgttcacgtttagcacaggacctgacatgaacagattcttaaagaatgaatgaaaatagttgtatcaaaatgtaggacacgatgaatgctgtgaataagcaggtagttgatttggtttaactacagccaatgtccagattggtttaactacagacaagagttggaaaggtggacagtagtggcctttcttgtttttggtatcttgagaacatcattctgtgaattttcctagctcacattttagctgaccaaagagcaaaataacatagtgcacttttattgatccattcataagagtgagagctgagcatctatttttgtatttttatttttttacattattatttatttgtatttttttagagaaggagtctcgctatgttgcccaggcttgtcttgaactcctgggctcaagcattcttcccacttcagcctcccaaagtgcttggattacagtgctgggagccaccgcacctggcttgagcatctattttttaaatctttagatatgggagagatgtttaggatggtctatgataagtcagtaacaaagatgaattgaaaatgtatggacttagatgaccagaatgggtaaaattcaaccctgtgttgaattttgaacttttagagtctacttctaaatactttcgtttaaaaagtgctaccttggcctggcgtggcagggcatggtggctcacgcctgtaatcccagcactttgggaggctgaggtgggtggatcatttgaggtgtggagtttgagaccagctgggccaacatggtggaaccccgtctctactaaaaacacaaaagttagccggacggtagtggtttgcacctgtaatcccagctactcaggaggctgaggcaggagaatcgcttgagcctgggaggcagaggttgctgaaatcgtgccattgcactccagtctaggcgacagagtgacactctgtctcaaaaaaaaaaaaaaaaaaaaaaaccacaaagtgctagctataactagctctaaaaagcagagcttattttctcattccttcatagagcacaatttgatccagatggttcatgctgtagattctgccattgtagcattcagcaagacttaatatacaacatgtacttagatttgtttgtttctttttttttttatatttctatgtttctatattttaatgttttttaatatgcatagggtttttggttttctggactttttttgtacccccttatttttggcatgtcagtggaatagcagactaactcctacagtttttgttaattttctttgagatggggtcttgctctgtcatccaggctggagtgcagtggtgtgatctcagctcactgcagtgtctgcctcctgggttcaagagattctcctgcctcagcctcctcagtagctgggactacagatgtgtgccaccacgcctggctagtttttgttatttttaataacaagggcaactggaagttgactttgaagtacctactgaatatgctaatgtcttgctaaacactgtgagggcagtaatggagaaggcagctctatcttcaaagaacttaaaattgttagggatttaggaacaatccatatgaaaattattagatagaagagaatagtagatgagtttttttcatctgctatcttgagctatttttcctaatgggagagtatcattcctcaaggagattatggttaaaaaaataaacattgagaaccattgcagtaaatgacaaagtagctaactgagttgtaaactgttttggaatttagtgtagtattttcaaaactttggattgtaactcacagtaaaaaacaaaacattttacagacatgtgtatatatgtggatacacataaaatgatacaaaagtttacgaaataatgtctttgaaagcatccatttgcactctaatctttcttttattccagattctttccctatccctgcctccctccctcccttccttcctccctttcttcctccctcccttccttccctccctccttgcttccttccttcctttctccctcccttctttcctgccctcctccctccctcccctccctctccccctccctccgtcccttcctccttccttccttccttccttcctattccattcacagcctgctaatattattttacaactctgtggataccgtgctgttcaccgggattgcagtgatgagtaggcagacatggttccagcttccaaagatcctacaatcaattgagaaagatagacaaataaagaagtaatatgataaaatatgataaatactctgataggtaaagtataggcagtagaggccattcattcagttattcataaagcatttattcagcacctctttgtgctaggaaccgttgtaggcattagagattctgcagtgaacaaagctaaattacatttctcattgagttgacttcttggtgtgggtgggagtggtaagtgtatataagaaataagaagtaaacataataatcagttaatttcagatactgattaatgagatgatagtaaaacaggatcatgtgataaagatgaatgagaaaataaccttggattgggtagccaggaaaggcttctctgagaagccaacatttgagctgaaccctaaatagtattaagagctagtaatgtgagatctgtggcctgaacattctcggcagagggaattagaaagtttgtatcctgtggaaaaggcacgcatccttggtcttacaggattagggaagtcttcctgaagagagaagaatgaaagacagtttatagccaagaggaaatcacactagtatgctagaggattttttaattttattttttattttttgagacggagtcttgctctgttgcccaggctggagtgcagtggtgtgatcttggcttactgcaacctctgcttcccaggttcaggcaattctgcctcagcctcccgagtagctgggattacagcatacccagctaatttttttttttttttttttgtatttttagtagagatggggtttcaccatattggctagactggtctcgaactcctgacctcaggtgatccgcctgctttggcctcccaaagtgctaggaatacaggctgagccaccatgccctgctggctagaggattttaaaagaggaaaaggtcagtgtgagttaaaagtggttgaggcaggttttatggaggtgtgagatttggagggtgagtaggagttagatgtatggaaaggtggaagaggaacctttaggcagagtaaggtataagcaatgatgtggatatgggaatgggaagccctcttgggacttatatttcacagggaacagttgaagagatctggggccaaactaagaaaggctttgcttgagagaagaggataatgtaggcagtgagaagcagggattagtgatgtgataaaatcaacatctggcttgaaaaactaaccaagtggaatgacagaatagagaactgtgtgtcattggacctttagatctttagtctgcctcctattttcaagtgtgagttaagataattaccaatgcacttttttttttttgtcagtttcctgattgacttcagaacttctggcagttgtagaattttctttttgctaagttgctttccccccccactgcatgtataattgcagaacgctaatgttgctttgcagttacctgcctgcttagttatccaattgctagagcactgaggtttcagtcccagtgccagccagttaatttaccccatttcagagttaaatgctgcagatgtgagcctgatgagaaaattatcacaatggtgatcagaaagagaggggctaacatatcagtgtagaagaaaaagcaacttgttctagtgataatgggttaatagtgatgtcttattgttcatttattcttcatcaaatgtttgagaacttgccttgttctaggcactaaatttgagaatacagatgtgaatcagagggccaaataaatgtaaacatatttagcatgtttcttattggttacttcaggttgagtatcccttattcaaaatgcttgggcccagaagtgtttcggattttggatttgtttcagattttggaatattcgcattatacttactggttgggcatccctaatcagaaaatccaaaatctgaaatggtccaaggaacattttctttgaacattgtgttggcattgaaaaagttttggattttggagtgttttggattttggaattttggattaaggatactcagcctatagttacaatggattgtaggtgcacaaaagagacaaaaactaaatcagtgtgagacactaacatttattgagtgcctattgtgtatcacatactgtgatttttttttcccccataggagcagctttattttataacgaggtatagttgtaactatgccaaagttgttacaacaaaagcactttttaccttatctaattttattgtcacagtaaactgattaggcaagtaaaatagatataataattaacccctttctacaaatgaagatctgtgaaatgactgattgtgttttgtggcttgtctaaggttaaggctgtttggtggttggatatattcactattcctggtaagaataaataaaggtcggatgagctactatttgaggttaaactaagagtagtaagacttttttgtctagaaggacaaagatataatctaagtccaaaatcatgaaaaatattaggtaaaatatatagtatgtcagatggggtaagtgcaatggagaaaaagcacagaaggggaagggggataagaagagcaagggtcctatttggggcattgcaatttaaaatggaatcatcagggaaagccacattgagaaggtgatgacattgagcaaaagacctaaaggagatatatagcaagaaggccaagttgtcaaggtacaataggaaggaaggtgggagagttggaggtgaaattgggaagtgggtgcacaggacaagtggtataggattctgtggatttttttttttttttagttggagtttcattcttgttgtccaggctggaatgcaatggcgtgatctcagctcactgcaacctccgcctcctgggttcaaacaattctcctgccttagcctcccgaatagctgggattataggcccctgccaccatgcccagctaattttttgtatttttagtagagacggggtttcaccatattgatcaggctgatctcgaactcctgacctccagtgatccacacccccccccgctcccttggcctcccaaagtgctgggattacaggtgtgagccactaggcctggcctgtggattgttataacaattttgacttttattctggagatcataagccactattaggagttttgaaggaggtaatgatatgattctgagtttaacttttaaagggtaattttggctgccatgtgggatgggggaaaaatttaggaaattatccgtaaacgtctgtctgtatagaattcatactctttgaaggtgacatcagagaagacaatctcttcatgaatcttttgagggggcctcaatcttttctgtgaaatagcacttcatgttggtcaatttacatgttaattacatttgattctttgacattgtagtcttaataattgctaacatgaatttaataattgctaacatgatttgattctttagatggccgccaagaacgagtcatgtttgacaaaattacatctcgaatccagaagctttgttatggactcaatatggattttgttgatcctgtaagtaaatatggtttttatcttgggttccttctttcatgtgtttctttccatttgtctcttatccctggaccttcattcacctgatatactttggtattctggctatgcccttcgatataaaatttgaattcattgcttaaaacatttttttttccttaattttggttctgtcctgtgagttctcacttttcagagaactatgaatgtgagtaaagaggaaaatttgatattaacatttaatatcagatatttccttgagtaaattgttttattcattagtggaaaagcctaggccaggcgccgtggctcacgcctgtaatcccagcactttgggaggctgaggtgggcagatcacctgaggtcaggagttcaagaccagcctggccaacatggtgaaaccccgtctctactaaaaatgcaaaaattagccgggcctggtggtgggcgcctgtaatcccagctacttgggaggcaggagaatcacttgaacctgggaggcagaggttgcagtgagccgagatcgtgccactgcactccagcctgggcgacagagcgagactccctctcaaaaaaaaaaaaaaaagggaagcctagagtaaagcttgttttggaattgtggttatttaggtagggactggtttaaaatttgttttttgttatttatgtaaaaagatttaagtaatataaagtagatttcatggacaatatttaagtcaagaacaaactattcataaaccagttgctctgcttttctccttatcctttataacttctgtattctagactctcatcatcagttatctggactgttttctgtggtctctgcagtgtcctggacttcctctaatcttaccctcttcaaactcgtcttccacctgacttctaaaatgatcttccttaaatgagaatctctaagaactctttttttcaaatccacccatatttccgtctccttatttaggtatcttatccgcactgctaaggtatcttaggtatcttatccgtaaaacctgtgctcatctcatagctttaatcatatagtatggaaattaattatggatctttgtcctcccctagaattgaggatgggctgtgtatcttattcttgtgatatcctcagtgcttgacatgtatctaattagccacttgaccaaagtaagtttggtcaagagaaaatgattttatgtatcttgaaaatatgtttattgtaaattctcttttatattgaggacttaggcaataattagaatagtagaatgttagagttggaatgaacttaagagtccatcccatttcatctttggtttatagataagaaagttccaaagagagaggggagtgacttaagttagtgggagtgtagggagaagcacctaggtctcttgactcctacatgttctattgcctcatgcagtagtacattttagagcgcaagaatgttgcagcatcctcaaacttcctagggtagattctgttgaaaaactgtcggtgcacatctgtaatcccagcactttgggagactgaggtaggcagattgcttgggctcaggagtttgagaccagcctgggcaacatggtgaaactgcccaggtgcagtggctcaatcttggcccactgcagcctccacccctggggatcaaatgattcttgtgcctcagcctccctcagctgggattacaggcatgtgccaccacgctatttttttttttttttttttgtatttttagtagagacagggttttgctatgttggccaggctcgtcttgaactcctgacctcaagttatctgtccgccttggcctcccaaagtgctgggattacaggtgtgagccacactgtgcctgccctcaaccctgtttctacaaaaaaaaaaaaaaaaaaaaaattggttgggtgtggtggcgcataccagtagtcccagctacttggtggtgggaggatcgcttgagccctggaggttgaggttgctgtgagctgagattgtgccactgtactccagcacaggccacagaatgagaccctgtctcaaaaagaaaaaaagaaaaactgtgtgctgttagatctggcacagttagcacacagatggtattttattctgagttctaattgtttgccttattgctctagaaactatttagaagacttcactgctcttatactgaacacaccttatctgctggatctgggaagaaagtgatcaggagcaacttgggcttagctatattataattagaatagattgcagactgttaaaatagttacacacgtatgtgtctttttttgaggggagtatgcattgttcagctgggaaacacatttattttctgttggattaagcggtttcttaaagattcaataaataaaccactcacaacttagaatttgtttttcttaaaaatgtatgctaataccctgtgcattacctgtcttaaaaactggaacttataatgtggccttgaaaacagtgaaatgcagtgaggtttaatgggattggggccagaagacttgtataataatataaccttgggcaagtctcagtaacctgagcctcaggttcttcatgtaaaataggtatagtaataatcatctcacaaagtgattgtgaaatgtcagagattatcaaagttgataattacttatcaactttggttgagaatcatttgaacctcgggggcggaggttgcactttgtaatttgtgaagtgctaaagaaagttgtcattaaattatcataattcagccccagacctaatttatacttctgtctcctttaattggcctgattaaagtttgattcatttgcttttctgtacttaccttatgtggaatttgggaaaagtaagtatggagctggagccctgatcacttagggagaatctgaatgaaaaatggggaaacccttatatagaatcagtctgttgggagaatttgaatgaaaaatagggaaatatagaatcattagtatgttttcagctatttccctgtgagactaatcgatttaaaggctatacttagattttttttaatgacactttcattttatatgtagtatacattttctgatagttctgctggattatgcattctcattactaagtttcccactgcccaccattctgaaagataaattttcagagaagtaagttgtcttgttctttgtttgagacagggtctcattgtgtcgcccaggctggagtgcagtgccatgatcatagatagctcagtgcagtcttgacttcctcagcacaagcaatcctcccacctcagcttaccctgtagctgcaaccacagtcacttaccaccatgactggctaatttttttatttttagtagggatggggtctcattatattgctcaggtttgtcccaaactcctgggctcaagcgagcctcctaccttggcgtcccaaagtgttgggattacaggtgtgagccactgtgcccaacctgtcgtttttattgtgatgtgaatttgattgttttcttttttctttccttttttttttttttttttttgagacagggtctcactctgccacccaggctggagtgcagtggcataatcacagctcattgcagcctcagcttcccgagtagctgggatcacaggtgtgtaccaccacacccagctaattttttttattatctgtggagattgggggcggggcagggtggtcttcctagcttgcccaggctggtctcgaactcctggactcaagccattctcccacattggcttcccaaagtgctgtgattatgggtgtgagccacaacgcctggcttttttttttaatagtgtcgtgaactgctaagcttaagtgatctcctcacctcagccactgagtagctgggactataggcatgtactaccacacctggccatgatggttttcttaattactcttttaaggaagctattgtttcttgggaaagctcaagtaattcttggttttatttttgtaggctcagatcaccatgaaagtaatccaaggcttgtacagtggggtcaccacagtggaactagatactttggctgctgaaacagctgcaaccttgactactaagcaccctgactatgctatcctggcagccaggatcgctgtctctaacttgcacaaagaaacaaagaaagtgttcagtggtaagtctggggtgaaaaagtaaaaatttagtactctcagaaaagtaataagggtactagaaataaatcttgactgtttaaagaagcaaatatggctagatggggtggcttacacctcgaatcccagcaatttgggaggccaaggcaggcaaatcgcttgagtccaggagtttgagaccagcctgggcaatgtggcgaaaccccatctctacgttttaagaaaaatctaaaattataaaatagactaggtgcagtggctcacgcctgtaatcccagtgctttgggaggctgaggcaggtggatcgctgaggtcaggagtttgagaccagcctggccaacatggcgaaaccctttctctactaaaaatacaaaaaattagctgggcgtggtggtgggggcctgtaatcccagctactggggaggctgaggcaggagaattgcttgaacccgggaggcggaggttgcagtgagctgagactgtgccactgcactcctgcctgggcaacagagtgagactccgtctcataaataaataaataaataaataaatagcaaatatgtaaattagtgggaaagagcagactacaatttcgtatttctccatgctgcctatctgctgcataaaaaggttgatggatctttgttctttttttcattttctctttttaaaatttttttattttttttgagataaagttttgctcttatcgcctaggctggagtgcaatggtgtgatttcggctcactgcaacctccgcctcccgggttcaagtgattctcctgcctcagcctcccgagtagttgggactacaggctcccatcaccacgcccggctaattttttgtatttttagtagagacgggtttcaccgtgttagccaggatggtctcaatctcctgacctcgtgatccacccgcctcggcctcccaaagtcctgggattacaggcgtgagccaccgcgcccggcccaggaatctattttaaactacaagaacttataatcactttaactctagaagattgtttccttaaatgaggcattacatatttcttcaacatatatgtgtttattgagcactttatatgctaggcattgaggtgggttgagatgacaaaaagggttgagaaccactgttttcaactattacctaaagattgaattagctgttaagtggtcttgatatattttcattttttgttgtattttttagatgtgatggaagacctctataactacataaatccacataatggcaaacactctcccatggtggccaagtcaacattggatattgttctggccaataaagatgtatgtataacacttatctggtggaaattttttgagagtcttttttaataatgcacacattttagaaaatttaaacactgcaaaagatacaggtaaatactaattctgtttcctaccctgattcctgattttcctctctagaaacaactttatcattttaaaatgtatttttccagagctattttgtacatacgtgtgtgcatacatgtgtatgtgtgtacatacatatttttcttctcagtggtactgtactgtgcatacagttttcattgatactttcttcacttgtaagtatatcttgtttgttctatatcagcctttatgaatttacccttttttataacagttgtataacgttccattttgtagatatattgtcattgtatgtatgtgtaagaattcctttagtgatcaatatttgtttttcatcttttcactgcagtgaatattcttgtatggtaggtgttttgctcatagatgaatatatctgtaagataaatcccttcagtagaattgctgagccaatgtgtatatgaattcaaaattttgataggcattgccaaactgactcccaaaaaggttgctcaggtaaaattttacaagctcatgctcagcaacttaaaaattatccacttgtgtttgaacctgtttcttaactagatgccagaggacagaagggaaaagatgtagcctagccagcccttttacacacaggatttatttaccgtgtatatctggacagattagagaccagttttaactttaggtaatataatgattaggccgggcgcggtagctcacgcctgtaatcccagcactttgagaggctgaggcgggtggatcacggggtcaggagatccagaccatcctggctaacacggtgaaaccccgtctctactaaaaatacaaaaaattagccaggtgtgggagctggtgcctgtagtcccagctactcaggaggctgaggctagagaatggcgtgaacccgggaggcggagcttgcagtgagccgagattgggccactgcactccagcctgggcaacagagtgagactcagtctcaaaaaaaaaaaaaaaaaaaaagaatgattaattgactatctctctaaacatgtatctgatgttaaagagactaggagaaaactgagttgtttgtgtgttgttaatttgtgtaatctcgaagacaagttgaagacaaaaatacagcagcagcaacagcaaaacctgtgtctaaaaatatacctattgatagtcaagtatttcagttctctaatattcacactgggcccatacctgcctttggcaacaaagatgaccttaaaattttaagagaaaaggaaagcaagctttcgtataggtttttctagtccttagatatggatcattatgtagaaacactgtcagtattttgaaaacctggctccttttttttctctccaaaatgattatttgtacgttattgcttttattttcctctgaatgactttgtagcctacaaaaactctgtaacaaggaccagttatgctctaaaatcttactgttacaatagttctttgttggaaacttgttaaaggactatagattttgaagagcctcagaattaacataagcctgcttcctgtcattgtttattatatatactgttatatacagtttgaagtaggctagcttttaaaataaatatatatatatattagtaaatatgtggtaccaatacttttggattaatagccaatctaaaaacatgtttaaggatgataatatagtcccatttatgctcatgttttttccctctttcaaaacatactataaacataatagtaaaagtttggaaaatcacatttaatctcacaacatatatttatgtattatcttctagtgttttcatatacatgtttttaaacctaattaggatacttaatttatatgtattgtttcttttttttagaatgttagatggacttctattctacagtaataatgcttagtgttatctcattgtatcctgtgttgattttagttctggagtcagggccgagagataagagattttgtgaaaataagtaattattttaatttaattatgggttctttttcacccctatcagcgcctgaattctgctattatctatgaccgagatttctcttacaattacttcggctttaaggtaaataatgggtttcaagtatgtgggaatttatacttaaatcatgaaataaaggattttgtttatgttttggtgacagttatcaaggccataagttgtttggagttgagatggacctggggaattagtggggttaaggtagcagtggtggtttgaattaaggcaaaggtagcttatctatttgcagtttttgaattttccacatattacttctggattacctgaggagttatgcagataaattaccataagtatttcataacattctaagtatttttgcgttgataggcagtatagtatagtgtagtgactgagaacatgaatgtcagtgtccacctgaattccagtctctgctctatttcttattagcaagttatttaatctctctgtgcttgtttcctccattttagaatggggagaatataaaatttcaacaacaaatttaattaaaaaaaaattttttttttgagtctgtgtctcactgtgttgactaggctggagtgcagtggcgcgatcttggctcacttcaacctctgtctcctgagtataagcagttctcctgcctcagcctcctgagtgactgggactacaggcacacaccaccatgcccagctaatgtttgtatttttagtagagacggagtttcaccatgttggccagtctggtcttgaactcctgacctcaggtgatccacccaccttggcctcccaaagtcctgggattacaggcatgagccactgcggccaatttagtttaaatttcaatttaaagtgcctataacaggctgggcatggtggcttacgcctgtaatcccagcactttaggaagccgaggcgggctgatcactcgaggtcaggagttcgagaccagcctgggccacgtggcgaaatgccttctctactaaaaaatacaaaaattagctgggcatggtggtgcatgcctgtaattccagctacttggggggctgaggcaggagaactgcttatactcaggagacggaggttgcagtgagccaagatcgtggcactgcactccagcctgggtgacagagtgagactctgtctcaaaaaaaaaaaaaaaaaaaagtgcctgtaacagaccaggcactgctctaaacaacatatacactcatttaatccgctgaggaatccctgatgtatatgttgctcatttaatccccatgaggagtcttcaggggattaaatgagtgtaacgagtgtatatgttgcttagatccgtgcctagtctgttacaggcgctttttaagtgttagctgttgtgaagttgatgatgatgatgaatactacaacttctgttaatgtgtgtagagctggctttttccagaaattttcatgcagtctctgccgaaacaaaagtgccagtgaggaggctgagatgggaggattccttgagcttaggagtttgacaccagcctgggcaacacagggagaccatgtctctacaaaacgttttaaaaagttttttttaaaaaaagtgccaatgataattctggctaacatgacgaaaccctgtctctactaaaaatagaaaaaaaaaattagctgggcctggtggtgggcgcctgtagtcccagctactcggtagcctgaggcaggagaatggcatgaacccgggaggcagagcttgcagtgagctgagattgcgccactgcaccccagcctgggcgacagagcgagactctgtctcaaaaaaaaaaaaaaaagtgccaatgataatgttccagatgaagctaggaagagtaaatgtgctattcttttcatttgaaattttatagaaacggcgaagatttaaagagattgccttattgtggatgatatatccactgcgtctttaaaaacggtgctctgaaaattttttgttgtttctctctttctagacgctagagcggtcttatttgttgaagatcaatggaaaaggtgagaaatgaacatgtttgtctgttacattttctactcattatattgaatgtatagctttgagctataagtcttaatattcttgcttagactctagataacattttggactttaggtttagtttgtggataattgtcctgtttattagtataaagtttttctagtttccttttggtgtccttttctgaaattcaaatacgtatctcaacctactttttctgacgtctcatcatgtgaaaactcctcttttgtctatagtggctgaaagaccacaacatatgttgatgagagtatctgttgggatccacaaagaagacattgatgcagcaattgaaacatataatcttctttctgagaggtggtttactcatgcttcgcccactctcttcaatgctggtaccaaccgcccacaactttctaggtaggtgttttgagtagggaaatacgccttgacctgaagaaactgggcagttagttcatcacataaaaaataatttaatgaccttttagtagctgcctgctctgattaaatgagatttagattctggaaagatctctgactgtaatgtggtaaatgaattggagaaaaggcaaatgcttataacaaaaatgttctaaaattgattggattgtggtgatggttacacaagtctatgagtatattaaaagccattgagtagtacactttaaatggggaattatattatttgtgaattatattcctttttttttttgttgttgagacaaagtctcactctgtcacccaggctggagcgcagtgttgcgatcttggctcactgcaacctgtgcctccttggtacaagcaattctcttgcctcagcctcctgagtagctgggattacaggtgcccgccaccacacccagccaatttttgtatttttagtagagatggggtttcaccatgttggtcaggctggtcttaaactcctgacctcaggtgatccacccgccttggcctcccaaagtgctgggattgtaggcatgagccaccacgcttggtgtgaattatatttcaataaggttgttttaaaaagaaggtaagtgccaagaactagttaggggactcttatagcagtttatataagaaattgtggtagtctagattagggaggtgaaagtagaaattgacagaagcagatagatcaaaagatatttagggccaggcatggtggctcacatctgtaattccaacactttggaaggctgaggtgggaagatcacttgaggtcagaagttcaaggctgccgtgagccatgattatgccactgcactgtagcctgggcaacacagtgataccttgattaagataaaaatatatataaaagatatttaggctgtcaaattgacagaatatgggtcaagaatggttcttgcatttatggatacagtaagtaacaggattaatgatgatgccatttgttgagaaaaggaacactaacggtctggtaatacattaaaaaaaaaaatatgccattatcaagttggtttgtttcaggaattcaagaacatggtaacatcaaaaaatacattaatgtaattcattgcattaacattttatgcagtttaatgctctttcataataaacactttagcaaaattgatatagaaaataacttccttaatttggcaaaagatacccaataaaaacctagatgtatcgtctcttttttcagcatggtagtggaggcctgagccagcattgtaaaataagaaaaagaaaagattggaaatcagggaacaaaactgtaatgatttgaagaaatgatttttacataggaaactcaagagcatctgcagacacattattagaaataaaagatttcagcaaaatatctggatataggttcaatatacatcaatcagttatgtttctgtactttagctgttagaaaattaagtcttaacctacagccatgcattacttaacgatggggatatattctgagaaatgtgttgtaaggtgatttccttgtgcaaacattatacagtatacttaggtaagcctagattgtatagcctactacacacataggatatatggcatggcctgttgctgctcataggttacaaacctgtgtagcatgttactgtactgaatactgtaggcctttgtattaccatggtaagtatttgtgtatccaaacatatcacagtaaaagtaccctataaaagataaaaaatgggccaggcgtggtggctcacgcctgtaatcctagcatgttgggaggccgaggcgggcggattgcctgagctcaggagttcgaaaccagcctgggcaacatggtgaaaccctgtctgtactaaaaatatagatataaaaaaactagccaggcatagcagtgtgcacctgtagtcccagcgactcaggaggctgagacaggagaattgcttgaacctgggaggcagaggttgcagtgagccaagatcgcgccactgcactccagcctgggcaacagagcgagactccgtctccaaaaaagaaagaaaagataaaaaaaaagatacaaaatgatacatctgtataggacagttatcatgaatagagcttgtaggactgaaaattgctatgggtgagttagtgagtgagtggtgaatgaatatgaaggcctggctgggcgtggtgggtcatgcctgtaatctcagcactttgggaggctgaggcaggtggatcacgaggtcaggagttcaagaccaacagggccaacatggtgaaaccctgtctctactaaaaatacaaaaattagctgggtatggtggcaggcgcctgtaatccactacttgggaggctgaggcaggagaattgcttgaacctggaaggcggaggttgcagtgagccaacatcgcaccactacactccagcctgggcaacaggagcgaaactctatcttaaaaaaaaaaaaaaaaggaatatgaaggcctagtacattactgacgactgtagactgtacaaacattgtgcacactaaatttattttaaaaatattttcttcaataataaattaaccttcgattactggatgaccactgtcgtatgtgtagtccatcgttgactttttttgtttgtttttaagacagagtctcactcttttgcccaggctggagtgcagtggcatgatcttggcttactgcagcctgcacctcccaggtccaagtgattctcctgcctcagctttacaaatagttgggattacaggcgtgcaccaccacacccagctaatttttgtatttttaatacagacggggtttcaccatgttggccaggctgatctcaaactcctgaccttgagtgatccgtcttccttggcctcccgaagtgctgggattacaggcatgagctaccatgcccggttttttaagttttttagaaatttctctaaaacatgattaaaggacattaaataataaataaatggaatagattcaattttataaaaatgtcagtttttcccaagttaaaatatagattcaaagtaattctaggcaaaatctcaacatactgattctaaaattcatgtgaaagagcaaaagactgcccaaaaatgtcaggtcgaaattcctggaacctgtaaatgttacctgataaggaaagtggtctttgtagagatgataaggattttgacatggagagattatcttgaattatgtgggtgggcccttaatccaatcaaaagtatccttgtaagagagaggctgagggagataacgactcacagaaggggagaaagtgatgtaaagatggagggagaaattggagtcatgtggccacaaaggagagcaattagccactaaaagctggacaaagcaaggaacagattctccctcaaaacctctggagggagcactccaaaaaaaaaaaaaaaagtgagttgcagacattgtgactcttgatacctccacttacctttttttttgagatggagtttcgctcttgtcactgaggctggagtgcagtggcacgattttggcttactgcaacctctgcctcccgggttcaagcaattctcctgcctcagcctcctgagtagctgggattacaggcacgcgccaccacacccagctaatttttgtatttttagtacagatggggtttgtccatgttggccaggctggtctcgaactcctgacctcaggtgatccacctgcctgggcctcccaaagtgctgggattagaggtgtgagccactgcgcctggccctacttccacttatatctcgataggagaatatataatatgacctcagagcaaaacaccatagagcaaaacattggaaaaattgactacaattaaaaacttctgtgtgaaaggcaatggaagggcaccgtggatcaataaggccgagaggcgagacaaagagggcaaaaatcttctttattgagctctcgggcgaggttcactggtccgcagggggagggccagggaagtctcgctgtgccaaaggtgcagcgtgcttttatggatgctgggtgaggagtggtcagggtaggggcagggtcggttgagtttcacgcttctgagtgtgacacgccctagtgggcatgtgcgttagtcggggtggcaggaacaggaaaggtgaacccggaaatgctgagtcagggtgtccgaggtggcgatcgccatcttggagtcttcaccggagtccaatcactgtgaaccaaaaacgaagtcaaataacaagtttcacactttgggaggccaaggtgggtggattacctgaggtcaggagttcgagaccagcctggccaacatggcgaaaccctgtctttactaaaaatacaactattagccaggcgtggtggcgtatgcccataatcccagctactcaggaagctgaggcatgagaatcatttgaacctgggagacggagcttgcagtgagccaagatcatgccactgtactgcagcctgggcaaaagagtgagactctgtctcaaaaacaacaacaacaaaaacacccaaaaaaacaagtttcagactgggagaagatatttgcaacatgttaactattgagagattataagaaaaacaaggccaggtgcagtggcttctgcctgtaattccaacactctgggaggccaaagcaaaggctggcttgagggcagaatttgaaaccagcctgggcaacataatgagagcctgtctctacaaaagtagaaaattagccaggcgtggtggtgcacacctgtagatttagctacttgaaaggctgaggtgggaggatcgctcgagcccaggaggtcaaagctgctgtgagctatgatcatgccactgcactccagcctgggtaacagagttaaaccctgtctcaaaaaaaaagaaaagaaaagaaaagaaaaacagaaagccaaatagaaacatgggcaagggctataaacaaataatgcatggaagaagaaacttgattggctaataaacgtctgagatgttaaactgtgcaataggaaaatgaaaattatgtatatatatatttgataaaaatgaaaaggctgacaattccaagcactgataagaatgtggagcacaaggaaatctcatacattgctagaaatagatttgtccatccactttggagaatctttagtaaagtgaaacgtgtatatcttttgacccagcagttcctctcctaggttcatattctacagaaatgcttagagataaacacaaggtgttgtgttcaagaatttttatagcagcattgtttggaattgcaaatgaattggaaataatccagatgttcatcaacaggcacatgggacaaatgttttggtatatttatacaatagaataccttatagcaatgaaaataaagtttgtttacatatatcaaaaggattaatttctgtaaagcaatattgaattaaaacaagttgcagaatgataaacagatatgcaaccagaaaaattctaagtgtataacatgtaaaaatgtcataaaggaaatgcttgaaaatgttagaggattgcaatgagggtatatttgtggtgtctaattttttgaggtaggtggcaagtacagagtatttgttacatcattctctatatttttctgaatgtctgaatatttatataaacacctagtcaatagatagaatccatttgcatgattgaatattcaaggcagtgaagagattattgatagagtaaggttcctgaggtggggagcaggatgagatccaaagtgaggtaaaggggttgtctttaaaaagactgtaaaggagctatgattttggtagacgtatcaaagaattggttgacaattggagagattattttcataaatgtttgtttttcttggcttactaacaacctgaaaagacggtgatgtatgtttatgaatatgcatgagaaaatgtgaaaatagcacgtttgcagtctggtgaaaatgtaagccaatattttagacttatctataagacttcctactaggcttatttacttactatctaggggaggcagcaagatgattttaaaatgatatttcgatatgttttattgtgtcatgtacagtaaagtgggttttcttctttgaaaatcatttaggaactttctaaacttcaactcttttttttttttttgccttagtgtctttgtgttgagtaatcatttttgtgactctgcttcatttccttgctctaagttgagacattttttcccccgtagctgttttcttctgagtatgaaagatgacagcattgaaggcatttatgacactctaaagcaatgtgcattgatttctaagtctgctggaggaattggtgttgctgtgagttgtattcgggctactggcagctacattgctggggtaggtttctgccatttgacttttaaagggggattcaagtctaaaagcaaacagattcatggttgagagggcatatgctattttttgggagtcctgggtctctgttaaattactaaatggctatgtgacttggagtgagtcattttacttctggcttcattttcatctatgatattagatatttagatttgactagataatctctagaatcctttttagctcaggttttagaattctggcttattttagcagtaataagagcagttatcattgattgattgcttactgtatgttaagtttgttataaatgttttacatgaggtactcatttgacccttactacaacgctatgaggtaactatgattatagactcatgccaggaattttattccttaaaataaccttgtgaataaaggtaccattgtctaattttacaagtgaggaaattgagacttagaaagttgttactttctgagatcaatcacttaatatgtggtagagccaggattcaagatttatgcattgacactttatgatgtaaactttagccctttgttagtttactgttcaatgggagtcaagataatagttttggatttaaatcctagctccactacttaactagtaatgtggcctagagttagttattttgtgtctgagtttgtttccttttctgtaaggtgaagaaaatatctaactctgtagaataaagttccagaaggaaattattccattatgttgtgttttggaggtgctgtgatatatacagcactttacacagtggtagagtgagctattgctcacttatctttctagactgtttaaaggcttgtgttgggatcagaagggttaaagaatttgatgaagtatcttctagtcgtaggagtctctattttcttaacatcattctagagtccacttattgctgagaatctccttttaccttatttattgccctgatatagctatcgcatataattcttattgtaaattgccttgatttcttttgggaaaaaggcattgtagtagtgtttatattcttttttactctacccaaagtgtatctttatataacgacctttagaagatgtagagtttaaatttagctaccttgattttggatccctttggcctgtaattgttacatctcattataaattagaaatgccatgaggtaacttagtacataattgtaatttattcaacattttgttgattttatttgggcatttttccaaagcagaagtagagatggagagcaggtaaaacttcatagattgctacctagaaattaggcatcttttttgataaaagaatggggccatttttttcttttctttgctgagtgccctctgtcatttctatcatggtctctcttttagactaatggcaattccaatggccttgtaccgatgctgagagtatataacaacacagctcgatatgtggatcaaggtgggaacaaggtatgctccatgaattgaaagtactggaaatcagaactaaaggtgatttagtcatatacacttaagatggttcatttatgtgtagtttctaattaccttttttttacttgtaaaatcaatttgaggaggtataattattttaatatgcatatactttaaatgtacagtttgatgggttttgacaaatgtatacacttgtgtaatcaccacattgataaagaggtagaacatttccattaccccaaaatcttttctccctcatatacctttacattcagtcacccctgtcacccctacccacacatactttatccctggctctagacagccactgatctattcagctttcttacatgatagttcgtttgcaaagaatttctcaagttgtaattcatataaatttgttacttgaaatggggttgtaacatgtgctctaggtttttctttcgtttttttttttatctctctcttatcacccaggctggagtgcaatggtgcgatcttggctcaccgtagccttgacctcctggacttaagtgattcttctgcctcagccctcccatgtagctcagactataggcctgtgccaccacacccagctaatttttatattttttgtagaggcgggggtctcactttcttgcctaggctgatctcaaactcctaggctcaagcaatctacctgccttggcctcccaaagtgttgggattatgggtgttagccactgcacctcgcctaggttgttcttaaaacaaaaacaaaaactacctggaataacaaaactctccctaattggctggatgcagtggctcctgccagtaatcccagcactttgggaggctgaggtgggctgatcgtgtaagctcacaagttcaagaccacgagttcaagctcacgagttcaacatgacgcaaccccatctccacaaaaaatacaaaaattaaccgggtgtggtggcgaacgcctgtagtttcagcttctctggaggctgaggtgggaggatggcttgagcccggtaggcaggaggttgcagtgagccgagattataccactgcactccagcctgggcggtagagctagaacttgtctcaaacaaaacagaacaaacaaacaaaaactctccctaattgatagaagaaacagtaaagttgagagaattgggttgtttaccttattttatcaacaggatggtttacaactagagtctgccttttgtgactgtaggcacactaatcgcttgttggtttatgaatttctctctgatggactttggggaccttgataagacagatcaactttttgacctacaataagagcatggcttatactgtcaaagcaacttcctttgggctttatgtacatgtcatgtggtgtaaagagagctgggctgttgctgaagaggaggctccatctgtagttcatcatgtcactttagaaaagttaatcttgtttcacattttgtttatatcattcgttcgtttttactcatagaattgtaaaatattacttttacaattatatatggaaaacttacacttttataatacttttatttatgttatttaattcattgtagtgaaaatcaaaggagatactataaaagtgctttgggagacatgatgtttctttgtttcatttttattctgaagagaattatgatttatttaccactagcgtcctggggcatttgctatttacctggagccttggcatttagacatctttgaattccttgatttaaagaagaacacaggaaaggaagagcagcgtgccagagatcttttctttgctctttggattccggatctcttcatgaaacgagtggagactaatcaggtgagagataggtacttgttggtaatagcaacttgattcacatgagctttctcttttttagtcatcttaagtcatgcttaggaagagcccatatgtgtgtgatgccacagaaggcattctgaacaagttaagagatgccgtgcttgtcttcttatatttctattctctaaagtagatgctttgtgacctaaatgcttaaaaggtcatgtataaacaggcagacctagatgtttgggcctgaacctgaaaatgattatttctacagcaaatttccaagagagcttgtaaaagtcaccttatgcttgcagtgtttctaatggattatggttggctatttgaagtttcttatgagtgattttgtcctttcctttttaggactggtctttgatgtgtccaaatgagtgtcctggtctggatgaggtttggggagaggaatttgagaaactatatgcaaggtatgggaaaaatatgaaagaaaacaataatgttttaatcatggtttctcttatttcaggggtccaaatatcaaaagtacttgtcaagaatcttttgaagcatctaagagaaaaagtgactaataattttggtcagatttgcttcctgactcttcaccaaaattgagttgtgtcttcttctttcttaaaactttggaatgtataaataggttcttgggatttttaattgatccttttaaaatttaagatgactagtagggttattattttgctctgtcatatagtacttttgataagctatgctttatgttgcataaaggaatcatgagtgactaggacacatatgtcagtagtttattaaaattaaataggtcaggtgcagtggctcacatctgtagtctcagcactttgggaagatgaggcaggtggatcatttgaggtcaggagttcaagaccagcctggccaacatggtgaaaccctgtctctagtaaaaatacaaaaattagctgggcgtggtggtgcacacctgtagtcccagctacttgggaggctgaggtaggagaattgcttgaacctgggaggtggaggttgcagtgagctgagattgtgccactgcactccagcctgggtgatagaacgaaactccgtctcaaaaaaaaaaaaaggaaaaaaatttagcacagtcttaagagatttggcttccttagtttttactcctttttattatgaaagatattattggtttagtgggattgcgatcatctgaaggcacctaaaactgcctcattttcccctatggctttagctagagtaaaataaatatcatattcctttttttctttagcaaaacttagagaaaatttaagagttttcataactttatattttaatgtcttcaagttgtctacaataaagtttttttagggaatatatattaaataatattatctgtgcctttcagttatgagaaacaaggtcgtgtccgcaaagttgtaaaagctcagcagctttggtatgccatcattgagtctcagacggaaacaggcaccccgtatatgctctacaaagattcctgtaatcgaaagagcaaccagcagaacctgggaaccatcaaatgcagcaacctgtgcacagaaatagtggagtacaccagcaaagatgaggtaggtagaaaaaattcttcctagagtactaagaagagaaccttaggcagttattatttgtgaattcctcacttgatttcacttgagataagtgaagggagtttgcatagttgtaagcagaagaacactgttaaaggcagagagcaaaggaaggaaagggtatgatctgtgcctataaatgttttttagtctaagccgtgtgggaaagacacagttttttcttatacacacatcactgtaataacatttactcaagaaaaatagaaatatacagttatgttagtttaggacacacacaaaaatgtgttaggatgtacattcaatttaaactatgtaagccttgagcctggaaagtggaggctgcagtgggctgagattgtgccactgtactccatcctgggcgacaaagtgagaccctgtctcaaaacaaacaaacaaaaaaccaaaaacaacaacaacaaaagtatgtaagcttataaagagagtcctttcagtgaatggtgagatcaaattctaatctcaagtctgtaaagagacttcacagaagaatcaaggctagaaatgggacatggatttggtgttttaaaaaaaagtttgagagaggagctttccatttggaaagagtggtctgtatgatacaccagagacagggctgggttttatgcagtgtggcaagtaagtctgttttgatggtgcaagtagattaattattggaatatggagagatggctatggctgggggaagggagatagaaggtagaagctgacacgtcacggataggtagcccttgtaggtttctgagaggaaaatagcatcaaaatgttaagatgaaaaggaaggttcttgcttctggttacagagtgtcttgctgtgagaagggattagaggttagcctagggagattgttgtactagttggatgacaggctgctttgatcttggatgtaaactatggaaacgaggaaggagtagatcctcaattctaggaccttaaaaaaaaagacaaatgaaaagtcaggaagtaaatggaaagtgagttaaatatactgctaaggttacagtttaattcaaaatttattgtgcagtagctatatgtaaaacacaatgttaagtgctctgagaatataaataaatatgctgccctctggaaacttctaatttagttggaagacatcgacatatattgaggtaactattatgcaagacagattatattatagaggctagagtgacatttttaaaataaaaatcagataatgtcatttgtctgcacaaaactactctttggcttgctaacccatgcagaattccttttttttcggggggcgtcaagatttcactctgttgcccaagctgggctgtggctcactgcaacctcaacagagttctttctttttgcaaattgagctataattcactctttttaaaatgtacaattcagtgttttttttcttttcttttcttttcttttttttagtatatctgcaagtctgtgcaaccattaccactatctaattgtagtatttatttattttatttttttttttttgagacagagtcttgctctgtcaccaggctggagtgtagtggctcgatctcggctcactgcaacctccgcctcctggattcaagcgattctcctgcctcagcctcccgagtagctgggactacaggcgcgtgccaccacacccagctaatttttgtatttttagtagggacgaggtttcactatgttggccaggatggtctcaatctcttgacctcgtgatccgcccacctcagcctcccaaagtgttgggattacaggcgtgagccaccgtgaccggcctgtagtacatttttatcactgtagataatgaaaccctttatccattagcagtcactccctgttcccttcttccctcagcccttgacaaccactaatatattttctgtctctagatttgtggacattgtggacattccataggaatggagtcatataatatgtggccttttgtgtcaggcttctttcacttaacatgttcttttattcatgttgtagcatgtatcagtacttcattcctttccatccagagttcttacagtgccctacaaggtcctacacaactggataacccacctcatctgcggttactttcccctttgttcactttgctccaaccctattaattttcttgctttttctcaaacatgtcaaccatgctcctacctcaggatttttgctccttcttccctcttgaatgttaaaatgcaccccctcttcccatagccacatgatttgctttctaacctgttcagttctttgttcatatgtaacattttcaatgaggtccttcttgacaattctgtttaaaaattatacccccttcatctttatccccagtactctctgtcttcttttcctgcctatttttcttcctggcatttattagacttctgtgattcaagctatatttaaaaaaatgggtatttggcaacatgtgtagaatggagtagatgtgaagggcatcaagagttcaactgggaaactttcagtagtccatgtgagagaagttaagactttggcttgggatagtcataatcaaaatggaaaagaaagtgtattcattcaacattatcaagacttactgtgtgccagatgtgttgctagtgctaaacatataaatataaataagatgatccttgtgtgaagaagctcactgcctcgtgtagtggagaaatcactggaagagctttttcagaaatcacaaattgagatccattgttgctaagggcttgtcagaatatcagtgaaggtgaggtggacgtgtgtgttttgaagaactctgcagtgatggaaatgttctgtatctgatggctattgagcacttgaaatatgactagtgcaactgagaaactcaaattttatttcattttaaatagatatatgtagccagtggctaccatattgcagggcactcatctactgaataatgagataggtatatgtaaaaagctaattataacatagtgtgatatatgtctggtaatagagctgtgtactgtggaacatagggttctctctctctcttacctattttgctgatgcatgttataactaacacatatgactaggtattgaagaaatagaatcagtgggatttagaaatggactgatgaatgatgaagagggagaagtcaaatataaaaatttaaaattttaatgtctgagtattagaggctcacatggtggtgtaattgacacaggaagtagaaataaaaattgtgtgattcttgacctgttttttgcattccaggttgctgtttgtaatttggcttccctggccctgaatatgtatgtcacatcagaacacacatacgactttaagaagttggctgaagtcactaaagtcgttgtccgaaacttgaataaaattattgatataaactactatcctgtaccagaggtatgaatagatttctctgcttattggtaattattgaaatccaaattgaaaggaatcaatcatgatcttcaagtcatcatttaaatggttatcaataaaatggtttgagaaaaagaggtagtctgtctcatttggtacagaatgttgcttttcctgttcagtaatgttttctccttttctttaaaatctgttgacacaaaggcatgcctatcaaataaacgccatcgccccattggaattggggtacaaggtctggcagatgcttttatcctgatgagatacccttttgagagtgcagaagcccagttactgaataagcagatctttgaaactatttattatggtgctctggaagccagctgtgaccttgccaaggagcagggcccatacgaaacctatgagggctctccagttagcaaaggagtaagtatatggatggaattgtttttgcctgtgagtacctgtagtgggctgaatggtgaccccacaaaaggatatgtccacatcctaattcctggaacctgtgaatttaatttcatttggttcaaaaaaaggtattttgcagatgtaattaagaaccttgagataaggagatttacctggatta

SEQ ID NO: 68 - DNA, 11989 bp, Homo sapiens
  source 1..11989: mol_type = other DNA
gcagacggcaaccgggccgctgattgggcggcgaaggagccattcggggagactctggtgggttcggctgccccaagagtgataagttcggcttcagacacgccttagcgccagcagtgagtcggagctctatggaggtggcagcgggtaccgagtggcggctgcagcagcgactcctctgagctgagtttgaggccgtccccgactccttcctcccccttccctcccccttttttttgttttccgttcccctttcccctcccttccctatccccgacgaccggatcctgaggaggcagctgcggtggcagctgctgagttctcggtgaaggtgagttgagccgctgccgccgccgagtggagcgctctaaaatggccgccgtccctggtcgcttcttctcgagtggtacaaaatggcggccgcaggcggagccgggtggggcgacccttttttagcatttcctctgcgcttcagatacctggaaagtcttggcttttgttctctcttcctgttgctgacggagtagaaggaaaacgtcagtgttggccaggccgccgtgcggtcatggccggatggccgacgcctgcagggacgaggccgtggcggaccgaggcacggctgtgctcggacggcgagggagcgtggctcggaccgctagcgccgtggcgggaggcacgcgggccggcagggaaggccaggccgttggcgcgggaccagggaaccgcaggcgtcccggagcctggcctcccggcggggaggtgtgtaggacctggagtcggcaggggctgcccttcgtcggggaggaaagagagagtgatgatttctgccccttttgtcagcagaggaggccgtggcgaggcggttgtcagtcccggggggatttatggtgcaggagggggcccgcttggaggcggcgggtgggcaggaggccgccttcctgcttggagaacaaagagctgggcgccgggctggcgggggtggcctcagctgctcctccccgtcgagcgacccgggcctcgcggggaggttgtcggaagcacttccctaacttgcgcctgggtgggaggaatgctccgctcttttgttcccaggaagggaaaaacggggcggaggttcctgctgccatgttgtggccctggtcttccgcctgcaagtgctagtcctgtacacccggccccctctcgcgcgtctttccacgagctctccacggggaggaggcgaaagggtggacaggggaaaactgctgaagagctttcggagagacctcatctagtcgctggcctcgtcaaggcagtaaaaattcctagggcagacattttccacgtgatgttgctcgtgtctgtagttagacttttctattgatctcagtgctcagttttaaagatagtagaatgtggctttttcaaaagattcgttctgagccgtttaaaatgctcttgtgttctacgaagtctctttgcatccttgaacaccggggaatttccaggtggctaaacaaaatgtaattgtcagtgttttgagtacattttaggttagtcttacagatctgcaatgcagtgacagtgccaggatctgaaatacgttgtaattgaatgaaggcttatagatctgtatgttagcagtgtctaattttggtgctctttctcgttccaggtatttcatttctcctgtcccctcccctccccaccccatctattaatattattcttttgaagattcttcgttgtcaagccgccaaagtggagagtgcgattgcagaagggggtgcttctcgtttcaggtacttgtagatttattttggggaatccttttgaaaaggccagtctcaaaaagtagttaacacagcaaataagtccgacttaatgggctgcaattttcatttgaaaagttcttaagttttcattgacagccttctaagaactgccatctgaagaataaataaaatcaattatttgcctttcctttgggtccgagttcagtcttcatttgtagcataatatacaagcactaaaatacaggcctggctccagtctgggcaaaatagcgagacccccatctctacaagcaaagcaaaacacaaaatagatgcttattctttttgagtgagacatagttgggatacagtaaacaatttttttcttttaaatagtgcttcttcgggcggaggaggaagtaggggtgcacctcagcactatcccaagactgctggcaacaggtgtggtaaacatgtaaaaaaacagtgagctttatttaacagattaaaagtctttcccatgtgacggtataattaaggcaatagccatcaagactcctaatcttaaggggcgtggtttctgttgggtatcctaaatacagaatatcagttcctgattattccttagccaaattttctaagtgagttgagactctcaagctgttatttttttccttattctttgggttatttttactaatgtgtttttctgaaatcagtagctattattcctactgattgttattagtaaagtagtacgcactcaacatggtcaataaaacattagaaagtgtttattggcagccggtacagtggctcacacctgtaatcccaacaacaactttgggaggcaaaggtgggagggtcgcttgaacccaagagtttgagatcagcctgggcaagacagcaagaccccatctcttaaaaaaaatgttaattttcaaaatgtggttccacagcgttgatactgggaatatttactagacatgcaaattcttaggccccaccccaaaccagtgaaagcagaaactgggtgggcccagcaatctgtattaacaagcccttcaggtgattctgatgcacactactgttccagaagcactaatttccagagttggctttcttggaggggaagtcgagaaagcctaaattacttttttctatgtaagagaatttatgatgtttaacatttggtgtgtgacaataagtgtttttgctgatttttattaatcagcgagttcctggggaaaaccccagggcaaaacgctcagaaatggattcctgcacgaagcactagacgagatgacaactccgcagcaaacaactccgcaaacgaaaaagaacgacatgatgcaatcttcaggaaagtaagagggtaagtttcaaggtctgttttactaaaagatgggaagtgtggattagctgtgtttggtgtgtgtgctgtattactaagaaggcaaggttcatgcccagagtatgtatgttttaatgaatcctcatggtagcaatttttaaaaatatcttgaactggccaggcactgtggctcacgcctgtaatcccagcactttgggaggccgaggtgggcagatcacttgaggtcaggagtttgagaccagcctggccaacatgttgaaaccccatctctactaaaaatacaaaaattagccggacgtagtggcaggcgcctgtagtcccagctactagagaggctgaggcaggagaatcacttgaataccccacaggtggaggttgcagtgagccgagatcacgccactgcactccagcctgggtgcagagcaagactgtgtctcaaaaaaaaaaaatgtatcttgaactgaagaacagcacgtcatattttggggcttcccgttgctttcagccattggattgcaatccataatcctgtcatgctagcatttcccttgactaagggaagtgctatgttatttaagccagtgaggcagggaatataatggtcttagttcatggtctagccttgataatgagatctttgcgctctaaccttgagaaagtgagaaaggattcttgtcaaacagctggggaccccccagtccaattcaaatcattgtaattaaaataacaggtttatttcagcatccctttggttttagatgagtaagaaaacatgtcttgattttttaaagggagcaagttagaagaaaaatcagtataatttaaaagcagtttttcaattcaaattctgtgtattagctaacacttaaaatgtaattcctttttctccagcatactaaataagcttactcctgaaaagtttgacaagctatgccttgagctcctcaatgtgggtgtagagtctaaactcatccttaaaggggtcatactgctggtaagttttaaatattggcttaactcaaaagggagagggaactgtttaacaaactcaagttgtgtttttttacacttggattactacttaaaacccttaggtgtgagttagataggtatgtatttttgaatactgatggtgattaaaaagaaccactgactttagtagcattagattgaagaggtaaatgttaagttcatggtatggttgaagaggtaaatgggagtgcttagcaagctgttctttttcttttgtggaaaacaccgtatttaggtcttggaaatgcattgtatgacagtttatgtagacttgaaagttttgatatccatggcattttctgactcccaggagatggatgtgactagatgaaatctgtataactggacatttttggtagactgtaatagctaacatttaggtggttgtatttttcctaaaggaagggttcttggagaagttttcatatttagtttaagcaatgacattttctgtagattgtggacaaagccctagaagagccaaagtatagctcactgtatgctcagctatgtctgcgattggcagaagatgcaccaaactttgatggcccagcagcagagggtcaaccaggacagaagcaaagcaccgtaagtggtagtttttgtttgcttgttttaaagttgacttgaaaaatttccttaataaagcatgacaatgtcttcttttccagacattcagacgcctcctaatttccaaattacaagatgaatttgaaaaccgaactagaaatgttgatggtaagacttatagctgataataagtactactgtatattttcagcttaattctgaatgttggcttacttcattggtatctttttcagtctatgataagcgtgaaaatcccctcctccccgaggaggaggaacagagagccattgctaagatcaagatgttgggaaacatcaaattcattggagagcttggcaagcttgatcttattcacgaatctatccttcataagtgcatcaaaacagtaagtgtgacagggaagttaggcgaatgtagtcagtcgtttggaggaaatgagtcaattattcatctaagagggaggttgactagttaaatacagatgtgcaacaaaatttactaaacagaataatttgaaatacgtggtgtgtttgacaaagtagagttagaactgatcaaccagactggtagaaagccctatactagattctgtaggaactgtgaatgagtcagtgcaaacataaagggaaagaaagtactacgcctaaaccagagtaactaaaactttgtcaccatggccttttattcttgtagcttttggaaaagaagaagagagtccaactcaaagatatgggagaggatttggagtgcctctgtcagataatgaggacagtgggacctagattagaccatgaacgagccaaggtacgtgtgtagctgatgaaagtagtacaagtagtttgtctttaaatcaagctattgatttttgtgacatcataagggattgccatatttagccattaactgggttataattttagaagtcttaaagctgtaaattgaacacatttgctttagctcttccaatgaatgtattcttctcttatcagtccttaatggatcagtactttgcccgaatgtgctccttgatgttaagtaaggaattgccagcaaggattcgtttcctgctgcaggtaatactggtttctttaaatttgttggtaagctgagtttttggtttaggaatattaaaataaaattatttttcaattaaaggataccgtagagttgcgagaacaccattgggttcctcgcaaggcttttcttgacaatggaccaaagacgatcaatcaaattcgtcaagatgcagtaaaagtaagattgggttttgttttgtttgtcacatagactctgtgtgtgtagaatagaatgggtttcctcctcacccaccccaaacgcttgaggggtctgtctcatcttagtggtggagcttaatgtttttagtgtctcgtcttccacttttatttttttattttttgagacggagtttcgcactgtcacccaggctggagtgcagtggcgcattctcgattcactgcagcctctgcctcccaggttcaagtgattctcctgcttcagcctccccagtagctgggactataggcgtgcgccaccacaccccgctaattttttgtatttttagtagagacagggttccaccatgttggccaggcttgtcttgaactcctgacctcatgcaaaccaaggcttgggcctcccaaagtcgggggattacagatgtgagccatcatgcccagccttgtctgccatttttggaagaagttatttacagaaataacataaattatggtttaatattctaggtttccccccctagttgcaagaattttagttttaagtgaaatagtgtccagagacaaaaagtgcatattcacttcatttctaaaggatctaggggtgtttattcctgctcctatggctcaagggatgagaagtgacttctttctggagggaccgttcatgccacccaggatgaaaatggatagggacccacttggaggacttgctgatatgtttggacaaatgccaggtaattttgaaaaaacaatggttgcgttaagctgaaaaatcagttaactttagttttgagagttgtccgtatatgtattttaaggtagcggaattggtactggtccaggagttatccaggatagattttcacccaccatgggacgtcatcgttcaaatcaactcttcaatggccatgggggacacatcatgcctcccacacaatcgcagtttggagagatgggaggcaagtttatgaaaagccaggtaagtaatatttgagtgtgcatgttttctaaaccttatctgcaacatttatttcaaactgaaatgtttatccttaagattagtaaagtattagtaaaatcacatcactttatttgataggttagatttttattcttccctgtttcatcttttactttctctgggcaaattcagttaaactaactttatggcttggctcatccctttggtacttgattaccataatttgtggacccctttttatctagactttctttctccttttctgaaataggggctaagccagctctaccataaccagagtcagggactcttatcccagctgcaaggacagtcgaaggatatgccacctcggttttctaagaaaggacagcttaatgcagatgaggtacatttgcctatgttacttatataccatagtttgtccattcagaaatttattgcccgatgattataaaaagacgcgttattaagaggactttatgctggagttcttgacgtttttctctcttttctatacttctttttctttctttgaatgtccagcgtcctgtgagcgaagattatgagatatgagggcaagtctcctaaagtctgttagagcaagaaaactggttgtcaaaatattgtggtttctttctttgtaagggtgatttaactaaggataaaacagggcattttctaaactgtagttaaatttgcagttttttatttgaatattttagtcatgctaattctaagagaatgtaagatttataatagtatcttactactgtatgcatcagatctttaaattttttgccaaaaattaaacctgttaatgtggagtaccttctttagtttttcaaaaagcttaatgtttccctagattctgtcactgtataggattttagaatgttgtatttaatatgttcgccaactgcatgttgttaatttagatatattttgttttcaattccagattagcctgaggcctgctcagtcgttcctaatgaataaaaatcaagtgccaaagcttcagccccagataactatgattcctcctagtgcacaaccaccacgcactcaaacaccacctctgggacaggtacagaccatagtaggacagcattttctaaagatatctgaagacttttttctaaatttagtgtgttcttccccctaatttcatagtcctctttttaaaaaaagtctgtcattgcttgttttttagacacctcagcttggtctcaaaactaatccaccgcttatccaggaaaagcctgccaagaccagcaaaaagccaccaccgtcaaaggaagaactccttaaactaactgtaagtttcaaatatcccattttagtgtaattagcctgtatttgagatagagaatacattaaagatacttgtgttcttcacaggaaactgttgtgactgaatatctaaatagtggaaatgcaaatgaggctgtcaatggtgtaagagaaatgagggctcctaaacactttcttcctgagatgttaagcaaagtaatcatcctgtcactagatagaagcgatgaagataaagaaaaagcaagttctttgatcagtttactcaaacaggaagggatagccacaagtgacaacttcatgcaggtaggacactttactgattgtgtggtaagaactcttaccactcaaattcgaaaactgataaactgttgtatatttctttcaaggctttcctgaatgtattggaccagtgtcccaaactggaggttgacatccctttggtgaaatcctatttagcacagtttgcagctcgtgccatcatttcagagctggtgagcatttcagaactagctcaaccactagaaagtggcacccattttcctctcttcctactttgtcttcagcagttagctaaattacaagatcgagaatggttaacagaactttttcaacaaagcaaggtcaatatgcagaaaatgctcccaggtaagagaatgctgacttgtttgttttgtttttttaatattatatctagagatttcaggtaccttgagtggatttatgtaggtcagacagtctgattgtcctgctcagataatgataaacattaccacagatctcacctataaagagagatttataatttaactactttcatttgatccgtatgttgagtttttttcatttgctgggttggttctctattctgctacatggatcttacatacttggggacatcatttgtgaagctctgctctctggacaggacaacttggtaaaatgaactattagatgatgcaggtggctttgtctcttcagaaattgatcagaataaggaccgcatgttggagattttggaaggaaagggactgagtttcttattcccactcctcaaattggagaaggaactgttgaagcaaataaagttggatccatcccctcaaaccatatataaatggattaaagataacatctctcccaaacttcatgtagataaaggatttgtgaacatcttaatgactaggtaagacgaatggttttctgcatatggtaatgtttcatgtactggaaaagaagcgtaggagactaagagttgtctcttgagcaagaaaactcactgttgggttctaacaagacctctttctgtccagcttcttacagtacatttctagtgaagtaaacccccccagcgatgaaacagattcatcctctgctccttccaaagaacagttagagcaggaaaaacaactactactatctttcaagccagtaatgcagaaatttcttcatgatcacgttgatctacaagtcagtgccctgtatgctctccaggtgcactgctataacagcaacttcccaaaaggtgagaggacttgtatcagaagaacggcgtgaggaagttcttaaacagaacactaaataatgggcttattacttttttctttttttttttttttttaaggcatgttacttcgcttttttgtgcacttctatgacatggaaattattgaagaagaagctttcttggcttggaaagaagatataacccaagagtttccgggaaaaggcaaggctttgttccaggtaagtcttttgttaaaaatttggtctgcttacttcagtttgcttggtattaacttcaagttaagagcctttttcaactgaaatacaggcaaggtagtcctagttagtagtttgtcttcacctgtacatttcattctgcactatttgaagctattattaagtaaagctacacaatgaatcaattctagtggtgtataagatgttagaggtagctaacttttcaaggagtatagctacttatatacatgggagtgactgtacaagtttcgatttaagcttttttaaaaacatcagtaaagaggaaattgtagctgggcacgtggctcatgcctgtaatcctagcactttaagaggctgaggtgggaggatcacttgagctcaggagttcaagaccagcctgggcagcatagtgaaaccctgtctctaaaaaatacaaaaaattagccagacgtggtgacatgttctgtggtcctggtcccagctactcgggaggatgtcttgagcccaggaggcagaggttgcagtgagctgagatcacaccactgcactctagtctgggcaacagagtgagactgtgtctcaaaaaaagaaaaaaagtttaaatactatatatttttctaaaaagaggagatgtttctgatttctcacaatttgattttttcttattgaatgaacttgtagccctaggggaagaacatcagggcattctctcaaatcacctgaagagcagtttaaaaagcaggttccaggcctattcctagagattctggtttagtaggtctgtggtacaaaatccaggtgattctttctcatgctactagttttccagggggcccaggcttgagaaacattggtcctgcagcatcttcctacctttttattgctgatgataaacaagattcacgaggatcatccttgcaggattaaatctttagctctgtgttgtcccaaatctggataatataccactgttcgttaacttaatatacaaattgttggtagggatatccttgtttcatattctaaaactgtgtagtaccacctaaaactttttggatggatttctgtttatatcatgaactattttaatttacaaatcttaatttataggtgaatcagtggctaacctggttagaaactgctgaagaagaagaatcagaggaagaagctgactaaagaaccagccaaagccttaaattgtgcaaaacatactgttgctatgatgtaactgcatttgacctaaccactgcgaaaattcattccgctgtaatgttttcacaatatttaaagcagaagcacgtcagttaggatttccttctgcataaggtttttttgtagtgtaatgtcttaatcatagtctaccatcaaatattttaggagtatctttaatgtttagatagtatattagcagcatgcaataattacatcataagttctcaagcagaggcagtctattgcaaggaccttctttgctgccagttatcataggctgttttaagttagaaaactgaatagcaacactgaatactgtagaaatgcactttgctcagtaatacttgagttgttgcaatatttgattatccatttggttgttacagaaaaattcttaactgtaattgatggttgttgccgtaatagtatattgcctgtatttctacctctagtaatgggctttatgtgctagattttaatatccttgagcctgggcaagtgcacaagtctttttaaaagaaacatggtttacttgcacaaaactgatcagttttgagagatcgttaatgcccttgaagtggtttttgtgggtgtgaaacaaatggtgagaatttgaattggtccctcctattatagtattgaaattaagtctacttaatttatcaagtcatgttcatgccctgattttatatacttgtatctatcaataaacattgtgatacttgatgtagtg

SEQ ID NO: 69 - DNA, 32744 bp, Homo sapiens
  source 1..32744: mol_type = other DNA
atgggcgtgccactgcccgtccgctcttcagcagccggtcgcgggcggtggaaaagcgagtgaagagagcgcgacggcggcggcggcggcggcgcagctattgctggacggccagtgggagagcgaggcctgagcctctgcgtctaggtgagaagggggtgcgccagcgggagcggccgggctgcgggctcctcctcgcctggctcgggaagtggttgcgggagctcgggctgcaggcctggccgaggcgggggcgccgaccagccgtcccgcccccgcccccgcccgggtacgcccagaagtgagggcgcccgcctcaccccgggtggtctctgcccctctttgccccgccgccgcccttcacagggccgggaccgcgtgggggacgtacggtggggcctggtttgcagccgcggagcccggggagccgcctggggtgggaggccgctagaggtggcgaaggtggggcggggtggttagccgagcagcgggctccgcgtgctcgcgggagggtagcggcaaagggaggcctagtgattgcaggattccgggtctggggaggaagaaagtggtgggaaataggtgatgctcagaaaagggtgctgagggagaaggcgcggggccggggagtgtggttggcctattagaagtaaggattgatagggcctgggtggagatcagctgggagtgaaggggggacgggcttgggttttgaaggtgaaggtctctggagaactggggacacgtggatctggagtaagaggcacctactgaaaccggaaggtggctgagaaggttttatgtgaggtgtggacgggaggctattggactagaaggcattagttggtctgttaggacaaagtatacaagcagcaaacgcggtagatttatgtgtggtaggtgaaggctgtgaatcttttatgagtagttgagcaagaacagttgtctgattctgcggtgtcggagagtggagggtctcaggtagtgtcttggtcaggtttgaaggttaatttactgctagtggagggccaaatactcaaaagagtttttaattctcactactggggctgatcctcctcctacactccacccctcctgccatccctgtgacagttcatctcgttttgcctcagcagcacaagaactcactccctccgaagtaatggcatacatattgtttgcttttgactagatggcagtcaggaatcccttaattctttatgttaaaaaaaaaagtgttggtttaaagacaacatcagaagatactctcagaaaatctgccctccaggggagtttctcagctgtcatgttgggcatgtgtaatatagcataaaaatgatgcaagatctcttacagtaatacaagtgagaattaacgtataagtacaatcctgatgtatttttttcaaattaatttaaaaagtaaacagagacagggtttgctgtcgcccaggctggagtgcagtggcgagatcatagctcgttccagcctcaaactcctcggcccaagagatctttccaccgtggcctctcaaaggcttgggattacaggggtgagccaccccacccaggccctgttattccatacattttccataaaattattttataatttttgttttgttttgtttttattttataaatttgtgtgtgtgtgtctcgctttgttgcccaggctggagtgcagtgacgcgatcttggctcgctgcaacctccacctcccaggttcaagtgatcagctcttgcctcagcctctcgagtagttgggactacagagacatgccccaccgcaccggctaatttttgtatttttagtagaggcggggtttcaccatattggccaggctggtctcgaacccctgacttcaagagatccatccgcctcggcctcccaaagtgctgggattacaggcgttagctgccgcgccggccaaaattattccataaatttatccataaaaattccacataaattttctggagtttgattatgtattaggcttgttgggaaatttattacccttgtgaagaattttgtagctaagtagcttgagggtttttttttttttttcactcaggaaagacatggtatgtatgcatcactgctattctatttgaagcttttggaatttttatttatggggtgtggatagaggctggaggcagagactgaggtcagagaagaggtagtagaaaagaaggtggcccactaccatatttccagtgtatttaaatgggagatagagtttctgtttgaggataggacaaaaggtttgtgaagagttatagagtcaaggacagaagccaaagagagcatttgctgtgtaacatgtttgcttgttaaccagatcagcaaagcattttaactaatggaccattatttatgatctagaaacaattttgtgaaagcgatttcttagtgatgctgtttactgtgatcacatttgcccttagtataacaatacctaagtgctgaggcgacttgcagtagagaagtaatctgagtggcgtggagtgaatcagggaaggtttcctgaaagaggtgagttttgagccatcatgtgaactagaagttgggatgtgggttattacaagacatgaggatgacattccagtagtttgtacttggtataagcaactgtggacaagagtgacaaattaaaaatggtttttaaggatgattgaagattcgaatgaagatttaggggtttggaaatcaaccaaggctatgttgcagcttagctgataaataattttttatgttggttaggagagaaaattaacagttgataatggattggagataggtagtaaaggaaagagcataaaatatttgatagttataggagaatgaagtgaaagtaaggttattgagaggtaggtttaacagtcaaccatatatcataagttggaaacatttttgagtcctgtgctagagtatattgataataatagcaaaatttattgggtgctactttgtggcagacactgttttgaaccttccaaatattatctcatcttctgattatctgtattttatagatgagggagataagactcagagagatataacttgcccaaggtcacacagctaggaggggacaggtcaggattggcagaatcagtcagtaaatgttaattgagcatctgcttgatgccaggcactgtagtaagtgctgggtgttcaatattgacaagaaaattcaagtcagacctcatctattttctagagattgtcagtttatgtaagaagagccagtgaagaaagaaaaagattagttggagagatttctgtagatactgaggaatacactgtttagagaaacctgggatagagttttaaagaggtggtggttagcaacaaagtatatagctgagagactcagaacgattgagaagaaaccattgagttaagtaagtaaaaaagtaatgtgaatttagtcacaagaaagctggaatgaagatattaatgtttgggctggtagttaattgtgtttagtggcaggtactctatacaaatttaaatattttcacagttatggtcagattcataggaaagatgatggtatgaccccttgtaatgttttaatctttggctggaagatcatggatgctttaaaatgcttgcactttttagttttttcaaatttaaaaaaatgagcaggcagaccgcctgagctcaagagttcaagagcagcctgggcaacatggcaaaaccccttttctatccaaaaaaaaaaaaaaaattagttgggcaaggtggtgtgcacacctgtaatcccagctacttggggggctgagatgggagcctgggaggttgaggctgcagtgaaccttgatcatgccgctgtactccagcctaagtgacaaagtgagaccctgtctcaaaaaaaaaaaaaaaagtgagcattatttttataattagtggggacaagcattcaactgaaatgagctaatactcaggaaaatgtgggtaggctagtctgaacttggggtaggagagaagatagtcttatttcagtccctacttggtaagagccaccttggtaggtgtgttcctatcttggaaatgactggattgtcactgatggaaactgaaactgtatgtactgaaaggtggtatttgcttaacctgaaggatcaagttactaacccaccctgaatggtggagatacagtctttgttttcctgaacacttgttttcttagagtttaatacatgaatttaaggtttaaaaaaacccaacaaaccactgatagaattgtgtcattttaactgcttcttttggctttatatccttcttcctacacattggttctatagttcctctcattaatgggtttgcaacaggcttagagtttcagttcagtaagacaaaatggaagtgctggatttagatatagctgatcaacttaaacacttataaattcaccattgttttcggttcccaatttgaagagtggagacagaagtcaagaaaataagcttttcttattcaaagaatgattcccaaaccaataggatttgccctaggatcagtacagacttattacagtctcctaaacagagaggaaagagttgcgtaaattcatctagcttttagtttaatttcacttagcccatagggattctgagaggaaacgatattaatgtgattcctatttcatctaggcactgtagcataatccttcaacaaattaccacatttgattctcatataattctctaaaatgtgaataccatattacagatgaggagagtgagactcagagaagttagtaactttccaaggttggagagctaagtgacagagctgggattcaaacctttctttgtctaactccaaaactccatgcttgtgaaactaatagcacggaggactgatttataccttcaactgaaaaaaaatgccacaagccttaggtatttgttaccttagaagatgagactcttgctctgagtgtttgtgctctgtgacactgcctctaaataaatgacagtgattttttagtgtctaataggataccttatattttcttgctttagagatgtatgttttcatattttagaattttttgaagatgtatattgtctatatttacttcaaaatgtttgtgaaatggttactatgtcttaaatgtatctcaaaattgatgaagcatggcatatgcctgtagttttcacacataagtatcttaccaatttgttgtgcactttttcttcccagccttccccatcttatcctattatttttttaaatatgatttaataaataattgaaatatatactaccaataaaataactcattctctttcattagttaacattacagtgtacagaaaagcattatgatgtagaaaattcaaattgggccgggtgcggtggctcacgcctgtaatcccagcactttgggaggccgaggtgggcggatcatgaggtcaggagttcgataccagcctggccaatatggtgaaaaccccatctagtaaaactacaaaaattagccgggcgtggtggcgcccacctgtagtcccagctactcgggaggctgaggcaaaagaattgcttgaacccgggaggcagaggttgcagtgagccaagatagcgccactgcactccagcctggacaacagagcaagactccgtctcaaaaaaaaaaaaaaaagaaaaaaagaaaattcaaattgaactgtgaatcagcagatctgagctttaattttggttttgttagctacttgatgtgtaacttgctaggcaagtcacttcccctctatgggctttagtttcctcatctgtaaaatggagggggaggagaaattttaagcccgtcttccttgaataggttgtatgccttctttctaattaaaaacatagatgccctagatgcctttcttaaaaactgtattactgcattttacaatattttcttttaatcttccttctttcccttcttaatttagtagagaggataaattatttttggtatcctacatttaccaggacagcatatcttaggaagcagggacccagaaaataatgaatgagtgaatatatgttttatttgagctaatgaaaaattttttaaataaagtaccgtcaaaaagatgttgaagtttcattgaaaagtagttctacctaaagaatgaaacgtgtttagtaaagttcaattggtctgttctgtattggatagatgtacaaagaagaacactcttgaacttgtctttaagaagccctcttactagtaggagaggcaagcttctaaactttgtattatggaaaattgacagcaataatacacacatcaccaactttaagagttactaacttgtggtcagtcttgcttcatccatacctccatccacttccttctttattttgaagcaaatccctagactttttttttttttttaaccagttgttaccatgcagtgtgataagtataataatagacatgttaatccaagtgaggtgcaaatttgttcatataaatatattttgagacttgagcattatactgttctgggcacgagaaattagatatagtaagctactgtagggcagggataatataattgaagagactgtacatatgtgaaacagaatgtagcaacactggatcatgtgccaaaattggtggtagagactcttaagtgggaactgacattattttagaatgaaagtagaacttaaacaagtggcgatagagagaaagaacattcagggataaggtgagggtaatcacatggataaagcgtgcggttaggaaatctaattttggcgctatagaataagttatatctaaatctgtatctctctatctttatcttttagactactacaacatgtaattggcatactgtagatgttatatcagaacttgaacaaagccggttgctgtagcagaaattaggacacactactttgtgaatatatcactgttcgtggttaattttttggcacgttctgttaaaaagccttctaaatatcttaataccacatgtattaatggatccattcttgttagaatgtttgtgggtttgtgccatcagctttggtgtgcagttgtgtgtgtgtgtttaacttaaatgttaactatttgacaattttaagattattttgaaatatctagtttagatcattcttgtcttacatgaaattttttccagaaatgttggcataattcatgagaaatccttgaatttagggaattgttaccattatagcttattttgaagtattctgagaataaaatcttaaagtatattccctaatgcagaaattgcttgtcaaaggtcatgaacttctctgagcatctcctcaaagtgttgtgctatctcatcagaaaaatgtacgttcaaatatccttggggggtctgtggattctgtcttaataatttattctttaatgtgtaggcagaaagcatactgctaaaattcaactcaattatctttctgtgtgttctgcttgccttttacaaacaagtgtttttaattattaagagtgataaaatgataaagcttattattgcaaatgcctaattaaaaaattagacattcttaattgaattcttggggaaaaacaagctgtagccagtttaataaataggaattatttcactaaagattttggaataagcatgtggtactttatttatggctcctgtccatcctggattaacaggaagtagaatatatgacatatgaatgaataaatgcataaatacctttttttcccccagaagtaaaaactttgacttactgtgtccttaggcagttaagatctgtggaggaaaggatctgctaaagtattttgaggttcacatctgtgttgaaacaaccagaagtaatgcaggagcttagaaactgtttttggctgacaaaggattgattctcagtggagccctgagatacaagtgctcatagttcacttagtttgaggaatggccctaaatgagtttcttagaaataggtggttttaaaaacttgtggattgtaattaaaatgtaattatgataatgattatgagcataagcagaattctcaggagataggaacaggtgaattagctggtaatgggacatttgaccccacagagctgtgcacagactgttcgaagttcagtgaatattaggtgaattgctttaaagtgatacccttgtgacctgttggagttaataatttttcaagtacctaatctactagtaggaaacaacttattccaatacatagtagtaaaaatacagactgtgaaagccagaagagattttaacaatcagtgatctggcctctccttcaataaatttaaagagtgatcagagaggttgacttgcctaaggtctgttggttatggcaatcccaacagcgttgtttctcattacctgatttttggtaagtctattgtgcttatttattttgtttgtcttttcattctggatctcagtatttggagaaggaagtatattaactttagcatggtaactagattattggtaaattggctaagaattccctgaaatgttataccataatgtttttactttgccatcatatactccttccatctttaacataataacccatagttacaagatttattagggtaggcgtgttttaggagcttaattccattccacagttggaaacagatattaagaatccacagttcttaaaacattttcctcatgcttttttatacctttctaggatgatctttgcctaacagcatttagttgcaagctgtgtctatgaacttggcaaagttttaaaaataaactaggaaaagatttttgagaagagagtttgttatgggatttagtcatttaaatacattcctaaaagctgttttttccccactcaaaactagacactggaaggatcattgacatccaggttcaaagaagttactgcttacatgactgatcccgattctgagttcttttgccacatttggttcatgtggaaaggctggctggggctaagacttgcccgtacattagcgacatcatagccagagtgaggacccttagaacagtgcctgtcaagcttttttagtcctagccttttggctgagtcattctttagctcaataatttctactttctaatggaataataacacttgtcaaggtataagcattttttgggaagagctatatggatggttcctaattgaatcacaaaaaatatgcttgtcataaagtctagactaattagaaaactgcaggcctcaaatcctagtgatggaattgtatcaatatattctctacagttataataaaataaccaaaaactaaattgataacgatgagccaaacctaatggtaatttaattaaaaggcaagaataatgacaattgaaaacgaagaccaactaaagacaacacagtttcactgatggcaagtgcccctcttgaaagttacggacttctacgttttgagtatgcatatgtggtaggagcttgcagcattgccagttgcagcaactggatatactagtggaatacaaattgaagtttttggtacattctagtaaagtcttcatttttgcaactcttggtaactagcttaatagtttattcataagtagctttatggattaaaggaaggtcatgttttctttttttttgagactgagtctcgctgtgtcgcccaggagggagtgcagtggtgcgatctccgctcactgcaagctccgcctcctgggttcatgccattctcctgcctcagcctcctgagtagctgggactacagatgcctgccaccatgcccagctaattttttgtatttttagtagagacggggtttcaccgtgttagccaggacggtctcgatctcctgaccttgtgatccacccgcctcggcctcccaaagtgctggggttacaggcatggccacgaaggtcatgctttctaaatcatttatagtccatcaggaggcttggccctttcttggaaaatcattacttttgaaggctggtttagtaatccttgagcttctcatgagcattatttccctagctgtgttgggacatttatgaagagcagggcttagatagaatttagtgggtcttttttttgttttttacctcaggacatttgtaatctttgatatgctaatatacatctttaatctggttgggataaagcatatagtttcctagcaccatttaccacaaatgctgccttggaggactgagtcctgtttttaggttcaggcttgagaacaagattcagaaggcagccataagaaagtgacacaagaaaaatagaaaatacagcatatatatgaagcatacataatttacctttgttaatcttgggcgaagcggtatgtagtatatatgtagtgttcagggtaaatatggtatgttttcctataacatcggttttacttcagtaatttgaaatattttatataaatcttcaggtatattgtgaagtcaaattttataaattttttttagcaaaaaagatattgcaattctgttataaaagtttgaaaagctctgtctttggtagtacagttaaaatattagtatatctttgtatattgaaatatgtgtttcacttctctgagtctgaaagtgttaggattaaaatttcatgtcttaatatgaaaacattattattaaggtaaaaagtgatcaagcacaatagtttacctaaaaaaagagtcatgtatgacttacgggaattactttatttaaaaaaactgttttcttcccctagaaggaaattgaatacatgtttttgcaagcagcagactgttttttccccctccaatttctctaacttaactaattgttagaactatttacttttttgttattttgggtgcttcttcctgtttattattcagtgttatcaagctgtgtgttaacaagaacacagcccaccttctgtaggctttatagtagagaagttaccctactggttctggccttaaggacagaaacagaaacaaaggaaaatgtatattattgaaaaatttgttttctgatcagcagataattttagtgctacaaaactgacatttcctctctcatagagtagaatttgactttttaaaggtgtctttatgtttgatttttacatcactcagaggaattctgaatcttatttttctcagtgtgtaacatttcccaggatagtaagatcctagaagcattttaactcttgtcaaagtgccatgcttatggaacagcatcattatatgaaacagttgtatagtggcctaagaactaatgaacgtctttagattccttactaccgagaagtgccttggggggaagtattggggaaaataggatatagacagttaaatattggtaaatcagtgcttgtgtaggcaaacaaagtggccattatatctacttcaatgggtacttaccacagggttggacactagcatcttttattgaaaaaagaaatgttaaccaggatgctacagctgatctttatttgtggaaaatgctcaataagccttaatttttgaaaaaggaaaaaggaacccactgttattaggagcttgactacactaaataatttgtacactttgggtttgcattttggctctttttttgttgcttatagatttctttcaggtgaggttttcttttttgagataggttctcaccctgttgcataggctggactcaaactcttcgcctcatgcacttcttctgcttcagcctcccaagtagttgggcacacagttgtgtgccactgtgcctggctcagaggatgttttctttgatgttgagtctgtcttagtccatttgtattgatataaaggaatacctgaagctgggtaatttgtaaagaaaagaggtttatgtggctcacagttttgcaggctgtacaagaagcacggcatcagtatctgcttctgatgagggcctcaggaggcttccactcctggtgtaaggtgaaggggagcaggcatcacacagtgagagaggaagcaagagagaaagaggaagagctgccagtctcttttcaacagccagttcttgtggctgagaactgagccagttctcactatgagtgagaacgcttagtggcaccaagccattaatgaggaatctgcccacatgacccaaacacctcccaccaggccccacctccaacattgggaatcagatttcaacatgagacttggtgggaccaaacaaaccatatgtaaaccatagcagtcttaatcaaaacattaagtgatgattgcagttaccaaaatatagtaggaaaaacactggaggattggttttcaatgcttcagatgggaatctatcagaaaatcttaatggatatacttagctcgaggcttcttcataatctaacttctgtaaaacaagttgtcttgcttttgactagaggtgtgtcaactccagatggtaatgctgcagaactttgctccttagttcagctaaaaccaggttcaggagttcatagttaattgaacatgggaaagttaattgaacatgggaatgtgaaattctcgttcagtagatgaggttattgggtagacagaatatttcaaagtgtgagatccatgagtccatatttttaaaatgggttttgagtggctaaaaaaaacagtaagaaacaactcttcgttgtaccgtagtcctgtgaaataggtccaacatgggttggtggttgacagtctcaagagtaacaggcagttacttgatgctgtttgtgacagactgtattttctaaggatggttgcaacagtattttccatcgcacatgtgtgagcttgtacagaccctaactgttctctcattctgaggtgggatttaagtcccttgaatttgggcagtcttgtaaatcacttgtagccaatagaatgtggcagaaaattacactgtatgacttccaaggctaggtcagaaaaggtgagagagcttttgcctagctcacaagaatactggtctttaagccattagcagctttgtaagtatctgactattctgaggtccccatgctataaggaagcccaaactatctcatggggaaaatcgaagaggctaaagtccggagctagaactgctcagccagaattgcttagctgagccctttacaaattcctaactcataaaaattgtggaagaaaataaaatggtggttgttttaaaacactaagttttagagtgattttgttatgtagtgataggtagccagaatactccattccatactactttcccatccatacttttaaattctgtgcttttttattattattattatatcaagtttttgaacaaagtagtgggcaagagtttctctgagtttgtgacaggattatgttatgtgctcttcttcacttgtagtcttttctgcaaaataatacaacccaagcctcatccctgcatatcttaatgggctttccttttagaaatacagatttttaaaaatatatatcttgaaaaaggctataggtcatgtcatccttttgcattcagcctctggcatatctgtatttctgaagcctggcattaatgtgttgttttgttcatgaagatattattgtatcaaacaagcatttgttggccattttacagtgtgtcagtaacaatagtagtagtgaaatcatagacaacgaatatttagactgtactgctttcccattgatgtctttctcatttatacttcatttttctgaatgtttgtggaatattggaaatcattgtttaaaacagaggttggcaaactatggcctgcaaactgtcttcctgtttttttaaagttttattggaacacagccacacccattcatttatttattatccatggctgcttttctggtacagtggcagagctgagaagttgttgctgagattgtatggttcacaaagtggaaaatacttgttacttggccctttacagaaacctttgccagctcctggtttagactgtttcttagaagttgattatcctttttacttttttagttttttacttttgaggcagggtctcactctgtcacccaggctggagtgcagtggcacaattatggctaactgtagtctcaacctcctgggctcaagtgatccttccacctcagcctctcaagtagctagaatcacaggtgtgcaccactacaactggcttatttttgtatttttttttttcaaggtggggttttgccttgttgccaaggctggtctcaaactcacgggctcaagcaatctgcccaccttggcctctcacagtgccgggattacaggcatgagccactgcactcagccagttcccccttttaaagggacatttatttgaagttattttttcttctacttttaaagacatgcaatctaatgaatattaaaagattatttaacgtaactttctatctgctgcttgaatttctttcagtactcctaccatatgatcttccagctgaaagggataagataatgagataagcagaattaattaaataatgacagctgggagtggtggctcacgcctgtaatcccagcactttgggaggctgaggcaggtggattttttgaggtcaggagttggagaccagcctggccaacatggtgaaacctcatctctactaaaaatacaaaaattagctggacgtggtggtgggtgcctgtaatcccagctacttgggtggttgaggtaggagaattgcttgaacctgggaggtggaggttgcagtgagccgagatcacaccactgcactccagcctggctgacagaacaagactccatctcaaaaaaaaaaagacaaagcagcattggatatgggtgtgttaaacacagaaattgcacctgattgggagtaaaaaaaacatagatgaaatactaatattttgttatttgtccatttgctcaaaactgtctcttcattggtaagttttttgtttttttttaacaatttttcatagagatggggtctagcgatgttgcccaggctggtctcgaactcctggcctcaagtgatcctcctgcctgggctcccaaagtgctgggatcacaggtgtgaacaactgtgcttagcttcattggtaggttttgactttgaatttgtttacttgcagaaggcacagaagagccaattttaatagaaaaaacacgtaaatgggctggacttccaggtatagctataggtggtagaaatttttaggtagctggatttaatggttagatattcaatttgagactttccattgcagtacttagtttccctaaataaatgtgtagcagctaaaacatggaactaaaagtccttacaaatatacctgttgtgagttactgggtttgtacaataaatgatgatacagaaagatgcatacaagtagagccagtctagacttgactgcagtactatattgtgtattgtactatatttgtatattctatgtactttattgctttgtgaacatggtgaacattgtgaatgaggtgaatctcacaggagatagaagaaggtacatccatttccaagatcaacattatctcgagagggaaagtaatttttcacattccattcaggaaatccatcctgttagagtcccgttaattatttgtttcatacataagtaaccatctaatgtttttaatacattttccatctaataaagaaatggaatgaatttaagtaataaagattagtaaaagaaggaaaacataggttgagcatcacattaaaaatttttagactatttctgaaatattacagatcagactgacagctgaaggaccatactgagaatcattaccatagaagtaaagggaagatgcataaggaaatgtaattgtgtgcccagtcttttgtgtttattttcacaaaaatgctataaggtggagttgggtgggttggatgttttatctgtattttaaagataaagaaactgcagacccaaacaggtaagcaagctcaacagcaaggtaaacaggtgagtttagattctaacctaaacctgctagacttggagtcccagggatttctattgtgtcttggtgctggattatctgaaaggcttgtttctataaagggcctaccttatttaggaaggagcagtttataagctgggcctcatttcattcagtattgaaaatgttttcactaaacatttagtttcctaatagctcactagtctgtgtactttattgctttgtgaacatggtgaccattcaagtttaaggcatttaagttacagtatatattttcaaactgaagtgatccataggattaccttggtataggaatttgtagaaacatgtttgaatgtattattagtcttaagcaagaccgcaaatcttcttgttttctaccttaccttattaactctactgccttgggggttttttgtttctaatatttcaataaaagattctatctaggtaagatctctctgtggatcaggtagggtggagttggaaataaagccactgatctttgatatgtgcgtcttacctgaaaatgatgtctttttattcaaattgatagtgacaataattaaatccacctagaagatggtcttctgagtagtgttctaaggttgacagtagacttttctccctcttgttttggctgcctctggaaatggccctcagggaaatcctggtaaagtctaattgcctttagattttaactacctgatttttttttttttgttttttgaaatgcaagatctcacatatttattattgaacccagccaactggcaccttcatagcacatacagagagaaaaaatatattcccaataagacgtgtccaactgtccagatagtggtgacattttcagcttgatatggtaacatggttgtgatcttgacatagcataagtatgtgtgccatctcatgtgcaattctttatagacccagtctggttcttctccagtgtttccttttggagttgtacctgattttattaccagttttcatctaaatccactgggagtgggacaattttttgcttttgtttcttggccaggaaacacttaatccggaaactcttgtgagaagacatggtgagaagccaagtcgagcacacacaatgatggtggagaaaggaagagagagcctgaattttttaacagtaaaatttctatactgagttgctagtttggcccatcaacttttaatgcaatgatgtggaatttttaaggattctcagcaagaggttgtcttatttcatatgttaaaattttctgtggagcagatttttgtccattgtatgcagttagtaaaagctgaggccttgtagtggagactgctgttgtttcctcctgtcgtgagtcatacaactttagaactgggtaggacctttcagatcatctattttaaccccttcactttctctgaacttctcttctagcgctgtgcactcaattctcattcatgatgtgatgccttgacctcgctgaaggacaagtagaaactttatgtgccttctctaaaagtgggatttagttagaagatttggttccaatttcaccctacccgtatagacgtgctgagggacctcaggcaagaaaagttattaaggagacttttggaaaatagtatctgaaggcatgagagagagacagtttgtgctaaataaatttttctttccctttcttcccttaactatgtatttttctcctcactggtgagtcttctttaaaacttcattcttattctacctggctgacccatggaatttcctctcatttcctttccgcataccccacttcttatatatttgttcataatttgtcttactgcttagcaagtatctgaaataatcagctaacattatgttaaaagttttaattaatttgagttgttttaaattctaatacagaaaaaggaattctcatttctcggcaccaaaaagctgccgtttaaaaaaaagtggtaattttttgtgctttttaaaaaatgactagtcaagtgcaatagtgagaagaagggaacaagtagagcaaagagttcagtctataactgtgaacaatcagttgtgataattcactatcttcggaccagctttacacttttctgattattggaatactccaatctctccttttaattgttttatctgtttaaaaaaaactcttttaaaaagttgaagatgagaggatcttgtctttaattatccagaagtttctaaaattaatgaaacaacatgattagccttccattaatattagggcatttattaagagaatacaatcatgttacaaaagtgcaggtttatattgagtggggtgttaccttagaagttctctgtgattctccatttgtggtcatttcaggctcttttggcccatgagacctgcgtgttcttttgcaaatgaggaaacaggttcagagtagtagctttatcttaggatctcatagctgctaaattgcagagtttggacttgaactcctagcaagtaaatatatcttaagtagctttgtattatgtttctcttagtgcatttataaatgcaaatatgtgataattttttttacagccactaggaaaacccactttgtaagtaagcctaagtgaattccttgaaaataatggtgatacatggtactcagcattttgctgatcttcagaaagattgcttctttaacttgagtcaaaagataaggtgtgttttgaacaaaatagctagctacgactgctaggtgctatttcctaaagcagctcaagaacagtgaaaataaatgtaaattacctttcacagtcctgtcgtccccttccccaagtgtgtgggaatgctaatgctgcagcttttctcatattgcagtggtgcagctacttttcaacagatgacaggcgcttgtagatatcttgctgtgtagcaggaatctgaacagcatgctctggaaggattgtcagcattcctttcatggcttttgcttttctagttgcttctggccactctggcaggactgtggaagataggacaagtctgaacttcccttaaaagaactctcatttttattggctttgccaataagtttgtagggtgaagtgtattggttgaatggggaagccaagaatacatttcttttcaaattagtgcggctttcctttgagccagaggcagagtttaaaaatatttagtgcttgtcatatacaccatggaatactatgcagccataaaaaatgatgagttcatgtcctttgtagggacatggatgaagctggaaaccatcattctcagcaaactatcgcaaggacaaaaaaccaaacaccgcatgctctcataggtgggaattgaacaatgagaacacatggacacaggaaggggaacatcacacaccggggactgttgtggggtggggggaggggggagggatagcattaggagatatacctaatcctaaatgacgagttaatgggtgcagcacaccaacatggcacatgtatacatatgtaacaaacctgcacattgtgcacatataccctaaaacttaaagtataataataataaaattaaaaaaatttgaaaataaatatcaaaatgcacaataagaaaataaaatgagtctcttgttggcagcaaaaaaaaatatatatttagtgcttgtgaagtttttggtggcattatgctaagttgtgggaattgtttttttttcccctaggaggaaaattgtgtaagtcattatagtagtataaaatcacttgttaatagctttgaaagaagccgcttcattctacaactctcttagcaagcaatctttattctgttaggcttgaggagaattaagcctaacagaatatttattttctgctatttggtggtgacagattagctgtttaggctttggtagggcagatgtcttgataactgaaggaagtacatcattctgggttttttttagggttgaactcatcccaggctctaatttctcaattgttagagggaaaactgcttaatatctttccctgtcttacatgcatatgtacacctatggaaaactttctggtgcctggtacctagtaggcccttaataaatatttgttgaataaatttttacataagaaaaaaataaagctcaaagaattagctgatctaggtatgttctcagtatactatttaatatatattgagtatgtaattgtcattaatacctacttgttaggaagtatattgatgcagaattattcttcatatctcccatatgaggttattgacatcaaaccgttttatttatttattttttttaagagatggggtcttctgtgttgcccaggctgaccttgaactcctgggctcaagtgatccctctgtctcagccttcaagagtagctgggaccattcatttgaacttcaatgctctgtagttttaattaggctttttgtcactgaaatcttgaaatagtctcaaacctgaagtagattataatgaaagtaaccatataatttattgtgcaaactgagacacttctgagaaatcaatcaaaattaagttggagcagcatgtataaaccaggcttgttctaggcaaactaggacatatgatccctgtttgtttttatttttcaaagtaaatgttttatcgaaatataataaattcagaaagtccatatattcgaagtggacagcttgatgaatttttaaaaaatgagcctcccagatcaagaaatagaaatagaacatcaccagaatcccagaagtctccttcatgttaccttctggtcactccctcttcttccctgcaagacttttggccgtagatgttttgcctagtttgaactttatataaatggcatcatatagtagtacacacttttttacctggccttactagctcaacgctccctttgtgagatccctccacatgtgttttagcgatcgttccttcatttttattgtttttaaatatttcatcatatgcatataccacactgtatatgttatattgttgatgaacacttgggttttattttgggccaacaaaaatggtgctgttataaccatacttgcttgttcttttgatgaacatatgtacttatttctattgggtatataatcaagagtggaattgctaggtcctatgatatgtgaatgttcagctttagtgggtagtaccatctcctaagtatcatatcaacctgtacttcctccagcagtaagatgagagttccagttattgtgcacccttattctgagggtcagtgtagtgggatcacataggggttttaacttgataactaatgaagttgagccccttttcatgtgctgtcatttcgatcttttttttttttttttttttgagttagagtcttgctctgtcggccaggctggagtgcagtggcacggtcttggctcactgcaacctccgtatcccgggctcaagcaattctcctgcctcagcctcccaagtcgctgggattaaaggcgtgtgccaccacgcccgactaatttttgtatttttagtagagacggggtttcaccatgttggccaggctggtctctgaactcctgacctcaggtaatctgcccgcctcagcctcccaaagtgctgggattacaggtgtgaaccaccgcgcctggcccaatccttttttgtaatgcccatttgtatactttcttttcttgtttgttcaagcctttcccatttttctattggtttatctctcattgatttggaatttacatatttatgtattctagatattaatgttttcattatatatatattacaaatatcttttactctggtttgccttttctctttattgttaatgtcttgggataaacttcattttagttttgtccagtttagcaatattttcctttttatgttctgtttaagaaatgactgcatgaaagtcatggaaatggtcctcctctgtaatcttgtagaagcataattgttttacctttcacatttagatctccagtttatctgaatttctgtgtatagtgtgagatagagttcaaaatttcattttttctatatggataattgactctgcaccattctcttcttgtcccaataccacattcctgtagctttataatacatctcaatatatggtaatgtaagttctccatctttgttatttatgtttgtcttggctaatcttggccctttgtatttccataaacattttaaagtctcagtttccatattaaaaaaacagcgtagattttgattgggattatattgactttaaggatggtaaattgacatcttcagtcttccaatctaggaatatagtatatgtctccacttatttaggtgttgtttaatttctgtcagtatttagtaggttttagaatagaggtcttatatatcttttctatccttttccaattcttgatggttttttaaaaaataatttattgagatgagattcacataatataaaataaccatttgtgtctgttttgtgctgctataacaaaatatcttagactgggtaatctataaagaacagaaatttatttctcaccattctggaggctgggaagttcaagatcaaaatgtaccaattgttttggttgtctgatgagagctgctccctgcttctaagatggcacgttgttgaaccctctatgggaaaggaatgttgtgtcctcacctggcagaaggcagaaagaaaagcaagagagcaaactagcacaatgttgagtgaagccacttttatgaggcccttaatcccattgatgaggaaggagccctcctgcccttatctcctcttaaagaacccttctcttaatagtatcacattggcaaaatctgaattttggaggggacacattcaaatcatagcaccatttaagtgagcaattcagtggcatttagtacattcagtgttgtgcaactgccacctctatctagttccaaaacatttcatcattcgaaagtaaaactccttaagcagtttctctatactcaactattcccctatgccacaggcacaggcaactaccagtttgcattctgtctctgtatatgtatctgttatggatatttcatatgaaaggaatcatatagtatgtgaccttttgtgtctgacttctttcatttgatatatttttgaggttcatccatgttgtagtaagtatcagaactttgttcttttttatggctcagtagtattccattgtatgtataaaccacaatttgtttattcatttgctgattgacatgtgggctatttgtgccacttggctatcgtgagcagtgctgctatagattgagtatccctaatccaaaaaatctgaaattcagaatgctccaaaattcaaaacttttgaccgggtgtggtggctcatgccagtaatcctagcactttgggaggccaaagtgggtggatcacttgaggtcaggagttcaagaccagcctggccaacatggagaaaccccatctctactaaaaatacaaaaattagctgggcgtggtggcgggcacctgtagtcccagctactcgaaggctgaggcaggagactcacttgaacccaggaggtaaaggatgcagtgagccgagattgtgtcactgcacttcagcctgggtgacagagtgagactttctccagaaggaaaaacttttaagcaccaacatgatgctcaaaggaaatgcttccagatttcatatgttcagattggggatgttcaaccagtaagcataatgcaaatattccaaatttgaaaaaaatctgaacaatgaaatgcttctggtccaaagcatttcggataggggatacttaaccttacaaacctgtgtcaacttgtttgagaacctgttttcagttttttggtatgtttacctaggagtggaattgctgggtcatatgataattctgtttaactttttaaggaactgccaaacgtttttccacagcagctgagctattttacagtctcaccaacagtgtatgattgttctgatttttgtacgtcttcaccaacacttatttttttctgtaattttggtgttctatactgttttaagtggtataattttgagtttaaaatttttcactatttcttattggtatacagaaatacattttttctccatataaaccttgtaatcaggtgacattaaattcgcttgggggctattaattttaatagtctatttatttactggattttgtacttacacctgaatttccattttctaaatgctttcatattatttgtttccttttttagtaattatattatggatgcagcagtcttgtgaacaacttagagaatataggaatttaagttttcttaaaatttttccttagtttcctttgtagttctattgcttttcattttggtctttctttattttgtaggtatttttcaaatatctggtgatccgtggttatctgtttgtatttataatggaatagggtggttggttttggtagctgatagtggcttcctctagttttttgaggtctgttttctcaaaagagcttttccacagatggtatgattgagaactctgcgtgagtttcctttaaggtggggatatccaagcttttggcttccctgggccacattggaagaagaattatcttgggccacacataaaatacactgacactaacaacagctaatgagcttaaaaaaaatcacaaaaaagctaatgatgttttaagaaagtttatgaatttgtgttgggctgcattcaaagccatcctgggccatgggttggacaagcttgcattaaggccggcagcagaggctgaggacttaaaatgtattctgagcgctataaatgcttttttcttttgtttgtttttgtttgctctctcctgatccactgcctcctccaccttcgtttgtggatgtttggagcaaccatcaggctcaattccagttctcttttgtccctagtacccatgctggatgctcttctcaatcagatctagatactaagcctgggagccaaagtttatgcagaaagtaagactgtcatgagtagctctgctgttctgtgagcaatcttttaattatcttgatttccttatgatttagtccagcttttggatcctgaccttgatgttttctcccaggttccatttaggagattggtaaaaagagctcttgcctcattatagtcctttcctgtccttgttttgcttgggttgctgtttcttctggtatggctattctaccaattcagtcttatctgtttcttctagaaattcttctgtttcttttctttcttcctttttgtttgacttggtttaatggagctattttttccaggttgttatgaacatatattttttaattatgaaaaatttggacataaatcacatgtatctactccccagcttaaataaaacataaatacaattcaagctccttattctctctctggttgtattgcactccctctcatgcatctattaatatttttccatctgtatgcattgctaaacaatacagagcattgttttgaatgtgttagagctttttgtagtgacataatacatgaattcttctgcaccttgtttttattttttctttcattatggttgttttcttaatatgtcttttctgctgttttagaggaatttgggtagagaagataagtcagctcatgtatttcttactctaactttttaaaaggggagatttaagcaccttttggatatactgtcactaagagacacgtagtagaaagggctcggtgtcacctcttcttgtttcaattggtgttgatacgcgaatatgacacctccagtgttacacaagctaggtaattgagtcttgctgctgacctgtatttggtgttataaatccctttggagtcagagaaaccattcatttgtgtttagggtataactgaggttgaatgaagatttgagttcttattgctggaaggaatttttagacatcctttagtacaaattgtaccaaagaaactcaagtccagagaacgtgagtgacttgtctgaggtgatccaagggaaaaacacagggttaaaaataagctatagttctcattcttctttccactttactataatgaacttgaggttagagtcctctcttgttaatgttctattttgacttttgtctgctttttaaaatacttatttgaataccaagagatttttagtatgaaagaatgatggtgaatccttaaactaatgcttatttgccatgtttttcttaggatcaaaatggtttcaatcccagaatactatgaaggcaagaacgtcctcctcacaggagctaccggttttctagggaaggtgcttctggaaaagttgctgaggtcttgtcctaaggtgaattcagtatatgttttggtgaggcagaaagctggacagacaccacaagagcgagtggaagaagtccttagtggcaaggtaagtatggaaaatgagcactcagaacaaagaaaaaagcgtgtgcttgtgtatataattattgtagtcgtcaatagcttggtatatttcttcagtattctgaaaaaattagtaaaacaaaaaaacttagtaagttcctacaggatggcaagaaactggatatgacttgtgaatcacaaggagaaaaagttttcctctgtgactggcaaaattgtataacaagctctaaattacctttatggtaggtatttaaagtatgtttttagaacatttgaggcaggttgtttgtaactactaaataatttaaatagccttgataataatagtaattaggtagtgagactacctactattctgtaagacactatgctttgataaaatttataaacaccacttactcccccacaacagtattaggaggtagagaagtcacatattcccatttaacagatgacagaggggccgtatagaatataatatgtcatatattttgagcctttggaaaaatattactaagaaaaaatggaaatgagctagaataaaattatttcacgatcataagtttgtgaattctctcaaaatgaatgaatttatctgacatttactaataaatagtaagttgaatcggaaggctataagctcaattttggtacacataaggaatctgactgcaggcatatctcaaaaaggaatttcaagtagagcatttattttacaattagaataacactcatttgaatatctacattcgtataggcctcttaaaaaatcctgaaactgtagcaagcctcttcatagcaaccaaccagacttttgactttgaatgaacttcatatacctttatagatagttctttggaattaattgtcatatcacatcagcatttgtttgacaccatgcaacagatattcctcattatgttggttttattttttaatgatgggatgtaagattctttcttagaagtttaaaaattattattatacttttaaattattcaaattagtctacattagtctcccttaatcattttttctctctgattctttgctgaacccttctggaatcctttgcttcccttaaaacctacaaggaaagagtcatcaatggggctgtaaaaccacaaggcttgttctaagtaaaatgtctacatgtatgttttattgctgtctctgccctttgtttactcatcttggcatttttattatgaaccacttgtaattggtatgttttaatttttctcctgatactcctctccccccagtgaggggttatttgttcttactcactttttattttttagataatatttattgtgcctgcttagtcctgggcacttgacttgttgtagggggtggaattcagggataagtaagatacgttcctggctttttagacagtttttaagagggaaggaagagggagtgatagacgtgtcaggagtagataggaacagatatttaagctgatgtgctggccagaattgagggtctgagtaaaacatgaagaagacttgggcatcttcttcggggtcttcagagcagtgcttctaaaatttcttccacactaagcctaagagaaggagtattttctacttagagcctgaggtttcattgaacttcagtggtttagcctgaacatacagctattattttcaataaaaaaaagttttttccccaaatatttgacttaacttgatactccataaaattatgtaattttatcttatgccttcagttacctcctggcatatcctaccacttaatcctaaagccatgtattctccattatgtatagcattgctggtgagtccataaaaatgagtcctttttatgtcaaatagcagtgagtgtacacttaaagttagtaagaaattttaggtatggtctactctgattttgaaataggtataaagaacataaggccaaaagcacataccaccatatgggacattgacttatagcagggtttctcagcttcagcaccattgacattttgggctggctagttctttgttctggaggcttgttctatgcatggtagggttatcagcagcattcctggcctcactcactcttgtgacaaccaaaaatgtttttagacatcaccaaatgtctgttggggaccaaaatcacccctggtcaagtaccatgacttatgggaatgtctcaggtaacagaaactccattgggtgatgaagattgaattaaaataattgatcatggcctgtcacggtggttcatgcctataatcccagcactttgggaggccacggctggtgggtcacttgaggccaggagttcaagaccagcctggccaataatggagaaaccccatctctactaaaaaatacaaaaattagccgggcgtggtggtgcatgcctgtggtcccagctactcgggaggctgaggtgggaggattgctggaacctgggaggcagaggttgcagtgagttgagattgcgccactgcactccagcatgggtgatgagtaagaccctatctcaaaaaaataaaaaataaaatgaagtagttgatcatgaagtaaattcaggaaagaatcaaggatattaaaaaggcattagtaaacgtagtaaagtaggaactaattgggtactagtgggttgaaagcaccagaaaagatggtattgagtaaagagatgttggccagagaagggaagagtatcacatttaagatctagcaagtttaagagcagcatgatcatgtcctggtggtagtggtatagataactgatattaaaggaaattaaaggtcatcagcaattaggagaatgaagaagtacgaatcagggtgttaaaaagtacttttttagtcattccttaggttccttttcctctgcttgccccataaggattgatattcttcaagtttcaggcttaggccttgttttctcactaggtccagtgagatggttactcagccttcctctgttttatgtgagatgaatggatgtcctttaaattagatttggatttagtttcatatagttaggatcttgtgtccttattattgctgttacctggataaactcttttctactcccagggcttcagttactacctgtatgtggttagtaaaatctatgttgatagtccagctctctccctgaacttagacccacaaagccagtcacctttactagacctgtcttctggggtgtcatgcaggcactttacacttgacattcagaagactgaatttgtatctccaaaacagtacttctttctctccctgagttcattagtctactgaatttattcacttaacaaatgtttaaagtctttatcttgccaggcaagatctgctctcttggacttgtatgctgagcaaaatagatatggaccctaccctaatgaagtttgcattccttatctctcaaattcagtcataagccaaaatgactacatcctgaatgttacatcctgaatctcattgccgttattttgattcagacaagtaaatatcttgatatgggcaacgacaagagtgtcctaaaactcattactgccaaaggattttttaaaaattatgaacatgcttgtatcacctctctgcttaaaatctgtcaatagcgaccgggctggtggctcacgcctataatcccagcgctttgggaggtcaaggtggggggatcatgaggtcaggagatcgacaccatcctggctaacatggtgaaaccccgtctctactaaaaatacagaaaaattagctgggcgtggtggcgggcacctgtagtcccagctactctggaggctgaggcaggagaatggtgtgaacccgtgaggtggagcttgcagtgagccgagatcgcaccactgcactccagcctgggcaacagagcaagactccgtctcaaaaaaaaaaaaaaatctttatcagtagttcaccatgactcccagataaaattcatctttttaatgtggcttaaaaggcacagttatctggcctttcttatctccatacaactctagctgcttttcctgcatactctatgttccaggctgactgaattatttttaatttcccaagcatattaatgccttctgatttctaaggggttatactgctacttcctctgcctggaaacactattattctactttgtaatttcagggccttcctccctcacttttgtccctaacacacacacacattctgttaaatgtcattttctctgagaagccagcttgtgtgtggtcttttaaagctgggttagttgtttctcctatgcaggcccgtaacacttacctgttattgcttaacactatattttaattgtacatttacttggaccaaaggccatttccttgtgtctttagaatctagaaggtgcctgcctggctcatatgaaatactcagtaagtttttattttttaaattaatataagaaaacattaatattcaagtcatgtgctagcagtggaagtagcagtaggagctatcagtaggagcgggaagactgtttatactaaagtcatccaggaatgtggaagtgagcactgatatgttatatagactttcttcttaggttaagaatcctgcttaaactgcaagtttgaacttcaaatggagagtcaaagtgtgatagagcagtgacctagaggtggcatcagtgtttctctgtcaaatctgggataaaaagttaaacttgactcacaattgaatatgcctttaaactgtaatcattttgtgatctgattgtctagcaaaatttattcctttgggtacacttaaagaatgtttaatgttcagcttaaatcctatatatgtaatacttctgaagtttgttcagtttctggtttgcgtttgcttaccaactttttccttgaacatattgactttgttttcctttttaaaaatttgttctaagattttaggtagaatgtaaatcgtgtttttttctaatctactaaaagggaataaaataaaaatgaagtgaagtgaaaaattaagatctagattttagaaatctgaatgatcattttaaacattgtcctaatgtctatattgctgaagtctattctgaggggtgatacaatctaatcagccaaggcatggacagttcaaattcaactttgtgaactaccagctttgtgtacttagcaaactccttaactgctctgagtctcagattccttatctgcaaaatgaggataatagcgtgggcctcatagggtgttttctatacagaataatggcaattaagaatagcaactttaggaattgtatagtttaagtttctaaaaaaatagtcatccttggtgggaaaaaaatggtgataatgagttttagaaagtggaaaaatactgctgtaaaataaatatttttccctcttgatagctttttgacagattgagagatgaaaatccagattttagagagaaaattatagcaatcaacagcgaactcacccaacctaaactggctctcagtgaagaagataaagaggtgatcatagattctaccaatattatattccactgtgcagctacagtaaggtttaatgaaaatttaaggtaagtacaagtaattatataatatttgaacttcagtatagttattaaaaaatctcattttaattctactttttagtcaatttgttttgaatgtgatttgatactatttgcctatgttaactgtggctttcagtgtcctacagagtgttaaaagaattctcttcttcttctcagtttaaaaatcttggataactaatacatgtttattggaagaagttgccatgaatttaaacatgcaacagggaagaggcaaaaagtggagtagaagaaaacttagtcttaacaactaatagtgtttgtcttctctttcttcagaagcctataccccagcagctttattcttctaatctacatcatatccatgtgaaaataaacaaaattaggctcaggttttacaggataaggaaaaattggttataaatttaaatcacacctttttattttcaaacttttgcagtagtgctaggggcaaggtatgttggacataaatttaatttaaaaaataatttagacttctttcaagattcctgttgcaagaaaaagttaagactctaaatgtccactattcttaaaaaaatctaatgagtatgcatttcaaataatggttctgaattcagagcattctttttgacagtgtgtcaaaaaatacagtttttataatgttaatctaattgtatagtctcatgccaattaaaatggtgtagacttggtataggtttcaaagctacttgaaatgtaaaatgttgtctttaaaatgttttaaagataaataactaaaaggaggatattgaatgctctaacaaagaaatgataagtgtttaagatgatagatgtgccagtcaccctgatttaattactatacattgtacgcatcaaaacaccgctatgtatctcataaatatgtacagtta

SEQ ID NO: 70 - DNA, 32744 bp, Homo sapiens
  source 1..32744: mol_type = other DNA
gagcggagcggtgggccgggggctggaggacaggtttgtgcgctggacgcaagcaccaggcgcagcctcgctcgccgagacccggccaggtaaggccggtggccgcgcggtaggtgcggagcagcgcggcgggagattaggggtgggggagtccggagataaggctccggtcttcgcctgccttgccagagcagagaggatggtgggggccgtgctgtgggcggggcaccggcggggagggggctcccagcgcgagccggaggcgctgggttccctctgctccactcgcagctgggcacccgagctttcttcggggtcgaggagggtggctggctcttggcggggagcaggagagggtaggtgccaaaccgagaccctggcggggtcccttcgggtttgggcaggtcgatgggcaagggggtgcccactagtgaggagggacacccaccaattccaggcgatgctcccctgtgccgctcagcaaagctaggcccggggatcctgctcttctccggtctggttaagccagcaacctctgacacttaggagaaagttagtgtaagtcgtgatatgcttttcacttaagtgacaaattaggtacgagatgaacccttttggttttaggagatgagaaacagtatttccttgttgcacctgctaagtggcaactcagtgagcaaatatggttattgtggttggtgtttgcaacggtcttagatgacagttattttacagtatcaaatggctgggagagggagggaaagaaggagagagagagagagaatatgagggaatgagaatgaacgggaaccattatgatttttgagagacagaacctcttgaaattctatgtctgctaaacttctaaattgaataatgtacattttatgcaattgaataagctagtgctaccatttaagcctgctactaaggctctgttaaatccgtggacgaatatgaacactaaaagatattaccttggtttaaaaataggggaggttaaatgcaaatatttctgatagtgaattttgtttgagggagattgtggactttccctatgggaaagttaaagaattgatgagatagatgctttaaggaatgtttttgttttttgaaacttgaataagttcaacaaatgttgaacaaatatttcaacaaatcttcttcagctaatagggtcaaaaattaaaattctggaaatttagaattagaaatgaaatctcaaataatgtcactctcctaattaggatgaacatggaaacttctatttctcatcgtggtcttcaagctttccatgatctcatctacctttgtagtagggggtcaaattttttttttaactagacaattttagaaacttaaaggaggcaaaaatttatttctgtctccgtgtgtttactcatgctcttctctatccaaattttacccatctttttttttttttttttttttttgagatggagtctcactctgtcacccaggctggagtgcaatggcccgatctcagctcactgcagcctccgcctcccgggttcaagggattctcctacctcagcccatcgagtagctgggattacagggacccaccaccacagccagctaattttttgtatttttattagagacgaagtttcaccatgttggccaggctggtctcgaactcctgacctcaggtgatccacttgccttggcctcccaaagtgctgagattacaggtgtgagccaccgtgcctggacgacccatgttctaagagtcgaatctgtctatgttgtgtttacctttctttgctctcccaaggtacatattgttcatatcacgtattttgtatatattctttcagcatgctttttgccaagttggtttgcgctctgtgaataacagttgagataaaatgcacaattaagacaattaaggtacttttcaagacacaactaattatgggcactaatatcaataacatcaattcagatgtcttttttgttttgggatatgttattaatctctgaacacatactaaactaattttgcattacttagaataatatgtaaattactttccactttctaaggacccttttgaaggctgggttctacaaaatacccttttgagtactgggtagctggcagaagcaagtgcaggatttaaaaatgtattgaaaataatcctttaggccgggcatggtggctaatgcctgtaatcccagcactttgggaggctgaggcgggtggatcacttgagtccaggagttcaagaccagcctggccaacatggtgaaaccccgtctttactaaaaatacaaaaattagccagacgtagtggcgggcatctgtaatctcaactactcaggaggctggagcaggggaatcgcttgaacctggaggcggaggttgcagtgagccgagatcgcgctattgcactccagcctgggcaactagagtgaaactacgtctcaaaaacaaaacaaaaaacaggctactaacaatttcaaataatttattcaaggaaaaacttcaatcactttcattatttccaatcaaaaattttttttacaaccatgatgtggtgaaaagtatacttagttagaatttcatggccagattccagtacgggctctgccaaacgaacttggccaagtcagttaacttccttctgtatttataaccttttataaaagtagggctgaattagattacagtagtcctcctttatcctagagggatatgttccaagggtcccaatggatgcctgaaactacaggtagtaccaacccttatatacgctatgttttttgctatacatacataataataaaatgaataacagtaatacactgaaatgaaagttatatgaatgtgatctttcaaaatatcttgttttacctcaggtaattgaaactgcagaaagtgaaatcgcagattagggaggactactgtacctccaagattatttctgatcttagaattctctgattctaaaatcctaaagcagcctaatagaagttcagatagtagttacttgattttatttttggcagagcattttttttttttttttttttttttgagacagggcctcactctgttgcccaggctgactggagtacagtggtgtgatcatggctcactgcagcctggaactgccaggctcaagtgatcctcctacctcagcctcctgagtagctaggactaaaggagcatgccaccacaccctgctaatttttaagtatttttttgtagagaagaggcctcgccatgttgtccaggctggtctcaaacttctaggctcaagcgatctgcctgtcttggcctcccaaagtgctggaattacaggcatgagccactacacctggccttggcagagttttttttggcagtgtattttaattatctgaagtacagtatatgtaaataataaagagattataattttaataatatgtttattgagtgatacagatctgtttttcataagcctataatctaggatactccaatccgttgttaagactggaaaaaaaggagatataatagtttcattgatgagtgtccttttctacagatgtagacaacagaggctctaagatctatactaatgtcttgatcagggaaaagctggagtccaactcagctggtcatacacttgatattttatttgaacctcactttcctgttgactttcattttcaaagggaaaatggaggtgagcaccaggttatctgtggcctttgaaactggtgccatggagaaactcaaaagccgtttatttttcttcaccctaccctgtttcatcattagatttgtgacattgatagtaagaagaagcaatccacgtttcctagctcaaggcagtgtcttagagaaggaaacctgagtctcttgctacagttctgatttaaggttggaaggaagagattatgttggatgcattgctttcattggtctatgattgcatcaggactttggttctggcaatgttcagagaagagctctaatgtggcctttcaaaaatgactgtaagaccgggcatgatggctcaggcctgtaatccttggactttgggaggctaaggtgagcagatcacttgagctcacaggtttgagaccagcctgggcaacatggtgaaatcccatctctaccaaaaatattaaaaactagctgggcgtggtggtgcgtgcctgtagttccagctactctggaggctgaggcggaaggatggcttgagcctgggaggtggaggttttgatgagctgaaatagcgccaatgtactccagcctgggtggtagagtcagaccctgtctcaaaaaacaaaaacgaaaacaaaaattacttttaaagttgtatgtcaaactggtcttgcttgctttttgtgtcgttaatttttatttatttattttatttattttttttagacagggtctttctctgtcatccaggctggagtacattggtatgcatggctcgacctcctgggctcaagcaaccctcccatctcagcttcctgagtagctgggactacaggtgcacaccactacacccagctaattttttgatttttttttgtagaggtggggtttcaccatgttgcccaggcttgttttgaactcctgggctcaagtgatccacccgcctcagcctttcaaagtgctgggattataggtgtgagccaccatgcccaacctggtcttgctttttaagttctaccactttgggtgtttacagaacagattttcatatttctttatgtttccttttcaagacaagaagggcattaatatttattgagcaattaccattgtcatgcactgtgctggttactttgtattcattcttattttcctcgcatcaacaaacctgtgaagaggtatgagctcagttttctaggtaggaaaatcaagactcagaggcaagtagcttgcgagtaaatgggggaagttaggatttaatctcctgtttgtgtgtttattttttaccatgttgtgtcaataaaagtcatataactttccaaaatacaacatgcatgtgattactctcctgcatagattattttatgttaaatataccatatgtaaaacaagaaatacatgtctccttaaaatttgaaaatattttatttgcttttttttttaacagactacttagaaataactgcttatgtttactaatgagtttgcacatgagctgatttatgttttacatgttatttggtggggtttcaaaaaagaatttgaaatatttcatcttattactgatctctgtgacaaactaggaacaaagttaatttttttaaattggtggtaagagtaaagaaaaattccagttaaggatttaacaggaaaagttgccctatatcttgaagtctcattgctgaaaaaaataagcttttaatctgaattcctcctagttattcaagagtggaggaatacaggaaaatttgggcataataaatctatatctatatctatatatctatatctatatctatctatctatctatctatatatatatatatatatatatttttttttttttttcccaagacagagtctcgctctgtcacccaggctggagtgcagtggcatcatttcggttcactgcaacctctgcttcccaggtttaagcgattcttgtgcctaagcctcttgaatagctggaactacaggcacctgccactatgcccggctaatttttgtatttgtttagtagagatggggttttaccacattgggcaggctgatcttgaactcctgacctcaggtgatctctccacctcggcctcccaaagtgctgggattacaagcaggagccaccgtgcccggccaacatctttgtttattccggtttttgattctgtttatttcatgtatctttctcccctccttaatggaatatgatataatttagtctccttccacatcataaaaatttggcacttttcacattatgtgacaaatgcatacactatcatgtaccattaccactgtaaaaagtctaaattttgtgattttgtgtcttttatttatttatttttatttttttttacatttagaacgtgttacgagtcagtttttagtgaaaaaacattgagctaggagccaagacccatctcttcactattttggtattgtgcaagtcatcttacctctctggatctcagttgtctcatctgtaaaaaggagataaaaattatttacctgcctgaacgtaagtactcaataattgcatttggttgcaaagaaacatgactatcactaccaccaccaccaaaatacaaaaaaggaaaaaccaaaaacgaactcacagatggcttaaacatgcaatatttattttttatataaaataataattgaaatagcactctaggatgggtatagtggctttataaagtcatcagagacttaagcttctttcagttcttttatcagtgatccctaagacattcttgtagtactggttcttgtatgtccaagatagctgccagagctctaaccatcactgtcatgttccaggcagcaaagcataggcgaagaaagatgcatcctcttcctttaaggagaattcctgaaccaaggctgaggctataagaaagcagggaaatgtagctgactgcatgtctgccctctataaaattgggcttttgttactgagaaggaaggaaagatttggatattggcaagcaaatagaagtgtctgccatgatatgaatctttttatctttcagctctgaaatctgtaagctgtgataaccactcatagaagcttctataatttgccatggcagagatataagtctgactattaactacagaaggaaataatcttcatgtaataaattgtgtttctgtttttacttttagcccttaattcattatagaagcttttctgtcttatttgtggatttgttctggttattttttaaaattacccataaatgctcaatagatgtttgttgtacattttatggttgtgttaaaaagagctaacatttattgagctacttgctataatcaaggcactaaaatgacagagataagttatcccaagggtatcacataactaatcatcaggaagtaaatttatattgaaagtaaatataattcatctcaagatacatttcactatggtcacatgaggaacacttgccttccttgctagctaaaagtagtttgttctttttctttcctttcttctttttttaaccacttaactgttagttgtcttgaaattttctcttactactagttcttgcttaacttatttagccacaccaatattttatttccttccagacttttattttttttgttgagacggagtctcactctttcacccacgctggagtgcaatggcttagtgcaacctctgcctcctatgttcaagcgattctcctgcctcagcctcctcagtagctgggactacaggcatccaccaccacacccaactaatttttgtatttttagtagagatggggtctcaccatgttggccagggtggtcttgaactcctgacctcaggtgatctgcctgcctcagccccctacagtgatgggattacaggagtgagccaccgtgcccagccccttccagacttttctttgtgaatattatataaatataccctatacttgtcctgcaaaatggttcaattgtcattatttctatttcaaaagtaaactgaaataaatagctttgagaaaaagaaattcagggaatggaaattggagtgagaaagattctaaagattcagtcaatcttttagagtttttagaagggagacagtaagttaagattttatttctacacagtatatttgtatttttgaaagtttttacattttttggttgtattagataggcacaaagtacagtagttcttttgctgctagtattgcagtttccttttttctgatctagacttgttgacctcaaacaaaataatcaggagacttgtgaccataaaaacaacccagtttttaagagacatttaacgttataaatcacctgactgagaatgtctgtttggtgaataccattttcatgacttttaattttttttaattaacagaaaagtatcatgctatgcattgttttgtaagcagcattttaaaaattgcaattgtatttaatagcttaccttcctcactagattgaagccctgtgagggtaaggactatgtcgatctcgcttacctttgtcttctagcatagtatctggtaccatagtcattacttaatacataaatattagtttagttttgtttttagaaacaaagtctcaatacatacatacatacatacatacatacttataataggttaaaggaaacatgcttcaattcagccattaattgaaaaggaagaggggcaaaagaagagggttgaggaagatggaaaaagatacataaaagaggctgggcgcggtggctcatgcctgtaatcccagcactttgggaggccaaggcgggcagatcacaaggtcaggagatcaagaccatcctggctaacatggtgaaaccccgtctctactaaaaacatacaaaaaaattagccgggcgtggctgggtgaggtggctcacgcctataatcccagcactttgggaggccgaggcgggcggatcacgaggtcaagagatcgagaccagcctggacaacatggtgaaaccctgtctttactaaaaaaaacacaaaaaattagccaggcatggtggcatgcgcctgtagtcccagctacttaggaggctgaggcaggagaattgcttaaacccaggaggcggaggttgcagtgagctgagattgcactactgcactccagcctgtgcaacagagcgagacactgtctcaaaaaaaaaaaaaaaaaattagctgggcgtggtggcgggcacctgtagtcccagctactcaggaggctgaggcaggagaatggtgtgaacccgggaggcggagtttgcagtgagccaagatcgcgccactgcactccagcctgggtgacagagtgagactccgtctcaaaaaaaaaaaaaaaaaaaaaaagatatataaaggaggaacagagactacttccaaggaaagagaaaattttcagttttctgtacttttcaccctggttatctatggtaattttttttaaccacttccaggatatcttgcccaacaatcaaaacaggaaaccatcacacatacatgcgcgcacgtgtgcgtacacacacacacacacacacacacacacacacaaagcaaacttaatctgtataactatgggtataaatcagtagctaagaaatctgcctctgtgtatgaatggaaattttattttttgagacatgttctcactctgtcaccctggctagagtgctgtggcgtgaccatggctcactgcagcctcaacctgctgggctcaggtgatcttcccacctcatcccccaccaagtagctgggactacaggcatgtgccaccatgcccaactaatttttgtattttttgtagagacagaggtttcaccatattgctcaggctggtcttgaactcctgggctcaaggaatccaccctccttgtcctcacaaagtgctgggattataggcaggaacctccgtgcccagcagaatagaaattttgacttggttgagacaggggaagagagattagctttcttttaggactttaaaatttaaggaaattatatctactgaatactaagagaagcttaagaactctgcttactttgtaattttaccagaggctctgatgcctttggggtcagtgcctcccattctgtcttgagatgactacataatttagaatttcacaccatcctactttagagagtaaattatcagcctgtcctggtttggatgagtctactgtttcagcctggttcagcccagtgtctcctctttaggtccgtatctctcttatgaaagaagagggtgataaaggaaaggagaaggccattcttactgacctgatagtggaagaaaagtaggttagttctccttcttcctattgcctgtccttatcactcatctctttcttctatatggatatttgtatattttctcattcatgaaaatctgtaaacctagtaaatttgctgttattcctttaatgcagacacatttgacatcttggcatttaaagagacttttgtgtcattatttttctgcctaatgtgctggaatacttaccattttttttttaaatacagttgatgtttatggaggccttattaagaattagagtcagtgtttaaattaattgtcctagttatgtctagaataagcactaacagattagaaactagtagaaaacattctccatcaatcaaaaataaatttaaaaggcaagaaaggagaggaaataaatgttaaagaggtaggataaatagaaagccctaccagcctgagcaacataatgaaaccacaactctaccaaaaaaaaatatatatatatatcaccacgcatggtggcttgcttgtggtcccagctacttgagaagctgaggcaagaggatctcttgagcccaggaaatcaaatttgcagtgagctgtgagctcaccactgcacttcagcctgggtggcagaatgagaacctgtctcaaaaaacaaaaaagccctatagaaggtggtagatttaaaaatcaagatatggtattaaggccgggcgtggtggctcacacctgtaatctcggcactttgggaggctgaggtgggcagattggttgaggttaggaatttgagaccagcctggccaacatgacaaaaccctgtctctactaaaaatacaaaaaattagcagggcatggtggcgcacacttgtagtcctagctactcaggaggctgaggcaggagaatcgcttgaacctgggaagtgaaggctgcagtgagccaagattgcaccactgcattctagcctgggcaacagagcaaaactccacctcaaaaaaaaaaaaaaaaaaaagatacgttattaaatcaactttaagggctagatgtggtggctcactcctgtaatcccagcactttgggaggccaagttgcatggatcacttgaggtcaggagtttgagaccaccttggccaacatggtgaaacccaatctctactaaaaatacaaaaattagccgggtgtggtggtacccacctgtaatcccagctacttgggaggctgaggcaggaatcgcttgaacccaggaggtggaggttgcagtgatccgagatcgcggcactgcactccagcacgggcagtagagtgagactctgtctcaaaaaacaaaaaacaaaaatggcttgaagaaatcaccattcctctccccggtagagagaacagtgttgtatgggaaaacacaaaaggtaacaattcaagaaagtgtttaaaaatacttggactacaaaggtgaagaagtccttagaatacctttatcaatttatttcgtttaatttctttatgtgtgcataaaaatgatgtgagaaaaatctatgatatgcctaaaaatactttcagcaaacataagatagaattgtaagtgaaaaagcacggtggtgtaatttaattggcagcatttttttctatatagtatacaatggtgtgtcttaatatcgatggaatcttttatcccaccctgaggtctctgtcacccaggctggagtaaggtggcacaatcatagctccctgcagcctagaactcctgggttcaagcagtcttcttacctcagcttcctgaatagctgggattacaggtgcaagccactgcacccagcccaatggaatcttaaagcctatttattttattttatctttttcttcttcttcttcttcttcttttttttttttttttgagacagtctcattctgttgcccagactggagtgcagtggcacaatcttggctcactgcaactgcaacctctgcctcctaggttcaagccattctcctgcctcagcctcccgggtagctgggactacaggcatgcgccacctctccaggctaattttcatatttttagtagagatggggtttcgccatgttggccaggctggttgcaaacccctgacctatggtgatccacccacctcagcctcccaaagtgttgggattacaggcatgagccaccgtgcctggcccttaaagtctatttaataacatgtatatacacacacacacacacacacacacacacacacacacacacacacacacacacacacacacacacacacatatatatatatattttttttttttgagatggagttttgctctgttgcccaggttggaatacactggtgcagtctcgctcactgcaacctttgcctcccaggttcaggagattctcctgcctcagcctcctgagtagctaggactacaggcgtgtgccaccatgcccggctaattttttgtatttttagtagagacagggtttcatcatgttggccaggttggtcttgaactcctaacctcaaccaatctgcctgccttggcctcccaaagtgctggcattacaggcgtgagccaccacgcccagcctcttcatacccttttgctagagattttcttccaagcaccctatattaattttacaagctttacaagcttggtgctggtgctttcttcatcttatcagaagatgatgacaggaagttttcagattcatagtctttcctcaaactctccttaaatgattcattgatgaagacctggagggctggccttcatgaatcacaccaacttgtattacttttcaggcaacctattctttattcagatacacgctctcagaatgtatcaagaactaaactaataaacacacttgtcaggttatgtagtgctcttcaacattcaaatcagatttagctactcttcctttagctcagccaccatccatcaaccccatacttcttaaaaatgcttaatataacatcttgggggaaatcattttataatttaatgtttaatatggcaacaacttttggctgtaggcatttacagcaatgttacagtgatttgttattttctgaccattctcgtatcaatctttttaccacctttagcattaatgtagattttgaggcatgtaaaagaacatcaggattttgtcagaatttcctgttgactaaactcagctttattttttccttaaactatactttgctggaagttgtgcagcttctgttcagtattttcaggaagttcctgacaaattgacatttgcatgagtccatcaattcagcctcatgttccttgagtttttttatttattggaggcatagttggtttctgctatcttcatttgcattgtttggctgctgataggtaatcctgttgtgttttactaacaaaacgtaacatggctttgtctacttgcaggtatcttcctgtctagagtcaggtaaagcactagttgttcctttataagaaagagtaaaattgctgttattcccctaatatcaagtatttgcttcactaacatcagctgctttgtttctgtgcttacaaaataacttttcattttaatgccaaatcatagcttaatgtttatgaagatatttacaatgacaagcaccaacaatgcaaaaactcaatctgaagttatgacaataataataactataataaagttcatgcatgtacacataacaaagactatgttgctgttgctatgtggctaattacaattttcatattccattaattgaggctgggtatagtagcttatgcctctaatcccagcactttgggaggctgaggcaagaggattgcttgagcccaagagtttgagactggcctgggcaacatgttgagaccctgtctcaaaaaacaataaaaaaaatactaatatggttgggatataaaggtcagtcatgagataaaagattaaatttactgtaaagctagaaaatcttaagtttatatatatatacctaatatttgaataaaaattaacagaattataaggaaaaagagacaaaatcatgatataagattttcatgtgcttttctagtgattgtagaacaagcaaacaaaaatcattgagaacatagaaaatgggataattttgaaaaattataagcatgactagtgtagaaggtgaatagtggttcatgaattgtatttttaaaatttttcacattttataaacttggatttttttgctctatttttactccttttaaaaaaattgaaatatgatttacatatcatacaattctctcttttatagtatacaattcactggcttttagtatattcataaggttatgcaaccatctcaacgatctaattttagaatattttcatcacccccaaaaggaaccctgtacccatttagcacttatttctcatttcccctccctccaccagcagccctcaacaacctgtaatctgctttctttctctgtggatttgcctattttccacatttatataaattgaatcgtataatatgtgtcctcttgcttctggctgtatttactattaatcagttctgttgtattttatttttaaacagatttctccttaaaaatatcagtcttggccgggcacggtggctcaggcctgtaatcccagcactttgggaggctgaggcgggcagatcacctgaggtcaggagttcaagaccagcctggccaacatggtaaaatcctgtctctactaaaaatataaaactagctgggcatggtggcctacacctgtaatcccagctactctggaggctgaggcaggggaatcacttgaacccgggaggcagaggttgcagtgagccaagatcatgccactgcactccaacctgggtggcagagtaagactctgcatcaaaaaaaaaaaaaaatcagtcttttgtcctttaaaattatcaaaaagtgaaagtttttggctttgaaatggcagtcacaattcattgtcctctttcttgcaaaagttaaaaataaatccagcttgaatgaaatgtaagtctgacaatctctaaacctgaaatcaaggaggagctttgtttctgcttccacagaagcaaattctcagtttgatcagagaggataatgttccatattttgtttccaaagtgtgaaactttcctggctttacatcatttttattgtgtctagatatgaactttctttgctagttcattttccttgttgttaatctttgtatctcagcaaccaggcctgctatttgctttaccaacataattttaagctggctgagtaagcaatatttagtttaaaggcatttacaagtcatataacttaatcattttaaatgaatggtgtgaatacaagcagcttttctttttttttaattttatttctgtttagtatttctgattacgtaacaggaaagatctgtactaaaaagaataaatagataatagaatttaagtacttaagtaatactaagttcaagttaaattctcttatttaaaattttttttatttttataaatgagggaactgaagtgggaaaagttaattggctaacctgtgatcatatagcaagtaagtggtgcagctgtaactagaatatagatctaaatttagttctgccttactgcttggtgtaaaacccactttctatttctccttttttcccactttctattttttaaagatccaagtttacctttgagatgagcattctctttctgtctcattgtaggtgaggttggtaaataatagagcaaagggaggcagtatgttctagggcagtggttttcaaatgttggcatgtatcagaatcacctatagggcttattaaaacagattgtgaggccccctacacccagagtctctgatttagaaaatatggagtaggccttgagaattcgcatttctaacaaattcccaggtgatgccagtgctgctggcccagggaccatacttttgagaaccactcctgaaaagccaacaaaggctttggagtcagtcactcccaggtctacactctagctgtatgactgactgctgtgtgaactagaagtgatatgtctcagtttcttgtactttgaaatggggataataatattgacttcacagagtcattgtaagagttgatgcgttaatatattttaaaagtttagcatactgcttggtacatagtaaacattcaatagatggtttctgttgttatttataataagcatggggatcaattaaatctttaggaaccataaattcagttagtgttttaaagcagtttctcagaaactttttgtgactttgtcacttcaagatgttgtcagcggctaggtgcagtggctcatgcctgtaatttcagcactttgggaggctgagctgggtggatcatctgaggtcaggagttcgagaccagcctggccaacatggtgaaaccccagctctaccaaaaatacaaaaattagctgggcgtggtggtgggtacctgtagtcccagctactcgggaggctgaggcaggagaatcgcttgaacccgggaggcagaggttgcagtgagccgagatcgggccattgcactctagcctgggcgatagagcaagactctgtctcaaaaaaaaaaaaaaaaaaagatgttgtcaggtgttgttaggacatacacacacacactcatgtatacaaacacattctcttgactttccttcttatttatggtagtcttggcaggagaggaagagagcagcagaagtgacaaaaacacgtggaagatatggaaaaattagaaccctcatttataggtggtgagaatgtaaaatgatatagctgctttagaaaacagtttggcagttcctcaaaaagttaaacttagagttaccaaactgactcagcaattctactcctagttatataaccaaaagaattgaaaacctgttaacaaagtaacttaaacacaaatgtttactgaagtattattcaaaactgcctgaaagaaacaatccaaatgtccatcagttcatgaatggataaacaaatatggcatatgtatacaatggactatctattcagctataaaaaagaaataaagtcctgatacttgttacaatgttgttggacctggaaacatactgctaagtgataaaaggcagacacaaaaggctacatattgtataattccatttatatgaaatgcccagaataggcaaatctatacagatagaaagtagattagtggttgccaggggatgggaaaaaagggtaacagtgagtgactgataatgggtatggggtttctttttgagatgatgaaaatgttttaaaattagatagtagagatggttgcacagccttgtgaatattctagaaaacactgaatagtataatttaaaacattttatgccttatgagttatatctcaaaaaacccaaaatgcacacctatgtatgtgtggacaagaagcatgaatgaataataaaccttttttgttattaaaagtaattgtggggaagaggaggtgattcatagtgagaagacattctgtgaagtatactaccctattagagattctagtatcctagagatgagtggatctcaggttttagtatacataggaaccccctggaaccccctgtttgttaaaacaggttcctggcccccaccccagaggtcttgggtacagcctgagaatttgcatttctgatctgctttcagatgatcttgtaagattttgtaagattgagaactaaactttgggtagcatctttatagattagacatatgctgtacttaaatgggtgaattttatgacgtgaagtatatctcaataaagatgctaaaaaattggcataaagatagtaaaatgtaagttttagtggtttgttaatggcaagacaatgctctgtaagggaattggtttaattattaatttcttcatttgtaaaatgtgtcactctcctgtgtatgtaccacctagggttgtggtgaaaatggggttatgtgttcttttccaaatggtgttctgtgggtaaaacgtgttgccttaaaaaaaaaaaaaaaaaaaaaaagccatggctagattgaagcttttgtaattagccaaatgttttcttatactataaaaacaatataggccgggcacagtggctcacgcctgtaatctttgcactttgggaggccaaggcgggcggatcacctgaggtcaggagttcgagaccagcctgaccaaaagagagaaacccccgtctctactaaaaatacaaaattagccaggtgtgatggcacatgcctgtaatccgagctgcttgggaggctgaggcaggagaatcgcttgaacccaggaggcagaggttggggtgagcagtgatcgtaccattgcactccagcctgggcaacaagagtgaaactctgtctcaaacaaacaaacaaacaaacaaaaacagtttaaaatattgtattctgtctttttaattttggctacaaaaacatttctcccttgattttctttagtgatctattttaagcattatttttgacaagttttaatctattctttcctttcctataattttttttttgttttattaaacctcttgagattaaatatatgattaatgtgacattcggaatgcatgtatatagagttaaaacattattcatgactttaccataattactcctttatttcagatgaggtggaggaccatcctgctacagtattgctttctcttgattacatgtttacttactgctcttgaagctgtgcctattgacatagacaagacaaaagtacaaaatattcaccctgtggaaagtgcgaagatagaaccaccagtaagtgaaatgaagtgaaatgggaggaattataactaaatgaaatgaattataattgtaactaaatgaggtggaatgaggtgaaactataactaaatgaaatgagaggaattataacaaaaatattgctaatatttattacttataaaattgtacacttgggaactatttctgaaatagcagtgaaaagagtattggccaagcatatgctgtttaccattacacaatatttatttaatatagttagtatattagatagaagaattaatcgtaatacatttccaacacagacctgactagccaagaaaacactgtattatattcaaagcagaggcagataacaatggggagaaaccaaagtggtaaaatcttcattgtctgaactatatagaaaatctactggactagagagtgtcgtaaaaaagaaaaatctacctttaagtaacaataaaagatgatattggttctgatataaaactatttatttcagaaatatagcttttcactttgttgaaactatcaaagtaaatatgtcttaatgccattttgctagaaattgtttcacaggattgacctctttagattcaaacaaggaaaaacctgcagaagcattactgttggtttcttaatttgaaggatactggactttattatgatgaatatctcaagcaagtgattgatgtgctggaaacagataaacacttcagagaaaagctccagaaagcagacatagaggaaataaaggtaaatgcaattcaataatatatacatatatgtatcttaatttaaaatttttttagagatgaggtctcaccatataacccaggttggccttgagctcctgggctctagtgatcctcccacctcagtctctccagtagttgggactacaggtgcgtgccaccatgcttggcttaaatatttaacaaacatttgcacgtgccaggcactgagctaagtaccagaaatacaaagatgagatttattcccagcccttaaggaaccctcaagggaaaatcatatccagaaatagattataggatggattatatgatgagtatttaatctagaaatacagaaggcagacacataatctaatatgaagcagtggggcgaggtgggaagttattcttcctaatagagattatgccagagcttaaagatgtagtgagaaaaggagaggtactgggaggcatcctagacaaaggtgcaatggtacagaggcaagaagtatatgggaaactggaagcagtaactgtggctagaccccagaatgggaaatggaggcctgagtggccaaaagatgaggtttggaaagaatcacagtctcgttgacagagggcctgtatatcatgttaaggggtttgggtcattatctgaggacagtaggaagttattcaaaagtttggaataggtgaggtcctggtgttttaatcaggtccagattaacagaagagataatgggctatgtattatatcaatcagagaggtttaaccatttgactctgtcctgagaaccctatttgacataattccagccatagtcagctcttcagtactcataataagaaagggggttgtaaagatctgacatgagagattcttgtaaagtctttccttaaaaggaaatgaatcagtttagctgggtttatcttagactcagtgagtaaaaaaaaatccagttaattttaaaattccaataatgtctcctaagataattttgtttgcttatgttacctttatttatttaagttttactttcttaaaaaattacgttgctttttttctagaatcagaataagagaactgtgtttgaaagactcattctgggtcaaacaaaccttttattttagtttctgttcttggtgtgaacttctttgaaagactgactcccgttaggttgtggtgtctgtcagcgctcaggtgtggcatttagttcgcagctctcctcttggaagttgtgaacttttctggggaaaaggtaatagtgttatgctaataattccccggaattgtctttgaggataatcctactcttcttctgaaggattaattcgatctgtggaacaagtttcctatggtgaatatatctgatgtagaactcttaatgtcttgtatcaggagtaagaacgttatttggggtgacatagaaaatgtggatcatgggagatactacatagagatattcaggcaaaagaagaaaataagcttcctggattggtgcagggaatacttttataactatcttcctttcacattcaattcctgtttctatgaagggttagggggaaccaaaatgaagttaaacagttacacaataaaaaagaaatgagggtccgtgtgtggtggctcacgcctgtaatctcagcactttgggaggctgaggcaggtggatcatgaggtcaggagttcaagactagcctggccaagatggtgaaaccctgtctctactaaaaatacaaaaattagccgggtgtggtggcaggcacctgtaatcccagccactcgggaggctgaggcaggagaattgcttgaacctgggcggcagaggttgcagtgagccgagattgttccactgcacttcagcctgggcaacagagtgagacttcgtctcaaaaaaaaaaaaaaaaaaaaaggggggccggggcagtagttcacacgtgtaactttgggagactaaagcaagaggatggcttctagccagtagtttgagaccagcctgagcaacatagcgagaccctgtcactacaaaaaattaaaatttaaaattaatttaattaaaaattatccttcaaattaaaaaaaaaatcatctgaggccaggcacagtggctcacatttgtaatcccagcagtttgagaagccaaggcgggaggatcacttgatcccaggaattcaagaacagcctaggcaacatagtgaaacccctatctctaccaaaaatagaaaaaattagctagatgtggtggtgtgtgcctgtagtcccagctgctcagaaagctgaggtgggaggatcactcgagcccaggagtttgaggttgcagtgagccatgattatatgactgtactctagcccgcatgacacagagcgagacctcatctcttaaaaaagaaaaaaaaatgagtaaaactagacaataaaacgcaaaccaatagaatcatcacaaatagccaagcaaagacttctgtttcataaaaaactgacaaaaaaaaaagttagaattttctctttcctttttttttttgttttgggacaaggtctcactctgtcacccaggctggagtacagtgatgcaatcttggctcactgctacctctgcctcccagggtcaagtgatcctcccacctcagcctcccaagtagctgggattacaggtgtgggccaccttgtctggctaatttttgtatttttagtagagatggggttttgccatgttgtccaggctggtctcaaactcctgacctcaaatgatccccctgccttggcctcccaaagtgctgggattataggcgtgagccaccatgcccggcctctctttccttttcagctaagcattttgaaaggagaatcatattacatttcttcacttcccaaacattccctaactggaaaggtgatggtactgccctcactgttccactgaatataccttcatggagggcatccatgacttcttaattgccaaatctagtgaacatcctaacatctttgattcctcattctactgggctcctttatttctctcaatagtttttagatttcagggtttgttaaaacatattgctgtttcctaccttcggggtgtccaattcagtaactctagagcctgcatttctgaagttccctggtgatgctgatgcttccagttggggactacattttgacaaccattgttttatctaataataatgactattctctccttgaaatatactgctctttttgattctgtaacagtatattctcctagttttcctactaattactcatctatgaagaaagtaatcaaaagagacctaaaaaagataaattttgaaaagcttttatatatggaatgactaatgcttatagaggcccactgacttttaacttaatttaaatgttcttttttgccctaatggtgctgaccaacttaactttttaaaaaaataacaagccaggtgcggtggctcacacctgtaatcccagcactttgggaggctgaggtgggtggattgcttgagctcagaagttcgagaccagcctgggcaacatggcaaaaccctgtctctacaaaaaatacaaaaattaatcaggcatggtggcatgcatctgtagtcctagctactcgggaggttgaggtgggaggactgcttgagcctgggagattgaggctgcagtgagccatgatcatgctactgcactccatcctgggtgacagactggaccctgtgtcataaaataaaataaaataaaataaaaataaatactttgttgacatataattcatacaccataaaatctatctttttaaaggataaaattcagtgtctttttgtctgtttttgttttgtttttttttgagatggagtcttgctctgtcgcccaggctgcagtgcagtggcatgatctcagcttactacaacctccaccttcccggctgacacgattctcctatctcagcctcctgagtagctgggactgcaggcatgtgccaccacacctggctaatttttgtatttttagcagagatgggttttcgccatgttggccaggctggtctcaaaactccagcgctcaaacgatctatccaccttagcctcccaaagttctgggataacaggtgggagccactgcaccctgccatttcaatagtttttttaaaatatacccacagagtcgtgaaatcatcaccactatctaattttagaatattttcattgttccccaaaagaaactgtgtgcccattaagctgtaactcctaattgcgcccctttccccaaccacagcaaatctacttttcatctctgtggatttgcctgttctggacattgcatatatgtggactcatacaataagtggtttgttgtgtctggtttctctcatttagcataatgttttacaggttcattcatgttgcagcatgtgtcagcattttatacttttttatggccaaacaatatgccattgtattggtatactatattttgtttatccgttcattagttgatggacgtttaggtttctggttttttggcgagtatgaatatgcagctatggatattatgtttaagttattgtgttaacatgttttctgttcttttagttatatatctaggaatggaattgttgggtcatggtaaccctatgtttaactttctgaggaactgccaaactgttttctgaagtggctacaccattttacaatttaaccttttgagtttctgctttgtgctttaatgatgcttttctaaattacatggtttttcagacaccttgattttagagttaaagctaatcttttttttttttttttttttttgagacggagtttcactcttgttgcccaggctggagtgcaatggcatgatcttggcgcactgcaacctccgcctcctgggttcaagcaattctcctgcctcagcctcccgagtagctgagattacaggcatgggccaccacacctggctaatttttgtgttttcagtaaagatggggtttcaccatgttggccgggctggtctcgaactcctgacctcaagtgatctgcccgccttggtctcccaaagtgctgggattacaggcgtgagccaccgcgcctggcctttttttttttttttttttttttgagacagagtctcgctcttgtcgtccaggctggagtgcagtggtgcaatcttggctcactgcaacctctgcctcctgggttcaagtgattcttctgccccagcctcccaggtagctaggattgacaggcgtgtgtcaccatgcccagctaatttttgtatttttagtagagacggtatttcgccaggttggccaggctggtctcgagctcctgacctcaggtgattacccacctcagcctcccaaagtgctgggattacaggcgtgagccaccacgcccggccctaaagctaatatcttttgaaagaaattctttttataatattaaatttatctaaattagtcaaaagtatttatcactaatgtattgtaaccctgtttttaagctgttgcatttgtctaaaaatggaatgtaatagataaaactaacttactaattttgttaacagagtgggaggctaagcaaagaactggatttagtaagtcaccatgtgaggacaaaacttgatgaactgaaaaggcaagaagtaggaaggttaagaatgttaattaaagctaagttggattcccttcaaggtaagtgctaaacaaaaggtaggattttttttttcttttttccttttgaaacagcgttttaccctgtggttcaggctggagtgcagtggcacaatcacagttcactacagccttgaccacctgggctcaagtgatcctcccatctcaacctcctgagtagctgagaccacaggtgtgtgccaccatgcctggctaattttttttgttagttagacagggttttgctgtgttgcccaagctggtcttgaactcctgggctcaagcaatcttcctatcttgaccaaagagctgggattacaggcatgagctggcgggcctggctagaaaattttaacatttggttgttgaggtcagtttatattagtacgtgccatctatgttcttctagtcaaaattttatgttagtattgatttggcttctcttaatttttagaatttaatgttttaaatagataatacattttatatcattcaaaaatcagtataataagccataattatagcaatgaaaaggaagaatgaaaagtaatcaattaaacaactggtttaaagaaggaaaaataatattaaaggaaaccaaaaggaagcagagaaagaatatctaatcagaagaattttcatacatggaatagaaaatttttcagagatctagccccagaaaaaaacacaagatccagaccatttcttttctttcttttttttaaagaaaatcttttaggagacgagatcttcctctgtcacctaggctggagtgcagtggcatggtcatagctcactgcagccttgaactcctagggctcaggtagtcctcccacctcagcctcccaagtagctaggagtgcaggcatgcaccaccatgccctgctaatttttttttttttttttctgagatggagtctcgctctgtcgcccaggctggagtgcagtggcgtgatcttggctcactgcaagctctgcctcccgggttcacaccattctcctgcctcagcctcccagtagctgggactacaggcgcccactaccacacccagctaattttttgtatttttagtagagacggggtttcaccatgttagccaggatggtctcagtctcctgacctcgtgatccacccgcctcggcctcccaaagtgctgggattacaggcgtgagccaccgcacccggcctagttgtttttttaattacgttttttagagatatggtcttgctgtgttgcccaggctggtctcaaacttctggcctcaagtaatcctgagttgctaggattacatatgcataagaataagtttcataaagggatactatctgtctactctttaatgatttgagtgattctatcaaaccattaaagagcagattgtcaattctatttaatctattccagagcatagaaaaagaaggaaagcttccacattcttgccatatattgatgccaaaatcaaaattattatgtctccaaagaatactatctcatgacagttggatttatttcaggaatataagatggacttaatattaggaaatctaatattataaatcatcatataaatagtcctaaggagaaaaaaatctttaaaattttgatgtatcaaaaaaaagtcataaagtcaaaggacaaatgataaattggaataaatattagaatccttattcttttaattttaggctatgagaagattaaatagctatgtaatagaatttccgaaatgcaaggatatcttaaagttatcttgctgggcatgatggctcacgcctgtaatcccagcactttgggaggccgaggcgagtgggtcacctgaggtcaggagattgagaccagcctggccaacatggtgaaacctcatctctactaaatatacaaaaatcagctgggtgtggtggcacatgcctgtaatcccagctacttagaaggctgaggcaggagaatcgcttgagcccaggaggcagaggttgcagtgaactgagatcacgtcacctcactccagcctgggcgacagagcgagactccatctcaaaaaaaaaaaaaaaaaagaaaagttataagtcatatggctttctccatgtatgcagaaaatccatttgacaaaattgaacaccaattcataatttaaagtaataaaatactaattaatagataaattctgtaacacgataagctatatccaactcagttacatcatacttagtggggaagcacaagtatgtatcctgactgaaattagaaacaagacagtgttgcccactgtaaccaccactaaataacatcgctttggaggtacaagccaaaacatttatttatttttaatttttaaatttttaattttaatttttttttttttgagaccgagtctcactgagtcacccatgctagagcatgcagtggtgcagtttcagctcactgcaacctccgcctcctgtgttcaagggattctcctgcctcagcctcctgagtcattgggattacaggtgcctgccaccactcccggctaatttttaattttcagtggagacagtgtttcaccatgttggtcaggctggtctcgaactcctgacctcaggtgatccacctgccttggcctcccaaaatgctgggattacaggcattagccaccgtgcctgatctagccaaaacattcatacaaataaaaaaaatttggaggtaaagtaattggaaaggaggtgataaaaccatcttttttcacagatgatatgatgtttatatatatgtggaacacccaaaataattaatggaaaaaattactataaacaacaggaaaattgagcccctcaataggaaaattatggtaaacttaatccgtagaaatcaatattttccatatgtacgtaacagccagttagaagacagaatggaagaaaaggactccatttacaatagcaacaaagataaaatgtccagaataaacctactcagaaatgtgcaaaactgacagacaaaaactttaaaatactcatgaaggatgcaaaagtagacttgaataagtgggaagacacaataactttttgatacaaaggctcagtgttataaacatgtcagttttctctagattaatatataatttaaacataatccaaataaaaatatatacttttatttttctggcaccagccaagtgaatttttcaaagtgcatatgaaaaaggacacgagtaggccaggcatggtggctcacgcctgtaatcccagcacttggggaagctaaggcgggcggatcacctgaggtcaggagttcaagaccagtttcgccaacatggcaaaaccctgtctctactaaaaatacaaaaattagctgggcatggtagcacatgcctgtaatcccagctacacaggaggctgaggcaggagaatcacttgaacctgggaggcagaggttgcagtgagctgagatcacactattgcactccagcctgggtgacagagtgagactgtgtctcaaaaaaaaagaaaagaaaaagaacacaagtaagaaaacttagatacctctgaaaaagaacaataaaggactagatattagaaattgaatctttaatatctattaaatctttaatattgaatattaaattatgtcactaagcctcagtcattaaaactgtatggcttaggcaaaaagtggaaagaccagtgaaacacaacagacattccagaagtagagttaaacacacaacataatttagtttaatataaaggtgatatctcattattagtgggataaagataggtttttatttttattattattaatttttttttttagacaggtctcactctgttgcccaggttggagtacagtgatgcaatcatagctcattgcagcctcagactcctgggctcaagagattctcacacttcagcctcctgagtagctaggactacaggagtgtgccaccatgcctggctaattttcttttttttttggagagagaaaatctcactgtgttccccaggctggtttgagggaactcctggcctcaaatgatccttctgccttggcctcctaaagtgcagggattataggtgtatgccaccacacccaacacatttttaattaagtagtgttggtataacttgctagccatttggacaaaggtatagttaaaaccacatctcttatatcctttatcagaataattgtaaatgaattaaagatttaaatgtagaaaataaaatcataaaagtactatgtgacagcacaggtgaatttcctgtattatcttggaatgaactttctaattatgagtcaaaatcaaagagtagatttagccagtggaagatctttcaagctggttcatgtgtccttgtgatagcctcccataggttggttatctgggtggtttgttgtcattaataaacatctgaacatttaactcttggaatagtggttctaaaacttcagattgcatgagaatctcctagaaatcttgttagaaatgtagattactagatctcacctccagagattctgactctgggaaagagtataataatctacattttaaacatatagtcttagaaaacaaataccaaatactcatcatcctgaaattaaggatatcaatgagaagtaaattgagtcatgccatgctacttggggtagtcaggcatgcaaggtaattccatacttaaagccaggcctaagatgtgtggagatttctctccctgggacaacttccatcccctcagtcttaacagtatcctcttcattccaagatgggtactgaatttcattgcataaagaaaacagtgtaggctgggcgtggtggctcacacctgtaatcccagcactttgggaggccgaggtgggtggatcacctgaggtcaggagttcgagaccagcctggccaacatggcaaaaccctgtctctactaaaaatacaaaaaaatagccagatgtggtggcatgtgctgctagctacttgggaggctgaagaaggagaatcgcttgaacacaggaggcggaggttgcagtgagccgagatcatgccactgtgccccagcctgggtgacagagtgagactccgtctcaaaaaaaaaaaaaaagaaaagaaaacagtctgatgtaacttttaaactaaggaatattgttttctcattggttcagtatgaattgaaatatctgataatttgaggaagggcttaaacagtcttaattttagggaggggggtaatttttaaagtaggcagtttttattctttttattgaaatggagtctggctgtgttgcccaggctggtcttgaactcctgagctcaagcgatccaactgcctcaggctcccaaagtgctgggtttacaggcatgagccactgtgcctggcccattcacgtggttcaaatgtagaaaatgtagagcaaaaatctacctgatatttttgtatcctgtcagttcccaatgtcccctaacaccatcctccttgggtttatctatttgtttatttttaagttaaataattgagatgacgttttgctatgttgtccaggctggtcttgtactcctattcctggcttcaagtggtcctcctgcctcagcctcccaaagtgctgggattataggcatgagccactgtgcctgactcttgagtttctttatatataagcaaatacaaatacaatttttttattgtccctttctttttatgcaaaaggaaatacacatttttgtgcattgtttttcaattaataatatattttgaatatctttctgtattagtacatagagaccatctctctttttattttttgtttttttacagctgcatagaactccattatatggatatactataatttatttagccaggcccgtgtcaattgacatttaggttatttctagtgaactatctgtgcatatgtcactgtgtatccctgtaagattatctttaggataatttccccacagtggaattgccaaatcaaattatatatatatatttgtaattttgatagatattgccacatttgcctccatagaggttgtatcaatacacatacccgccagcaataattcctcacaggcttactaatggcatgtgtcatcaaactttaggagttttccattctgttagatagtatagcagtgcagttttaatatgtatttctcttattttgagtgaggttaagggtctttttatatatttcactgtctggtcattttttttagggctaagtcttaaaacaagtattttcttcataaatagaactgctagtacagtgccatacttagaattcagtgaaaacttggttgaaccagatttagcagttcttcactttctggcataacaatatgttccaggatcaacttgtacctaccttgccccagctctggaatgagccatttctctgaggagcactggtttttcttaaggggcaactatattttagatcaagagctggcactaggtacgctccttgctactggagtgtattttcttggcaccttaattgcatggagctaggaaatatgcatgtctatacacatagacacatatataaacacatacatattcatatacatgtgaaacatgcatatacatgttaaatgtacatattttagaaatgctgagttcacacagatagtgctaattcccattcatctctagcaatttctttcttgcctttcacccttccatatttgtatattccttcttcctaaatgagagctgatttccaacaacttcaacaatgtacccattttgctcaattctagaagggctcgtattgcgttgtttctggtgagctgtcttgtatgtatatccactgtgtatccattacatgtgtccactatgtaatacaactgaaacaatccagcatcacttcacccatttcactatagtaaattgtaacttgttttttaaacgttaaaaaaattgatatttccttaaaaatacttcataattaaaaggaaatttacctaaattagatttttattgtttcataagtgatccattggagcaatatacaaggaattctttcatgtaagctttagagcaattatttttagaaattctacttaaacctttgataaggatactatattagagatttattaaaagcaggatatttagtagttttaagataattaaaaagggtttgttattgtgctgatagtcaactagttatttaagatataacattaaaatatgcataaggccaggcatggtggctcatgcctgtaaccccagcactttgagaggctgagttgggaggatcacttgaggccagaaattcaagaccagcctgggcaatatagtgagaccctgtctctaccaaaaattaaaaaaaaagaaattagccaggcgtagtggtgcacacctgttgtcctagctacttaggaagctgaggtgggaggattgcttgagcccaggaggtcaaggatgcagtgatccatgattgcaccattgctctccagcttgggtgacagagcaggaccatgtctcaaaaaaaaaatgagagagaatttttaaaaatatacatgttaaattgcattccactctaggttcaaggacactacctttaactagaataacatacgcagtattcataaagtaaatataagcctttattctaaaactttggatttccttataaaatcctatagga

SEQ ID NO: 71 - DNA, 32744 bp, Homo sapiens
  source 1..32744: mol_type = other DNA
gtgtgggaggggcagtggaactggagtcagctaatggctgacgcactacgcgcagagggaaagacgggtcaccaatagcgacacggatatggccccgcgggcggggtttaggcccaaagtggtgtcggagcagcgcctattagtgtcatcctcaccgtcacggccggcgcctcctcctggattcattcactcgctcttttcattcacgaaggtagtgaggcctagtggaaagccatggagagcgctctccccgccgccggcttcctgtactgggtcggcgcgggcaccgtggcctacctagccctgcgtatttcgtactcgctcttcacggccctccgggtctggggagtggggaatgaggcgggggtcggcccggggctcggagaatgggcaggtgagtcggatgcagcgccgcgtcctcgctcccgcggcggcccggaccaggcctgggccgtgatgactagttctggggtctgctcctggccttcccctccccagctctcctctttctcaggctcctgtgccccgcgggcccctcctggctcccttggctgtcttctgcttgcttagactacttgcagagttttaaggtacgaaatacactgctcgctcaatcctgggaatctaagctcagcttagggtgtaggagaaaactgccttaagtctctggggcttgtgccctttaagccattccgtgttcatggagccagtcagtcgccctgctgcctcctcagtcacacgctgtcctccttggttcgccccttgtaagtgtttttaaaataaagtttttcgctcggtttgaatattggccctgtgctaaggatgcagagcattctgttaacatgtttgggcagaggatggaaaggggtgtagggacacaatttcagaaggctttttgcactgcggaatcgtacctccccagttacgattaagatagtaatcgtatctggatttggcctatttcatacaattacaaagcccctttaaaaggaattctcgctaaactgttctggagtcctaacgagtagcaagaactattgcttctgtaaaatgataactcatcatgttaaaatcagatttttttttttttttcacaaggacgtttgtaggaaaaagtatacccgtaaagagtgaaccaaacacatggaacttgtagtcggaggatttttaaaatggaggacgaaggtcaggttgaggaaatagggaaaattatctgcagggaagttttgctccccccccccttttttttttctttttcaacctattttgtttccttctttgctttatttttcgtctcttggccttttttccctttaaaccgagtgattacttatgatatgcttgtggtcctaccctgagatgattatttattttgatgttttataatcgaatgtgcacttcctaagcattttattgaattttggggtggttaggcattgcctgcagactgggctcaggtaagatacactaataatgttactccatgttctttgtttatttagaaacatttaaacaacctagtaggaaagacatatgttaaccttttgggtttatgttaacattaagagaaaacatcttagcagtggatatgtatgtgaaatctttggacgatgtggagcaacattataattctgtttcacagtcacctgtttctctgaaaaaggaagtgaaatgttcagctgggtgtgatggctcacgcctgtaatcccagcattttgggaggccgaggcgagtggatcacaaggtcaggagtttgagaccagcctgaccaacacggtgaaaccccgtctgtactaaaaatacaaaaattagctgggcgtggtggcgcgcccctgtagtcccagaggctgaggcaagagaatcgcttgaacccaggaggcggagtttgcagtgagccgagatcatgccactgcactccatccagcctgggtgacagagcgagactcatctcaaaaaaaaaaaaaaaaaaaaaacagaaagtgaagtattcaacttggttataattaagattatgatttcccaattgacttgcccacattcttcattgttagttttggaaaacctgtttgaagacttttgactacaaaagactacaagatttttatacaagataaaaattagggaattgtatcaagataaaatttgtaattggtaagcaaagactaatgttaataacttgttgttttcttttcttttctttttttttttgagacagggtctcactttgtcacccaggctggagggcagtggtgtggtggtgtgatcatagccaactgcagcctcgaactcttgggttcaagtgatcctcccatgtgagcctcctgagtagctgggactacaggtgtgcatcaccacaccagctcattttttttgttttttgtagagacaaggcctcactctgtttcagaggctggtctggaagacctgagatcaagcaatcctcctgcttcagcctcccaaagtgctgggattacatgtgtgagccaccatgcctggatgtgtttttttttgtttttttttttttttctctttaaaattgaccatattggttgattattcaaatgataagtccaagtcatctacatatgagtgtacagtaaaaggcaagtgatgtaacaccataagtaacatttgtgttgaaaagatttggccccagaggaaggataattgataaattaagggaagtatttgtgtaagatttagatatgaaatttgaactggaacactggaacagcagaggatcatagtatcataattgaagtgaaatgctgacaggttcaatttaccctgggttttggattttttttttttaaatgcttaagcagaagaagtgatcttaaaagaaaatactccctttatcttcaaattctgggactcttcaaaaacaaaattaagagcagctcatcttaaacaggttcttcacatgagttggaggggtgaactgaaataatttgaaaaacaaactagcagagatgacacttgaataattagagttgtgattaaaaatattgttccaccaaagttatgattttagaattgttgtatgtaaatagtactagtaagttttttccctacgaaattactatcttaatctcaagagtctctgttcttatgcagcctttgaatctactttctagtactaatatttaatattttcctctttaaaaccaattatatattttaagtattttattagtatatgttgaattgatactatatttttattcttgttattcttagtctcttcatgtgagtatcttcatgtgagtatgtttaatctgtctgcctcagattttaggatctgaggggcagaaagcgtggattctcactttttgtcttttctcacaaattggctcttctaaatttaagaacaaaaactttgaaaaacttgaaatacaggtatgcttcacaatcagtaaaatattctagataacagtttccttagtgttgttaggctttcaagactgtccattacttggctggcccacactctaatttatctccatctcctggtcaagagctgggccatctctttctcctagttctcaccagtaacattcccactcaggtgaatcccctgtgttccctatacccctagaaggtgggtttagccaatttagtaagtaagacttctttgtcattgttacccgaatacttcctgtatttcttaggagaacaaaaggagatcctgtgaatgtggagtttcaggtgtttgaaggtcagtgtagcaagtaatcaaaaaaagattgataacaaaggtggtcagtttgtattaaataaaggaaagaacagtcactgctatagagcaataaaaaatgtgatctgtagaatgtggtttgaccataaatacattttgcaagtatttgagtagtttccattgctggagttcatctaaaatgattgctattgaaataaagtggagatgatagatgcaaaggcaaggtaagtagacttccaatgtcaagatattttataactttaaacataagacagcactctgagcacttatttttagtttttaatgaagaggatattgttacacgcagtgaagaataaatgatccactaatcagttagtgagttagattttttaaaacaactttagtgggatataattaatataccatacaatttgcccatttaaagtgtacaattcaaggtttttacttatgttcacagggttgtgcaaccatcatcaaatctaatttcagaacattttcatcttccttaaaagaaatgctgtacccattaggcccttcactccctgacccccacccgctccagccctagtcaactaccaatctactttctgtctacgtaggtttgcctgttctggatatttcatataaatggaatcatacaataggtgttcttttttgttagtggctctttgatttttgcataatgttttcaagtttcatctatgaaatctgtacttcattttgtttgtattgctgaataatattctgttttgtggagtgaggtcagatttcacaaaaaaagtcttcaaccctttgttctaccctctggatgtttacattagcaaatctctaagatgtagcttctggttgctgatggaactcgtttggctttgcagtattccaaggttctcctaattcagtagatagtgaggacttaaaaatggcatggaatggtgtggttctcctctggaaaaaccattcatgaaaacatgcatcaaaggattctcaaaatcacaggtataatcacaatttctgttttcacattggttaactgcacagggttaacctcaaatgactgaagaatacttgtgtaactagagcttattaatagtaggtgtctttctttaacaagagtttgtgatatcacatgatttgaagaattatatatgaaatgttagttatttaaattgacaacccagaagaaatattaataactatcatttattgaatgggtgcttgaaatgtgccaggaacttgagattatttttaacctctttgagctgtgctccgttgtccccagtggacagaggaagaatcagagggtttagtaaattgctttcattatctatggtttcatagctattaaattgcagagtcaggatttgaaaccaagtcatccgttctgcaacattcgtacactgtatgttggtgatgggcctacagactggatgagtactcgggagtagatttctttatacctacaaactttattaaaagctttttgattgaagacacactttcactttttaaaatttaaatttttgttttatttttaagaacaatctcagaccaaaaaaaggcacagtttcaaatttgcacattcatgatttttctggaaggattgcagaatagttggcacattttgggatcaagtagcttgggattttcttcagatttgcaaccataaatcttgtcgtatgagaaaatactggaaagttactaaggtgcttaacaaagcaaagggtttgacagtcatcagaatggtgggatttgacttcgaatgctattttctgtttatcgctctggcattcttgaatggatttagtgactccctggaggtccagcttggtaaatgtcatatgcttgctgttgacattctagtattggggtatagatacctgttcttactggcgagccaatgttgatcgcagtagtcattacatgggttatgtttttcgcagaggcagggaaggtgagggaaggcagagaaacaaacttagtcataaatgtttttgaatatttgtttattctgccctttggctcccgaaagggagtacgtgtgcctaaatggaaaaagttctgcagattaaagttggcagggcaactttcaagtactagtgctggagtctacataagaggaaacagatgcaactgaagattggacctaaaagcatacctttatttgatttggaggaaaaaccaaagagggaggtttcctgggattacagatcctgagtttacattccctgaatatctttttccctcactcccctcccgactagcccccattgctcccaccctgtttttttttttttttttcctgttctttctttctgtgcaacactaactttcctatttagaggtcaaacttgaacttggagacccaaacctagacttgaattctagcttccctacagatttcataggcttattgtgaagggtaaatgagaatacttattctctgtaaaacagatagtacataagtgcttgataacttgttattattatagtattattagccttagtagcactgtgctctgattacctgagctaattgccagggtagggtttagaagaaagagttgatatctgggtgactacattgtcagataactgagattaccattgctacttgcaactgagagtgttgagctttaaaactaattttttgttgttgttggttttggttggttgaattgaggataatttatttctttcagtttcagaaaaatttgtcagatttacataacaaaatttataagtttagaatgcatgggtaaacggatttgaatagatcagtttcagtgccattaaaagctatttgtagataaggataagttaaatgtatattttaaaaacagtgcatcctttatttcatttcccttcttgtcactcttagcaaaacaacatgtagcaattcatatgcatgtcatctgggatggattgagattaaggttagggaggcagggtgagcaaagccctcactgggcttggtggagagtatgacataacactattcatttgcccatttatccaccacaaatactgttgagtgctaactatagaccttataatagtccaatgggatgacaaacagtaacaaaatgaataaactgtgctatggtaagtggtgagaacaggaagtatttggtcctatgagaatttgtgagggaaagttctagagctgtgctggggaagcagtgcctcagctgagatctggcggttgagtgtaagtgagcaagctggagtgacaggaagggcagagggaagaatgttcttggcagaaggaaaagcagttgctaaattcctagggcaggaaagggcagggccctcatgaaacgagggctgagtgacgagccaggaaagctcagatatgagtgccatggaactggagaggcaagaagggcaatgagcagggccttcagcctttatcctggagcagtggaaagcagttgaggtgattttaagcagaagggtaacactgttgtgtttgcaactgtaagccgaatttcttgtttctatgacttccctagagttattgccggccctctttgggaaaacattgttacacagagatagatcagtctaggtattcagataaactcagttaaaattgccttttttaaaatgtcaattggctgggcgcagtggctcatgcctgtaattccaacactttgggaggctgaagtgggcggatcacttgaggccaggagtttcagaccagcctggccaacatggcaaaaccacatctctactaaaaatacaaaaattagccaagtgtggtggtatgcacctgtagtccccgctactcgggaggctgaggcaccagaatagcttgaacccaggaggcggaggttgcagtgagccgagattgcaccactgcgctccagagtgggcaactgagcaacactctgtctcaaaaaaaaaaaaaatttaatgaatacaataaaatgggaatttatgctttttgtaagggatgctacttttgtgcacttcttagttatcatctctcagagaccatttctgtctgggggaaaagtctgatcactgtggtatgggaagttcttctcttacagggactgagtgatggggttattgaaacactgaaactaggttattgcgttgtcatggtaactccataataccatggtgtggtagttgagaagcttgccacaaatctgtatcagaaagaacgctttgttttatttgtcgatttttgtctacaaaacaatgcgtttgccctatctctaactggcaattccaggaaaactatccagtttctggaaagttatctttgccaccatttagtgaagttatttccatttaaataacctagtcattgtggaagagaggaagggctagacagtttaagaacttgaacaattggtgcctctcaagagtattacattgggaaacagtatagctaacaaacagattggctttggagtcagtgggcaagctgtgctgttactaagctggttgaccttaggcaaaaatagttaacctctgagcataacttctttcattttttagggggatgatacttttcgggattattatgacaattaaatgagatgtaaatgaggttctagtatagtccttactgtatttttatgaatattaagtaacatatatttaagagcatcatttgtttgtatagattactcttattggatgaaaagggattgttgaaactaagaaataattgtagttcactcagcaggtatacacttgaaaatctaaaattatgaacagaccaattaggagatgactagtgctactgcagaagaattccttgcttgggtaaaagatttactaagcagttcctttatatatagatccccttagtgagtaaatctaagataggaaggacttcaaaaaatttggttatttataatttttcaattacatttgtaaaaaccttagagttatctttaagtcttcaccacatgcagccttttaggaaatcccgttgactctgaacttcaaaatatccagaatctagtgagttctaagccaccacagactcttgtctctctaataacaagtttcttatctctctgcttccaccttggctctcctgcagttgattctcacacagcagccacagtgatccttgacaagctttggtcagattatgtgatgctctgcctagatctctctagtggtttctcacccactcagattaaaactcagtatttgtctcgtggctttgaataaggctttattttattttattctattttatatttatgtttatttttattttttgaagctgggtcctgctctgtcacccaggctggagggctgtggtgtgatctcagctcactgcagcctctgcctctcaggttcaagtgattctcctgcctcagccccccaagtagctgggactacaggcgagtgccaccacaccctgataatttttttgtatttttattagagacggggtttcaccatactgaccaggctggttttgaactcctgacctcaggtgatccacctgcctcagcctcccaaagtgctgggattacaggtgtgagccaccgcacccggcctgaacaaggctttaaaccacctgcttcctgcttccattgacctctgacctcatctccactactcttactccgttccacccacatacacctcttgctgttccttgaacaaccttggcattgttgctttggggcctttgctttttcctcttcacggaatgctcttcccccagatatccatgtgactgacccttcttactctccttcaagtctttgcagaaatatcaccttttcaatggaaccgcccctcctacctataaactcacagtcgtttctccctcactcccactcctatccattaccctgccccacttttcctttttgtcatagcacttgtcaccatctcccctactgtatactttgctcatttatgatgtttctgttagaatgtgagcactgtaaggcaaggatctttgtcttttaatctcaagcacctagaacaatgtctgtacacagtaagtgccaatgtacctttgttgaattaatggaaatatctgttaagtaaggtattcatacatatatatatatatatatatatatatatatatatatatatatatttttttttttttttttctgagacagggtctcactatattgcccaggctggcctcaaactcctgggctcaagcaatcctcctgccttagcctcctgagttgctgggactataggcatgtgtcccagctgtgtctggcttccagtctttttaatattaagggataatgatttttgtgaattatcttctctttttacattctcttatcagctacaaatctaacaaatattagcggtttcccaacctctaagaatgaaattatttaatctaaaaatatagagtaacctcaggacgaagttctcctaatacagactctggaactagattacctacttttgaatcccagctcagctagttacagtgttatcaccttaacttctgtgtgcctcagtttcctcatctgtaaaattgggataattatagattggaaatactgattaaatggggctaactgatttaatgtgtgtggaatacttagactactgagaacactacctgacatttcaatgttaaatactatagaaatgatagcagatattatctgatgggatgattctgattttatccacatgcatcttttcccgactttccctcaaatttctaaagacactgcatattcccttctagatgattatcaaagtcgtcaattttagtatgtctaaaatttagcttttctactctccccagcgtgttctggacttccttatttttgctaattatgtcatcgtcttgctagtcatgaagctccaaatcagagatggcaaattctgatgcctcaggcaggtcaagtaaaatgagtgaagtggaccaggtgtaatgcatgtcaagacactgtccaggtaaccaggcatggtctctagtagcagccttcagcaacactggcacagtcctctcagattttcaccagcagcccaaatctagattttcatatagaaagtttcttaattgtttagagttgatgcaaatttctcaggtttactctgtggaccaaataaattatgtcagtggctagatgcatcaagtagccagtttgctccctcatctctaagtcttagaatcatgctttcctttgcacatctagacaggaaattgccaaatcttgctgaatctaccactacagtctctctcgcatccataccttcctctatgttctcctaatatattgcctccctaccaaatcttacactcactctggcgcaagtttaatctaccagtgaagcctccaatcaagttaccccttccttataccttacacatacaggtcagaagtttcataatgtctatgcaaacatcaggctccttggcccttttgatcttggccttgtgtctgtttctgatgtcacctcctttgcacccttccttggatgcatcctggatgacgtcctgtgtcccagacatgcctgtgctttcctgcttcttgcagcctccagggccttgcttgtgcagaggcatttagtaggttttggtggttgttgcatgttggcctcactctgcctgaggtgctctttctcatattccacactcttcctcactcttcctgtttgtgaaattctactcatgttccagagtgtcaattgtgactttttgcattgagagctttctagatgatagtgactgtgcacttttggaactctaatagtatttcttgtattcattctggtgggctttttcacagtttaccttattagtcgtgtgtatgtatatgtgtgcatgtatcacttcatttgctcaaaagtgtatttgcactataatatttcatgagtgaatacttttttccttgaggttctggtgtatttcaattggggggtcagatgttttgctttagttttctattttttgttctactttgcaaaataatttgtgaactgttttttctccttcttctgaaacctcaagtgctatacatctaaaaatgctagattgaaaataaaccaaggctggttagacaaagctggttacagagttatgatagcagggctgtcatactagttttgaaaatgtatagtgcactgagatcaaaaagatgtccttgaatagtattggtaacaggctaacctttcttcatctgtggtatcaggaaattacagggagttacagggaactgaacactctgccatatttaataaacattaaatataaatttggtagtatatttattattctttcccaaatctttacaaaattgttgtgagtagattttcctttagtaagaaagatttctccaattaaagttttagtaacaccttgctaattggtaaggcttattggtaagactaattcgtgaaaaattaaattctagagtgtgttgaccaaaatgtagtttttaattttgaaattgtgataaaataagtccataccttctggaactaccattctttttgaattgttgaagactctggaccaaattccctggaaaatctctttgatagtaaatacattgaatagtaagcatatagaaccagaaactgctataaagttaaccatagagcattgagtatatagtttatttgcttcatggaaataaatgaatactacagttggttgacaatttttacacaagtttagtcagccattttgtgaaaaaacttgagaaaatgaaaaaaatcaggaggcagaagagaatcatgatagaatagcagaactggaagggatgttagcaacctcttcacttcaattattagggaaatacatgctggaaaaggtaatgacttgcccaagattatgcatccagttagagaatggccaggccagacagttcagtggcaaagggcagaagtggtggatgcatctgtggtagattgattaaaagcaacgataggagcgatgagcagcaggctctgacagcaaagtggaagagatttgtctgggttgaattagaggaaagtggtgaggaggaaaagcagaggtgatttagtgatagtgatgaggatgctggcagaactggacatcatcacacattcctgaaactggtatgaggcaagaaacagtcctctctatacaagagcctaaactcttaaagaaatgatatgtacctttttagcccttaaggatgccattatgccatgctcttggtacaccctacatagatgttaagaccaggaggcacttgttcattgtatatagtggtgcaagctaagttagttgatccaatatctcctacccagagtctcagctgtgcttatatcccaaactactgattatgttgatgacacttaattcccaaggaaatactgcatttagtatatgttcctcaaggtggccaaaaaagaatatagtattttttagaaatttaaataccagtgtaaaaaaatcctttaatattcctagtctggagaaaacttcttcagattgattttactgtaatgactggcattaactgctcataaccaagctaacttccagtaggaatattgtcagctttgctttactgatagctgagactctagtcctgtagaagcagtactcatacagtagacaggttcccctgatcttgcacatccaatcttataattttgccgtggaacaggaagctactgcttatctgtgtgttccaatgcctatcactgtctgtcatgtgtaaggaggcgatgatctccttacagataacgtgaaaacaaaagccacattgggctagacaacaacattcacacattctgaattagagcaggctgatttaataaaatgttactgtaatggtgacattttaatttacagagcccttttcaagtattcttgaattatttccataacaaccctatgaggcaggttagggttggttttgttatttccatgtaatataccaagaccagatggagatgcagtgactggtataagggttacacagatagtaagtagcagaagaaattgaatctaggttttctgactctaggctccatgttctttctaatttactgccaaagctgctaaataagggtgattttaaggccatttggaatacttgcacatgagcttacaagttggagaatttctcaaatgttgcttcaaagtgaaaggttggccaggtgtggtggctcatgcctgtaatcccagtactttgggaagctgaggtgggaggattgcttgagcccaggagttccagatcagccagggcaaaaaaaaagaaaaaagaaaaaaaatgagccaggcatggtggtacatgcctgtagtcccagttactcagatggctgaggtgggaggattgtttgagccccggagattgagggtgcagtgagccatgattgcaccactgcacttcagcctgggtaacagagcatgaccctgtctcaaaaaagaaacataaaagttaaaggtctgtttatatcatggcagtattcaaattcatctggatcatatgaatcagtccagtgtgctcattaacgttacattctagggctttactacagacctacagaaaaaaaatctgtaagaaaagagcatgggaccatgtatttttaacaaataagatgattcttaaggtcatgcattttgggggccaggcacggtggctgacacctgtaaccctagcactttgggtggctgaggtgggcagatcacttgaggtcaagaagctctagaccagcctggcctggtctagtagagatggtgaaaccccatctctactgaaaatacaaaaattagccccaagtggtggcatatgtctgtaatcccagccatttgggaggccgaggcaggagaattgcttgagcctgggagacagagtgagactctgtctcaaaagatcatgcattttgggaaacactggactagccctagaaaaaacagtggattatccatgcaggctttttaaccaaatatcttctgaataccagggcttggtttataatagtgagccaccgtgtccggcccagatgggtttttaaaaattatctttattggccgggcgtggtggctcgtacatgtaatcccagcattttcggaggccgaggcaggtggatcacttgaggtcaggagtttgagaccagcctgaccaacacggtgaaaaccggtctctactaaaaatacaaaattagctgggcgtggtggtgcacgcctgtaatcccagctacttgggaggctgaggcaggagaatcacttgaacctgggaggcagaggttgcaatgaattgagattgcaccattgcactctcgcctgggcaacaagagcaaaacttcgtctcaaaaaaaaatctttattatgaaattaatataaatgatatcttttaatgatgattcttaaagaggcaatagactgaagaggatgttctaattagtcttcttcttcttcttcttctttttaagccttttaaatgatgaggaaggaggaaaatgggcttaggttctaccagaagaaatttagattttagttggccatctggatgacctttgtagtaattaaacagtcagattgggtcattccttcagcagataaataaataaatacatatatttctaacttttattttaagttcaggggtgcaagtgaacgtttgttacataggtaaatttgtgtcatggaattttgttttacatattatttcatcaccgaggtattaagcctagtacccattatttttcctgatcctctccctcctcccaccttccaccctccgaaaggcccatgtgtatgttgtttccctctatgtgtccatgttctcatcatctattatagttcccacttataagtgagaacatgtggtatttggttttctgttcctgtattagtttgttaaagataatggcctctagttccatccatgttcctgcaaaggacatgatcttgttcttttttatggagcagataaatattcattgtgtggtgattatatgctaggccctgtgctgggtatgagaatatagtgatgagcaagaaagccatggtctcaaagttctgatatccggaatctacaagcaagttaaacaaatttataagaaaaaaaatcatcaaaaagtgggcaaaggatatgaacagacacttctcaaaaagacatttatgtggccaagaaacatatgaaaaaagcgcaacatcactgatctttagagaaatgcaaatcaaaaccacagtggaatatcatctcatgccagccagaatggcgattattaaaaagtcaagaaacgatagatgctggtgaggctgtggagaaataggaacacttttacactgttagtgggactctaaattagttcaaccattgtggaagacagtgtggcagttcctcaaggatctagaaccagaaataccatgtgagcaatcccattactaggtatatacccaaaggaatataaatcattctactataaagacacatggacacatatgttgaatgcagcactatttacaatagcgaagacatggaaccaactcaaatgcccatcagtgacagactggataaagaaaatgtggtacatacacaccatggaatactatgcaaccaaaaaaggaatgagatcatgtcctttacagggacatggatgaaactggaagtcatcatcctcagcaaactaacataggaacagaggaccaaacaccacatgttctcacccataagtgagagttgaacaatgagaacacgtggacacagagaggggaacaacacacaccaggacttgttgcggggggtgggaggcaagggggaggggaagcattaggacaaatagctaatgcatatgtggcttaaaacctagatgatgtgttgataggtacagcaaactaccatggcacatgtatacttatgtaagaaactttcacattctgcacacatatcccagaacttgaaataaaacaaacaaacaaaaagaaagccatggtctctatctctgctggtctggcagaagacacagacattatataagcagatccaaaaagtgttacaggagccggctatgggggcactaacctggttcaggggcttaaggaaggttttctggaagaagcaacatttaatccaagatgtggaagaaaagtagaagatgatgatgttcataatggtaataagatgtaatgtttattaaaaagcttaccatgtaccaggtacttttctaaatatcttaattgactcatttaatctgcacataatgtaataaggtagatcctattaatatctctgttttagtaaaagagagctaaaatatagagaggtcaagcagtttacccaaagtcacatagtaagtggaggagcacctgggctttgaactgaagtctgtctcctcaatttcctctcttagccactatgctaaacggcattgataaattagagatgggcaggtgaggggtgttggaggacaggggactatttcaagcagtgagaacaccttgggtgaagaccttgaggaaactgagaccatttcaggaagtttttctaaaagaaggttgagagagctggggctgagaatcctgagaggagagaggcaatagataagactagagaaatgtaggcagggggccagatcccacaggcccttgagtctacagtaagagtttgtttatcctaaggacagtgggaagtcgttgaaagattttaagcagtagagtgtcatgatcaagtttgtacttaggacagtttactctggcattttggagaatggatgtggaggtagcaactcaggaggttgggagaccagcaggagactggtgatggtaaaccaggcattgggtggtggtggcttggattaaggaaactgagacagggactgggagagggagtcagacaagaaagagataggaggtaaagttatgggcccttgtcataaacttatgattgtggggctgagggagacagcagagtccaaaaggactgtgaggggtctgagctctgggcactgacataaaacactaagagagatcaggctttgggaagaaaataatgaggttgatttctgacaggttctatgtggatatcaggcagtcttactgtagattcgcaccaagctgagcctaagtcctttggtctagccatcatttaagttgttctaaattagatgctatattttatagtctacagaaaagtgtggtgcctcagcaatgtaatagtttaggaaaaggaaaatgttattttttaataagttgagtgtattccatgtagcacattgtgctatagttgggtcaatccgtttgctattttctctttgggcagaaagtatagtggaaagaacgggtacaggattatcacaggacctgagttcatatctcatcttcccacctttggcacttattagtgtggaatctttgatcagctattctgtttttttccatctatcaaatgtgttcaaaaatccccactttgtctaagatattaagagtctttggaagcgtggtagaaagtacaaagcattatgcacatacaaggcactgggccttttcccctcttcacctttcaattagaaacctagaaatagaattgccgtatgagttgatcagcttgtgtgaggttcacattgcttcaagatttattttggggtctgttgcaactttgttgtgatcaacacctgagtctcttgatgtgattatctaatatatatcaattttagaacatacctaaaacagattttttaaagcaatttttgttaatgtaagcttgtttctaaattaaaagttaaactaatgtaaccactaattgtattttaaagagatgccttaagcttcaactttatttttaacatatacaaaaggtatgtatggttagttactacagtggattaaagatatagttaaattattgctagtgaagtatcatttcaactatggtataattggaagactttcatagcttgacataactgtttaaagtctcattattttattataagcattattataagagattattataagttcctgtcatttctcactcaataccccactgttcccatctcatgctaaaagatatttagagttctttttctttagcttaaggctttttattattctcttttttcattttttcctctggggaagtgagaaaggaatgttctcatttttatttaagctagattctgatgaattatgatgttaatgagataatagtaccttttagatatctgtagcaaaagtatcatctttgaaatgaggaaatattttccagaatatactttgaatcaatttttaaaaaatactaaggagtatatatccaaatcttctagtaattttagctccaaaatatgtatatttgaaaattgtgaattactttttgtttttttcaaattgtttgttaatgttactgcaaatggagacatttatttttctcttctcttgtgttcctattttagtttgggttctcccaaaatcagatgttgagacacattcaagttcagtttatttgaaaggtgatcccaagaaacaccagtagggaggagatagagaagggaattcagccaatttggccagaaatctaataatccgatcaaaaaatgggcagaagatttgaatagacatttctcaggacatacaaatgacaaacaggcatatgaaaaaggtgctcaacatcactgatcatcagagaaatgcaagtcaaaaccacagtgagatatcatcttacccagttatggcttatatctacaggacattatcaagcactgtggcccactggagctttagcccacacaataactctggagctagagcagaactcaagtttcagggttatcttatctgaggggctgggaagtttgggtatttatacaccagtggccttagtcactggatgaaggctgttgatggggaggagcctgagttccctaggacttctagtctaccgtgtacttggcattgctggcttcagccaccagaaaaagtcctaatttatttatttatatatatttttttaatttgtaatttttgtgggtacacagtaggtatatatatttttggggtacatgagatattttgatacaggcatgcaatgagaaataatcacatcatgaagaatgaggtgttcatcccctcaaccttttatcttttgaattacaaacaaaaatgtacaattaagttattattgactacagtcgccacattgtgctgctatcaaatggtaggtcttaatcattctattttttttttaacccattaaccatccgcacctccctcccagccccccactacccttcctagcttctagtaaccatccttctactgtctgtccatgagttcaattgttttgagttttagagcccataagtaagagaacacacaatgtttgtcttctatgcctgacttatttcacttgatacatgatctccagttccatccatgttgttgtaaatgactggaactcattcttttttatggctgaatagaactccattgtgtatatgtaccacattttctttatccattcatctgtcgacggacacttaggttgcttccaaatcttagctattgtaaacagtgctgcagcaaacataagagtgcagatatctcttagatatattgatttcctttattttgagtatatacccagcagtgggattgctggatcaaatggtagctcaatttttagttttctgagaaagctccaaactgttctccatagtggttgtactaatttacattcccaccaacggtgtacaggggttcctttttctccacatctttgccagcatttgttattgcctgtcttttgggatatatgccattttaactgggatgagataatatctcattgtagttttgatttgcatttctctgatgatcagtgatgttgagcaccttttcatatgcctgtttgacatttgtatgtcttcttttgagaaatgtctatacacatattctgcccattttttgatcagattattagattttttcctgtagagttgtttaggctccttatatattctggttattaatcccttatcagatgggtagtttgcagatattttcttccattctgtgggttgtctcttcactttgattgtatcctttgctgtgcagaagctttttaagttgatgtgatcccatttgtccatttttgctttagttgcctgtgcttgtagggtattgctcaagaactttttgcccagactaatgtccttgagattttctctaatgttttcttgtggtagtttcatagtttgaggtcttagacttaagtctttaatacattttgatttgatttttgtatatggcaagagatagggggtctagtttcatttttctacatataactatccagttttcctagcaccatttattcaagagactgtcttcagtatattcttggcacctttgttgaaaatgagttcactgtaggtgtgcagatttgtttctggattctctattgtgttgcattggtcagtgtgtctgcttttatgcccataccatgctgttttagttattatacctctgtagtataatttgatgtcaggtaatgtgattcttccagttttgtcctttttgcttaggatagctttgacttttctgggtcttttgtggttctgtataaattttaggattgttttttctatttctgtgtagaacattattggtattttgatagggattacattgaatttgtagattgctttgggtagtatggacattttaacaatatcaattcttccaatccatgaacatggaatatcttccaattttttggtgtcctctttaatttctttcatcagtgttttatagtttttattatagagatcttttacttctttggttaattcctaggcatttaatttcatgggtagctattataaaggggattactttttaatttctttttcacattgttcactgttggcatatagaaatgctacttattttcgtattttgattttgtgtctgcaactttactgaatttgtctatcagttctaatattaatagttttctcatggagtcctttgctttttccaaatataagattacatcatctccaaacaaggataatttgacttcttcctttccaatttggatgcccattatatctttctctaatccaactgctgtagctaggacttccagtactatgttgaataacagtggtgaaagtcagcatctttgtcatgttccagatcttagaggaaaggttttcagtttttccccgttctgtatgatgctggctgaggggctgttgaggtatgttcctgctatacccagttttttgaaggtttttgtcatgaagggatatttaattttatcaaatgctttttcagcattaattcatttaattcattaaatgaatatgtggtttttatcctttattctgttgatatgatgtatcgcattcattgatttgtgtatgttgaaccatccttgcatcctagggataaatcccacttggtcacggtggatgatctttctaatgcaagcttgtccaatctgcggccaatgggccacatgtggcccaggatggctttgaattgtggcccaacacaaatttctgaactttctaaaacatgagattttttttgcaattttttttcttttttttaagctcatcagctattgttaatgttagtgtattttatgtgtggcccaaggtaattctctttccagtttggcccagggaagccaaaagactggacacctctgttctaatgtatcattgaattctgtctgctagtgttttgtagagaatttttgcatcagtattcatcagagatattggcctgtagttttcctttttttgttgttgttgttttttttgtttgatgtacctctgtctagttttggtatcaaagtaatactggcctcatagaaagtgtttggaagtattccctcctcctctagttttcagaatagtttgagaaggattggtactaggtcatttttaaatatttctaatagtagaatgagaattaaacttctttttttttgagacggagtctcgctctgtcacccaggctggagtgcagtggcgggatcttggctcactgcaagctccgcctcccgggttcacgccattctcctgcctcagcctcccaagtagctgggactacaggcgcccgccactacgcccggctaattttttgtatttttagtagagacggggtttcaccgttttagccgggatggtctcgatctcccgacctcgtgatccgcccgcctcggcctcccaaagtgctgggattacaggtgtgagccaccgcgcccggccaaacttctttaaatattctaatagtagaattcagtagtgaacccatccaatcctgggcttttctttagtgggagactttttattacagcttctgtgtcatttcttgttattggtctgtttaggttttggatttttttctggttctatcttggtaggttgtatgtgtctaggaatttgtccatttcttctagatcttccaatttattggcatatagttactcatagtagccacttatgattcttagaatttctgcagtatcatttgtaatgtttcctttatcattttttatttgtatctttcttttttttcttaattagtctggctaaaggtttattagttttaactttaaaaaaagaacaactttttgtttcattgatcttttgtattttttttccatttccatttcatttatttctgctctgatccttattttttattttcttctgctaattttgggtttggtttgctcttgcttttctagttctttaagatgcattgttagatagtttatttgaagtttttcctcatttttgatgttggcacaaagtccttgggcaaagagatgcatttggaacgtgctccccagtggtatggtcagaggagatatgggcaaggcaccactagcttagctgtaattcccatcacaatatttgcattagatttcattttctttaagcaaagcaacaaagtaagcctgacgaaaaggtagaaaaggacttaattccaggagataattttaaaaatatagtagattagaggcataagttgatgtagttgatgtatactttctttgtgagtaaagtttctgcaacctctcagggtagttgatggattagcctgttttaggtattttcagtaaataaaaatgactgctgactaaatactgaacgaaccttgtaggtttgtgtttgtgataaagtatgaattaatctcttgtttatagtttaattctcatctactgaatgggagatgatttccacatggtctcctcagtacagggtgactgcaacacttggggaagatgtggcagatacagttggttgcttgttgacagaatcccacatttgtataggtactgtgtaatcatatgcttcaggaaaagttgaccaatcttgattagcttaagcttattttgatttctttcctcttgctagtggttggtttaggagcatgcatatcgcagttctggacaatgagatatgagaggagatttgctggagggagagattctgagaaggctttccgagccttaagaagaggtagaagaaagggtgttattatgtgaggatgggatggatacctgtggccaccttgaagaccagacagaataaactggggaaagaaccaacacactgaggatcacagagaagaaagatggaaagcttctgggatcttgatgctatccctgacccactcagtttgcccactctggaagtacctgaatgtttcctgttactttgagataaaaattccattttttaaggatatttctgtcagtttcagctgaaagcgtcctaagctacagattcagtagaaaaggagggaaattttcttgtttcaaatgaaattttataattgatttaaataaagtccaatgggttttgggtgaacttaatttattgctattcatttgaatacagacatggatgaaaggaaaagacttttgtatgggatatggttgcaagtcttactgaataaataaagtctcattcctgattatgctggttattgagttcttgtccatatcaggtagttaaattattttagtgcccaggtttatactttataaaaccaaagagtagaggtatgtgggaattgtcttattaccattattctttgagaactattaacaaatgattcaggaatattggattttcaattaacttgaagtaagtttcttgggatgatctgcttttagttactctaaatatttttagcaagtacctggtaatctgggagactgtggcccaaagtagttcaactgaatttgaaaaggatcaggactggctatgaagtgaggctgagtgggtacatctatatgtggatacgttactgtcctttgtgcatatttctttctaattacgttccaaatccaataagaagtcaattgtattcatcatcctgggggtatcatcttaactctgccatttttccatattaatgtattaagtataaaggttgtgaaatccatttcagatgctcctggtttgggaagtataaggttacagattcaatggcatttaaatttctttttttcctctctcctctttttttttttttttttttttttttgagatagggtcttgctctgtcacccaggctggaatgcagtgacatgctcactgcagtcttcacctccccggctcaaataatccttcccacctcagcctctctagtagctggaactgcaggtgtatgccatctttcccggttaatttttgtattttttgtagagacagggtttcactatattgcctaggctggtagatttctttatttttaaaatagaaatggtggggaaatgtaccatccgggtcactgaaaagctggagcaaagatgtatggaactcagggacatggactctactttgcatccctggtggggtgggggtgtgtccttactgatgtagactttaagaaccatgagagcctgatgtgtgtgtataaatatggctttaaaaaagaagacagagattgtttatctttaatagcagtaatataaggccgaagtctaaaaggactctaggataataagaaatgaatcctcaggctggcatgatggctcatgcctctaatctcagcactttgggaggccgaggtgggcagatcacttgaggtcaggagttcgagaccagcctggccaagatagtgaaaccccgtctctattaaaaatacaaaaattagccgtcatgaggatgcatgcttttaatcccagctactttggaggctgaggtagaagcattgcttgaacctggaaggtggaggctgcagtgagccaagatcacatcactgcactctagcctgggcaacagagtgagactctgtatcaaaacagaaaaaagacctcagtctgtgaagactttggtcatacactattgcttggggtttaagggaagctgcctttttggttgggggtatcctttctgataaaagagattcagtaacttagtcaagctttgctctgtgaatgaaggggtgtgtgtgtgtgtgtgtgtgtgtgtgtgtgttgtggggggtgggtgtgcattcttttcctgccttctggttttataggagaaatactcattgggtcttggaaagacgacacttcctgtgtttaaggtacagtattatgctgactagtaaaataatcttaattctttgataatgggccaaaggcaagtacaagatgaataggaaagctattattacaggttttaattttgaaaattttatgcctctttttctattttttgttatatttttatattactgtcatttctgccccttatttggtactgatgcctcatatcagggatatgacatataccatagatatatcatcaagagtaagatataacatcagagaagttatatcgtctattcttaggttctctccacaccccatagttattcttttatttaactgattcaataaattaattgatcaccactggtatgtcagacgctttgcaatgcctaggggtgtagcagtgaacaaaatgggcaaagtctttgctctcatggagcctgcattttaatgaggaaagatggacaataagcagacatttggtaagtttggtggtgaaacgtactaagaagaaaaataaagtagatgatagaataatagaggaggatagagaggaagtttgtatccctgcttctttgcataggatgatggttagggaagattttctcgatacgttgacatttagactgagacctgaatggaatttctttactccactccaaccatactggcctctttgccattccttgtgtatttacagcacaaactttgtactaatttatccctttgcctagaatactcttctgagagatagtcacaatttaaataagtagggaaaaggattgggagttatcagttgtgttaccaggcaaatggaattccctcttctattagaagtgcagaggatgggtctggcagccattgaattgtgtagaattatggtttctttagtgaatcacttctaaaataacatgcataatttgtttaaatatacatgatgtttaggataatttttttgaagacttaattaatctcacctgttatttttcccgcacttgttactttacaaaaattaaagtggactatctaacaaaaaactaagttgtcttggtcagtttgggctgctgtgacagaatactatagactagatggctgaaacaaaacaaatttattgctaaaaattctggaggctgggaagtccaagatcaaagcttctgatgtcaggtgagggatttttcctggtttgcagatggctgtctttcattgtatcttcacatgcttgtgtctttttttgtaagggcattaatcccattaataattacctcccaaaggccccacccgcagataccatcacattggagatttaagcttcaacgtatgaatttggggggatgcaaacattcagtcccagagcataagttataatattttgtcagttgacctaataaaacatgatatcctgggtaacagcatagaggtaatcacattacttttaacacaaataaaagcttggaaagctttttggtaagctgaagaggaataacagttttattctaatgcaatttttaaaacaacaataggctattgttttacacatctctctgaaaactatacatttattgactttatctagaagggcagtaactatgtatctctttattaatctttctcctaaacatactgaaaatattttgcagtacacccttaggacttattaggtttataaagaaaaggcagctgtgaatgaaatgctgaattgcatcccccattggatcaactctaaaataattatgcaaaaaataagaataaccccatttttgctgaacatataaattttatcattgcaaaagaactgaatagttcaacaccacattctcatggagatgtcttactgggaccgcagtagttgggtgtactattgttgaaaaagataatttctatttgtatgtaggttactctgtgcctaaaatggatcatttctaccatcgtattttatcttccttgttttccacctcatcttttatttatacttcatagatcatgatatttggagcatatttggctattagccaattagtgcttatcttttataatggttttcaaggataacagagataaattaaattccaaaatattactgaaacatcattcccaatagcaactataaccttcttctcgcccgtgctttttctggaactatagaacagaccaaatgagatttcaccttttttttgtttttaagctaactgtgccctccagtggagaaaacacagggcagtgaaatagctcaggtaagaagcagcagagaggagaggatgtaacacagccaggtaaagttcaagctgcgtagctgttttctacataaaagaaagaaattgttttcacccctcataagcaagacttttttttttcttttttttgagacagagccttgccctgtcgcccaggctggagtgcagtggcatgatcttggctcactgcaacctctgcctcccaggttcaagtgattctcctgcctcagcctcccgagtagcggggattacaggcgcgcaccaccacacctggctaagttttgtaattttagtagagacagggttttgccatgttggccaggctggttgcaaactcctgacctcaggtgatccgcctgccttggcctcccaaagtgttgggattacaggcgtgagccactgcacctggcccataagcaagactattatgcataagtcctcctcttgatgaatttgttgatgaatcaaagaaggatatattatcatttctctgacttaatgtctttgatgcaatgcttttcagccttttgtcctctctggtaggatgtattcagtttttgacacattaggcaagtgtaacaggaggtgagtaattggatttttttctcccctagaatgaactcaaatgataacttttaattttttaaattttttgaacagatgaaagaaaaccttaaattaagtagatataaacaagaaacattttgctgctacttgtatattcaaatcattcagaaaactatgaattgactatgactcccccttttttgaatagaaaagggagagagttgacctgacctctgtggcttggcctgaacttgatctcttggtgaacactgggcttcatcagtgtgaatggtgactatgtgtgactgagcacctgtgagggttacagaggcacgtgttcagaacatgggctggtatgtgtgcaactctgggctggggaatggagccaggtttaggggatgctagactgcctgtgtttctgcccttccagggagggagaactaggtaactaagttgaagctgaaatgttaaaggaggcttgatggttttgtgttggtggaaattgggagatacgtttccctaaaagaatatagtgggtgatagttgagaaacagtaaacagaggctttctttttcttaactcttataaaaccctgagccaactatccttacaatgagttgtcatttgaagttttctacatactcaagaaatatgtttccttatcttattttaatggagcgtatcttctgcaaacctttttacagttagagtgattcttaaaatttaggcacatacaggacaattagacataaaaagacttgacttacagattttaaagcagggatccttgcatggtagactttcaaaatgatagtatcttttacttgaaccatcttttgcaaagtaacataaatatctcagagacactgccagagcgaactcacttttagaaaaagcaggatatgtaaacttttagtgataaattttgaaattcttgaggggaaatgatatgtgatttaagttccttcaaaataatttatctttattttatttttattttaaataatgaattatgttttaagatctgattcattctgaactataactgactctagagggtgcttaatgagcactgaagacttcctaaagatttatattgaagatgatttttattaaaatgaagtttatttggggttttaatccagtatttgaaaataaaccatattttgccctcccaagagagcctagagcaaaaatacttagttgtcagtattttttcgtttttttgagatggagtcttgctctgttgcccagactggagtacagtggcacgatctcagctcactgcaacctccacctcctgggttcaagtgattctcctgcctcagccttccgaacaggtgggacaacaggtgcatgcgccaccacgcctggctaatttttgtatttttagtagagatagggtttcactatgttggccaggctggtctcgaactcctgacctcaagtgatccacccaccttagcttcccaaagtgctgggattacaggcatgagccaccgtacctggcctagctgtcattctttttaaagtaggtaaataatttaccattgttcttagaaactctttgaaaattccattgaatttgtgggatttctataaactacctttgaatcatgcttttgaaagcttgtttaatatttcaaaagaaaagaacctacttcatgcatataaaatataaatcttagtactggattagtgtatcattttataaatttagttgtttgcacagatatttattttatctttagaaagaagctattcaaaaagcacattctaaagttagattttacagaacatttaggttttagagtaatgtatgcttcttatatttttagcaggtagagtacttttaaaactatggtgtgtttttttgtttgcttggttggttggttttttttttttttttttgagacagggtcttgctctgttgccgaggctagagtgcagtggtacaatcacggcttactgtagcatcagcctcccgggcttaagtgatcctcccacctcagcctcccaagtagctgcagctacacatgtgtactaccacacctgactaatttttatattttgagtagagacgggtttttgccttgttgcccaggttggtctcaaactcctgggcccaattgatttgtacaccttggcctcccaaagtgctaggattacaggcatgagccaccacacccggcctacagtgtgatgtattaatttgaagaaaattttcagacttttcagatgggaaagcttttagaaaattgctgtcttaacccaaacttcaaagatggtgatgataaagatatacattgtaaagcaaaaataaaatttgaagggccccccagccccctgcagccatctgaatggactccctcatcagcaagggcactgtaaaatttaacctgaaagactgactcaggccatgaagtaggggttggacatgcctcattatacccctccagcattaacatcaacacagaccttaagtctgataagaaacatttacaatctattttctctgaagcctgctacttggaggctttgtctgtataataaaaccttggtctcagcctggcgcagtggctcatgcctctaatcccaggactttgggaggcggaggcgggcagatcacgaggtcaggagatcaagaccatcctggccaacatggtgaaaccccgtctctactaaaaatacaaaaattagctgggcatggtggcatgtgcctgtagtcccagctactcaggaggctgaggcaggagaattgcttgaaccagggaggcggaggttgtagtgagctgagatgttgccactgcactccagcctggcgacagagtgagactctgtctcaaaaaatgaagaaacaaccaaaaagcttggtctccacaaccccttatcttaacccagagatttttttttctactgataataactctttcaaccaattgccaatcagaatatgtttaaatctacctatgacctagaagcccctcccctgcactgagttttcctgcccttccagatctaaccaatgtaaatcttacgtgtattgattggtgtatatatcttccctaagatgtataaaagcaagctgtaccccaactatcttggggtacagcttctgaggctgtgtcatgggtgcgtccttaacgttggcaaaattaactttctaaactgactgagacctctctcagattttgagttcacaacgtttacaaaaggtctgtgttatagtgagaaaactttgctaaacaaaatgagttatccttcattggagtattagtcattgcagagaatgaatgttaatgtaaacttttacatgatgtcagcctatgaaaaagtgatgtgtttccatactacccgtttgtttaacatttcttcagaaatatcacactgttttcattactgcaggcagagaatcatattagaaaaattcagtaatttgatgtgaaacctatgttttactcattgaaggcactgttatccaacagaactttttatgataatggaaatattctgtatctacactgtacaatttggtagtcaccagcttttttaaatttttttgttatactttaagttctagggtacatgtgcacaacgtgcaggtttgttgcatatgtatacatgtgccacgttggtgtgctacacccatgaactcgttatttacattaggtatatctcctaatgctatccctccccctccccccaccctacaacaggccccagtgtgtgatgttccccttcctgtgtccaagtgtt

SEQ ID NO: 72 - DNA, 25348 bp, Homo sapiens
  source 1..25348: mol_type = other DNA
gagcgcctgccgtttctcggggcgggacgggggggcggggactgggcggagaggcgcgtgctgctgcgtgcgtgcgcgcgcgccgcgggcgggccagtgaaaccggcggccctggcacgtgacctaggaccggctcaccgggtcgcttggtggctccgtctgtctgtccgtccgcccgcgggtgccatcatggcggacgcggccagtcaggtgctcctgggctccggtctcaccatcctgtcccagccgctcatgtacgtgaaagtgctcatccaggtatgaggcgtcgccgctccctaccccgcccggcgccccgttcggtcgctgctgctcagggcgcctgaggatcggctcagccttgcgggcctttcattctcccgagatgctgctgctcctccgctgccctttacctccccgcagggacagcttcctcagtcccgcggccccgcttgggggcctcgccgagccctcgcctcgccgcccagcgttgaggccctctcctcccttagccaaccgccacccggccctgccctgcccggcggatcctctgaactttggttcttcgtcactgaggtggatcctggccggtcgccaccaaaggcttccgaaccctccctctcgcccctccgaaattcacattcaccactactccccccaaaatctcagacgcaaaacacgaaatactcagttgaagacaaatgtgaagttaggtgggaaccaacattttattttttattccttttttttttctttttatgctactgttactactgcttttctgttccgaggttttcgcaccagatactgagagaaacacaaggagctcattcagaagtgttaatgaaggggttgctctgtcagatttcggaaggatgcattgagcgctttccagcagcggcccatgtggctcctgacaatgaaaatcacatttgtcagagctggaaattagtgaagctgagttttagcgagtttaaacatgggagttagtttctaatctactgtcaaataattattacatggtattttatattcacatgcaggtaggccaagtaagtgatagacttagtgtttccagttcctttgctatatccctgtaatgggcaggtcattcttttttttatgcttttactgagagttgacataattacctcatgcactgtgcctaggaatggaacagtttttagaacccctgtctcgccgtctacttttctgtaaaaaataggcaagacactagagagggccccatttcttattcttgagttgttgggaatccaaattatttcttgctgagtagacctgtgtgaattcagattccatatgttaaaggctattgcaaataaattctttgtacttagaacaaagactgattagaatgtactgtaacatccaaaacagaattggcacatttggggctagatagcatcggaggtgacagcatgttgcagtatatagtaagaacccttggggccgggcgcgttcgctcacgccttcccagcactttgggaggccgaggtgagcggatcacgaggtcgatgtttgagaccagtctgaccaacatggtgaaaccccgtctctactaaaaatacaaaatatagccaggtgtggtggtgcgtgcacgtaatcccagctagtcgggaggctgaggcaggagaatcgcttgaacccgggaggtgaaggttgcagtgagccgagatcgcgccattgtactccagcctgggcaacagagcaaaactcagcctcaaaaaaacaaaacaaaacaaaaaagaacccactactcaatacttctctgggagacggggttttctaatgatgttcagagctcttgccccaaaaactttgaatattcttaattctgatttcacaacatctatgtgttgccaagtagcccaggagttttggtgaaattcccaaatgctcagttgtaaaaatagttacttgggccgggcacggtggctcacgcctgtaaatcccaacactttgggagcctgaaacaggcggttcacctgaggtcaggagttaaagactagcctggccaacatggcaaaaccccctctctactaaaaatacaaaaattagctgggtgtggtggtgggtgcctgtaatcccagctactcaggaggctgaggtacgagaatggcttaaacctgggagatggaggttgcagtgacctagatcgtgccactgcactccagcctgggcgacaagagcgaaactctgtctccaaaaaataaataactaactaaataaaaataaaaatggttacttggtagcactttcagggagctcagacaggagttatttgtttatttatttgttgttgtttttgagatggagttttgctcttgtcacccagactggcatgcaatggcacaatctcggctcactgcaacctccgcctcccaggttcaagcgactgtcctgccttagcctcttgagtagctgggattacaggtgtccgccaccacacctggctaatttttgtgtttttagtagagacagggtttcaccatgttggccaggctggtcttgaactcctgacctcaggtgatccgcccaccttggcctcccaaagtgctgggattacatgcatgagccaccacgccagcccaggagttacttaataggacagattaagagtcacaacaataatcaaaactatgtcctacagcattcattctgtcaagtatctgtagtgttaaaaatcctgggtatattgtacaaagaccatggtaatcattaactatataaaatggacttcattagctgttaatgacagcctgtgtttttttgtttgttcgtttgtttgtttgtttttgagatggagtctcgctgttgtcggcctcggctggagtgcagtgacacaatctcggctcactgcaacctctgcctcccgggttcaagtgattctcctgcctcagcctcccaagtagctgagattacaggcgcccgcccctacgcccggctaattttttagttctagtagagacagggtttcaccatgttggccagactggtctcgaactcctgacctcaggtgatccatccccctcggtctcccaaagtactgggattacaaggcatgagccactgcgcccgaccgacagcctgttcttctaacatgaagttagcttgtaattctttcctaagtgaattatccagctatatctgcatttgccttttgagtgttttgtctgggttgccaaatatgcagctgatgctggcgtaatggatgtcttctagttttgttcaaatacaaaatgtgccttagattttatttagaaggtatttttgagcccccttagtaaactgtagctttcctaacgcaaaagttcccttctttcagtttgatattagcctatttcagctacatggtttacgtcatagaatttgaaccaaaatgaaacttggagtttattgaactcagtattaccaacagaagaaaaacctacaagaatgatgcttcatcattgccttggaaaacctatgctgcatttttacttgtgtttaaaaataacccaaattgtgttctttattcaagaccttgcaagcaagacatttctggaaatattgctttaatattgatatattccattgtttttaaaggtgggatatgagcctcttcctccaacaataggacgaaatatttttgggcggcaagtgtgtcagcttcctggtctctttagttatggtaagtgcctttgatttatttgggtttgcatgacgttgaggactgtgataggcaggagttgttattgaaagaaaatatatagaaagcttgtttctttgaaattgtagtatatccatttctcttgaccagaacttgacaacatctctgacttgtgttcttagctcagcacattgccagtatcgatgggaggcgcgggttgttcacaggcttaactccaagactgtgttcgggagtccttggaactgtggtccatggtaaagttttacaggtaagaggaaaattaaatcaatcttcccatagatgttgcttacctgttatgcatagtttgttctaaatatcaagagcaatttaaaagatacatttataaccctgtcctttcttcctcttgaaaaacactttctttttttttttttttttttttgagatggagtctcactctgtcgcccaggctggagtgtagtggcgcgatctgggctcactgcaaactccgcctgccgggttcacgtcattctcctgcctcagcctgagtagctaggactacaggctcccgccactgcgcccggctaattttttgtatttttagtagagacagggtttcaccgtgttctcaatatcctgacctcgtgatccgcccgcctcggcctcccaaagtgctgggattacaagcatgagccaccgcgcccggcgggactcagtgaaattgttgctgttacttccatgaaatttacatatggaaaggcagttgtcatctagccaaagaggtttgtgtatagacttagagaaaaagagaaagtgctgcttgagactaagttactttatgtaactgtaaagtaagacaaacttgaggtaaccaggtaccctgaatatgttccaaatgtagtccagtgaaatattacagggttggtactacacttagcatccaaagctgcttgtacagtcaagaagaaggatctatgcagggctgagaaaattattaacctttacaagaaataattttgtaaactgaacaagaattaaaatgaaattcaggaaatgtagaagacaggttagataattatatcgatggagtaaataacaaagtatagaaacaagtgaaaatttagagacctgaagctattagaattaattctagccaaggacctggaatttggccaaaatacattactttgctttatcttcacatttgttctcttgcccgtgatttttttaaacacaattctttttacaagagaaaatgttgtctatttttgaaatctgatatggctagaaaataataaaactgacattaaaaaataagaaaacaataaaactggtggttacacaagaaggagctctcaattgataattttattttcacctagctcacattctatttccaaaatacgccacaaaaaattcctcttgcaagaatttttctctgggctctggcagtattcatgatctcttctctagaagagaaaaaaaaaacctcttgcttgttttagaaaccatcagatacaaaggagaaagtgaggcgatttcagctcttcagtcttaatatcaattctctgtccttttatgcagggaagaaaagagtcttgccctaatttggtattggtcatgcgttttccatgagaaaagtgggaaccctgggctatgtttttactgacttattttctgttaaaactgaaagttcttggccaggcgcagtggctcatgcctgtaatcccagcactttgggaggctgaggcgggtggatcagccgaggtcagcagtttgagaccagcctggccaacatggtgaaacactgtctctactaaaaatacagatgttagccaggcgtggtggtgggcgcatgtaatcccagctactcaggaggctgaggcaggagaatcgcttgaatctgggaggtagaggttgtagtgagctgagattgaaccattgcactccagcagtgagccgagattgcaccattgcactccagctgggtgacaagagtgaaactccatctaaaaaaaaaaaaaaacagagttcttgaattttcttttttgttgttgttcttattttgtaattatttctttaaatttattattatttttttagagacaaagtctcactatgttgcccagtctggtcttgaattcctgggctcaagcagtcctccctcttcggccttccaaagtgttgggattacaggcgtgagtcactgcgcatgttcccttttcgttttttgggtttttttgttgtttttttttgagacagagtttcactcttgttgcccaggctggagtgcaatggcatggtctcggctcactgcagcttccacctaccgggttcaagcaattctcctgccccagcttcccacgtagctgggattacaggcacctaccaccacgcccagctaatttttgtatttttagtagagagggggtttcgccatgtcagccaggctgttctcaaactcctgacgtcaggtgatccgcctgcctcagccacgcaaagtgctgggattacaggcgtgaggcaccatgcccggccccttttctttttttctgagatggagtcttgctctgttgcccaggctggagtgcagtgatgtgatctcagctcactgcagtctttaccccccgggttcaagcaattctcctgtctcagcttcccaagtagctgggattacaggcgcccgccaccaagcccagctaatttttgtacttttagtagagatggagtttcaccacgtaggccaggctggtctcaaattcctaacctcaggtgatccacctgccttggcctcccaaagtgctgagattataggcgtgagctaccgcacccagccttcccttttctttttttttttcttgagacggactcttgctctgtcacctgggctgcagtgcagtggcgtgatcttggctcactgcaacctctgcctcctgggttcaagtgattctcctgccccagcctccctaagagctgggattaaaagcgtgcgccccaatgctccgctaatttttgtatttttagtagagatggggtttcaccatgttggccaggctagacttgaactcctgacctcaggtgatctgcccacctcggcctcctaaagtgctgggattacaggcatgagcaaccacacctgtccccttttcttttttcaaagaagagttttcatgaccatttgcttttcttccaactgaccaatatgttaaacttagcaacaagtttatcttggagatccatatttccagttgattaatgagtagaagttaactgaagatttgcagcttaaaaaaaaaaacaaaaactttaaaaaaaacttcagctaatttactttctgtcagtagagttttcattttatgtcttctttcacatgacactgtaataaccctaatcatcctttttctttttttctatagcattaccaggagagtgacaagggtgaggtatgttggagctgatttctaagcatgagggcctttcccttgcaagttgttactgcttttggggcctcttttggagaaaagccaagtagtcagtctcctattcatctcagtgagtgttgtcctatggggtggccaccagtttggacagttctgtttgaaaccatcaggatggctgggcatggtggctcatgcctgtaatcctagcagtttcggaggccaaggtgggaggatcacttgcatctaagagtttgagaccagcctgggcaacatagaccccttctctacagaaaatcaaagattagcggggcctggtggcacatacctctgtatctcagctacatgggaggttgaggtgagaggatcacttgagtccaggacgtcaagactgcagtgatccatgatcacatcactgcactccgcgtgagtgacagagcgagaccctatctcaaaagaaataaaaaccgtcaagatcggccgcccatggtggctcatgcctgtaatcccagcactttgggaggccgaggcaggtggagatcacgaggtcaggaaatcgagaccatcctggctaacacggtgaaaccccgtctctactaaaaatacaaaaattagcagggcgtggtggcgagcacctgtaatcctagctacttgggaggctgaggcaggagaagcacttgtacccaggcggtggagcttgcagtgagccgagattgtgccactgcactccagcctgggcgacagagcgagactctgtctcaaaaaaaaaaaaaaaaaaaaatcaagatctctattttctttgattttgatttccaggagttaggacctggaaatgtacagaaagaagtctcatcttcctttgaccacgttatcaaggaggtaagagatgaattacatcctgtgctgtttgcccagatcaaactgtggtgttgcaactatggaatcagaatcatcaggcctgtgtgttcagtgtctgttcccaaatgaaattaaaccttcaaattaatttgggctttactacatgtataacattaaaaagagagaggatcagtgcttgctgttcagaatagatgcatttcaagaaaactcattttgcccacacattccgtctttagaatactgaaagtcttctaatagtgttgaaaacctcaggaataaaagtgttaaaataggccaggtgtggtggctcacgcctgtaatcccagcactttgggaggccaaggcaggaagatcacttgaccccaggagttagagaccagcctatgcaacatagtgagacttcctctctacaaaaaaaatagaaaaattagctaggtgtgtggtggcacatatctgtagtcccaggtactcgagaggctgcggtgagaagatgacttaagcccaggaagttgaggctgcagtgagctatgattgtgccaccatactccagcctgtgtgatagagcaagaccttgtctttagaaaaaagtattaaaatagcgaccaggccctttgtatgttggatagtatctatgcagaaaggctcttttgacatttttctgactctgaaaagttcctcatcacccatttcccacccccatatgctgccataggtgtttctgtgcctggctttcagaactattctcttattacttaagtcttcacattgtcttaattgtcattaatgaagtcacaattatccaggaaatgcagccatccaaaatacatattccaaaggctgggcgcagtggctcatgcctgtaatcccagcactttgagaggccgaggcgggcggatcacctgaggttgggagttggagaccagcctgaccaacatggagaaaccccgtctctactaaaaatacaaaaattagccaggcatggtggcgcatgtctgtaatcccagctacttggggggctgaggcaggagaatggcttgaacccgggaggcagaggttgtaatgagccaagattgcaccattgcactctagcctgggccacaggagtgagactccatctcaagaaaaaaaaaaaaaaaaaaaaaaaatatatatatatatatatatattccaaaacaaacattactaaaggtctggaaaccagataaattagctctattttctgtaaattttcatgaaattagtttgcttaaaagcagggatacggccgggcgtggtggcttacacctgtaatcccaacaccttgggaggccgaggcgggcagatcacgaagtcaggagattgagaccaccctggctaacacggtgaaaccccgtctctacgaaaaatacaaaaaaattagctgggcatggtggcaggcgcctgtagtcccagctactcgggaggctgaggcaagagcatggcgtgaacctgggaggtggagcttgcagtgagccaagactgcgccactgcactccagcctgggagacagcgagactccctctcaaaaaaaaaaaaaaagcagggatacatgtattactatgcaattagtattttccttagtttgcccatccagtcccataggatcttatgcccttggagaaggggtgagggctgtcttaaaactcagtgactaggccgggtgtggtggctcacacctataatcccagcactttgggaggctgaggcgggcagatcacgaggtcaggcattcaaaaccagcttggccaacatggcgaaatcccatctctactaaaaatacaaaaaaaattaactgggcatggtggtgtgtgcctgtaatcccagctactcaggaggctgaggcgggagaatcacttgaacctgggaggtggaggttgcagcaagctgagatcgcaccactgcactccagcccgggcaacagagcaagactctgtctcaaaaaaaaagaaaagaaaaaactcagtgaccataaagatactgtttaaatgcaaaagccggccaggcacggtggctcatgcctgtaatcccagcagtttgggaggccgaggcgggcggatcatgaggtcaggagatcgagaccatcctggctaacacggtgaaaccgtctctactaaaaaatacaaagaaaaaaaattagccgggcatgatggcgggtgcctgtagtcccagctacttgggaggctgaggcaggagaatggcgtgaacccgggaggcggagcttgcagtgaaccgagttcgcgccactgcactccagcgtgggtgacagagcaagactgtcctaaaaaaaaaaaaaaaatgcaaaagccaatggtagacctgcttacatttgcaatcccagaacctaaatgcaaagattataatttaattttctttattacttccttacagagccctagagtagaaagataaactaggaaaaacacagcagctctaagatactgcacagttactgggttgtagtcacaaaacaaaattgttctcttctcccaaaaatgtgagtagagactaaatggagcctgtcatttatctagaatgatgtcagactctccaaaatcacttaccaataagagagcaacttaataatctcaataaaggcctcatattttttatttcagcttaatgactttgttggtgacctttcctgtttctttatttttttctcttacctgtaaaattgagaaaacaacagaagcctgctttgcagagaaattttgagaagtaactataatagaacattgagatccatgagtgaaaagtatgataaaatgacaatgaatgagatctttcacatcccattcaaactcttcttgactccagccagggcaggagggctgtgtcattcactttcttatcctataccacgatatccacccacattccttctcacaggcatttgagtgtcatttgtttagatttcagaagtgtgtgttgattgtttctagacaactcgagagatgatcgctcgttctgctgctaccctcatcacacatcccttccatggtatgtttgcagttgacaactgacctttcttttataacctgatctctcctgaccacttagataggttgacgtgggagttgactaaaatgccttgcctgcatgtttttgtttgcttgcttgttttggcttttatccaatttatccagatagcaaaatgtctttaggtggaaaatctttttttttcccagggctatcaaaatctatcttaacatagtttttttttgtttgtttgttttttgtttttgagacggagtttcactcttgttgcccaggctggagtgcaatggcacaatcttggctcactgcaacctcagccttccgggttcaagcagtactcctgtctcagcctcctaaggagctgggattacaggtgcatgccaccacgcctggataatttttgtatttttagtagagatggggcttcatcatattggtcaggctagtcttgaactcctgacctcaggtgatccgcccacctcggcctctcaaagtgctgggattacaggtgtgagccaccgcacctggccttaacatagttgtaaacatcttttctctatattccacagtgatcactctgagatctatggtacagttcattggcagagaatccaagtactggtaagtatttttgttttcacatactcaaggagatcttttgaagccaaagtactagaataatactactttgtatttttatgatacccttacaatttgtagaacaaattcgtatctgatgtcatttgatctgcacaaaaaacaataaaatgggagaaaatatacccaggcaggtttagtagcctacgtaggatttcagagtaagttgcagagcccctgactccatatgactatacccctaggtagttaatattttcacttctatctccaaatttagctatctttgcagagtgagagagtgctagaaaagtgtgagggaaggaggtcgtggatttgaccttgtccaatgtgataattgaaattattttgtttatagctccaaaagaatcttaatatattttaccttttcttcttgtgtacgtagtggactttgtgattccataataaccatctatcgggaagagggcattctaggatttttcgcgtgagtaaatgttgattagtgtgtaatttttgcatgagtgggaaacgttttctgaaagtaagaatagtgagtctttgtttaatccttggggaaaacgtactccctgggcttacctcacgttacattctatttaggccccttatttttttttcttttttctctgcagaaaggcatatttaggccccatatgactagaattatcttgtaaagatcccaaacctttacttctagatacttaaaacatttgaggccgggcgtggtggctcacgcctgtaatcccagcactttgagaggccaaggcggttggatcacctgaggtcaggagttcaagaccagcctggccaacatggtaaaaccccacctctaggtgtggtggtgtgtgcctgtaatcccagctactcgggaggctgaggcaggagaattgcatgaacccgggaggtggaagttgcagtgagctgagattgcaccactgtactccagcccgggtgacagagtgagactccgtctcaaaaaaataataataattaataaataaataaggaatttctttttttaacaaaggacttaattccaagtttctacccttgtagtaaactcccaattctatatagataataaaatgagaaaaattaaatgttgaaaaatggggaaatcatcttaacttgtattttccttaccgtaaaagagtaagtttttgcaaggcttgaatttactttggaagaacttagactactaccctcattcttctatgaggaaaaattttgcatcattaccgaaatggtgttttttgtttttttttttttaattttcagagtatctccccatacggattttgaatatcataaataccctgtgagataggcaggacagctataattagtatcactttagagattaaaaaacattgatgctctgagagtttcatctgctgcctgtcacatcgctgctgagtgctggagctggcatttgaagctggtcttcaatccgtggggaaatgctcttcccactattccatgctgcctcacctaggtcacccagaccctagaaatgtggtttttgatgcctctcatctgtatctgtacttgggaccattcttgctttgtaatttttctcgtcttttgctctgccaaatatgaatatcagatagcttagcaaaatcatttttttaagctagtcaaagcaaaacaatatttaagtctcttctgcaaagcacctcgcaaatcttttgcctccctgcttacagttatgaatagtaaggtgagccactgagggtatagccgacctgcattttaaacataggaacaaaagtcactggagatcagcttcaagtacagctgtgttaacgagaatgaactaggtatgcgggctggattctggtgtttgattccttttttacttccctagaatgttttgtgacctctaattatttgacaaacatttgtactgaagagcctgtcatgttactgatcacattttttggttcttatttttattgtttcttcatgtaggggtcttgttcctcgccttctaggtgacatcctttctttgtggctgtgtaactcactggcctacctcgtcaatacctatgcactggacagtggggtaggttgtgaccttcgtgagatgtgctcaccttggctttaatctggcagctagattagcttttaaagtaagatgggccgggcgaggtggctcacacctgtaatcccagcactttgggaggccaatgtgggcggatcacctgagatcaagagttcgagaccagcctggccaacatggtgaaacctcgtctctactaaaaatacagaaaaaattagctgggcgtggtggtgcgtgcctatagtcccagctacttgggaggctgaggcaggggaattgcttgaacccaggaggcggaggttgcagtgagccaagatcgcgccactgcattccagcctgggtgacagaaggagactccatttcaaaaaataaataataaataaataaacaagatgacagtttgctacatgccagactgaacaattatatagctaaaaattatcagtcaaattttcaaatgctaatgaaatgagcatactgttcactgtagaacgatactgtttactgtagaacgatacacgttaaaagtccgtaagatgtgacagagtatacccaagagacttagccctgtgttacttcagggctttaaagagatcacttctttactgatacttaacttgagagaacctgggaaagcaggacatctttatggtgtatcgggggcttttcatctaatctggacttaagagggtgcctgtattgggctttctagaaacctcagccttttgagaatcagtcttatctagaagttgtctttcttatctcagcagttgtggggcctcttgtatgtcggcagctccatagcatgatgataaattgaacacatcacagggtatatgactaaatccatgttgtaaacctcttgagtacagagagggattttcttcaacgcatctggtagaaagctagctgtgtaaaacaaaggtagtgaattgtcccttagatatactataaatgtggttttccagggactgtatttctaggatgtgtgaaaaggttatcaatctcattttctttagtatttgaaatccttttacattcgtccctaaagcattttagtataatatgaatttgtctgttaatattgaatcaggttgatcattttgaccactgccttattattctaataatcagtgttttatggttttgtcctcaaaattagttttagacaggtgtggtggctcatgctgtaatcccaacactttgggaggctgaagtgggagggtcacttgagcccaggaggtcaaggttgtgagatcacagctcactgcacctccagcctgggcaacaagagagatgagatcctgtctcaaaaaaaaaaaaaaaattaattttcaagctgtcaaactgataatttagagatagactatattgacatggagagcaaggcacagtagctccagcctatgattccagcgactcaggaggcttaggtgggaggtttgcctgaagccaggagtttgaaaccagcctaggcaacatagcaagacaccgtctcttagctgggcatagtggcttatgcctataatctcagcactttgagaggtcaaggtgggaggatctcttgagcccaggagtttgagaccagcctgggcaaacatagggagacccttatctcaaaaaaaaaaagacaccatttcttaaaaaatattttgaaattagctgggcgtggtgatgtgtgcttcaggaggtcactgcacttcagcctgggtgacagagtgaggcactgtctgaaagaaaaaaagaaaagaaaagaaaaggaaaaaagaatatattgatgtgttgtagtgttgtaggtaattaatttaaggctcttttcctattttaggtttctaccatgaatgaaatgaagagttattctcaagctgtcacaggagtgagttttttaaaatccttttaaccttctaggaatagttgtgttttgttttgttttccttttaaatctggcttgtgtcatcactgctttaagataaccagatgtctcactgggacatctccctgaaatttgttatatttgtcaaaggtaagaataactcagttttcggccaggcgccatggctcatgcctgtaatcctagcactttgggaaggtgaggtgggcggatcacctgaggtcaggagttcgagaccagcctggccaacatgatgaatccccgtctctactaaaaatactaacattagccgagcgtggtggtgcatgcctgtaatcccagctactcgggaggctgaggcaggagaatcactggaacctgggagatggaggctgcagtgagctgagatcacgccactgcacttcggcctgggcgacagagtgagactccatctcaaaaaaaaagagagaataactcagttttcgaaggaaccacagactcacatgtgaaaataaagagagtaaggcagaacccctgcctcacatcctgcatggtttggtactgcttagctttcataaggggcgtgcctttcctccgaaataatattgttcaggccagacatggtggctcacacctgtaaacccagcacttcgggaggccaaggaaggaggatcacttgaggccaagagttcaagaccagcctgggcaactgagcaagaccccatttctacaaaagtgaaaaaaaaaaaaaaaagctggggcaggcgcggtggctcactcctgtaatcccagcactttgggaggctgaggtcgggagttcgacaccaccttggccaatttggagaaatctcatctctactaaaactacaaaattagctgggcatggtggtgcatgcccgtaatcccagctacttgggaggctgaggcaggagaatcgcttgaaccccaggaggcggaggttgcaggagaatcgcttgaacccaggaggcggaggttgcagtgagccaatatcacaccattacactccagcgtgggcaacaagagggaaactccatctcaaaaaaaaaaaaagtagttgggtatggtggcgtgcgcctatagtcccagctactcaggatcagagaattcttctggccttttgttaaaatgttggatgcagtggtgtgctaagaggaagaagcatctccaggctcaaaactgtaactgttgtctttccagggtaccgatgaagcgagacaagtgttagagtgtctcaccgcagtggcactaggcctttaaggtaaaggaaaggagaataaagactaggaatgatctaataacagctgccttgtttccattttacagttttttgcgagtatgttgacctatccctttgtgcttgtctccaatcttatggctgtcaacaactgtgggtaagcactttgtatttcttattctagtaggtggttgactgtatgctgacaggcggagcagccttgtagaaatttaggaaagatgaatgatcagtatcaatctctgattggtatttttttaaaaagggggggaggaaaagtataattgataccattagaagattcctaatttttttctttgtatgccctatgcagcagcagcctcaatttgtatttatttattaattattattattattttttttttttttgagatggagtcttgctatgttgcccaggctggagtgcagtagcatgatctcggctcactgcgacctccacctcctggattcaagtgattgtcccgcctcagcctcctgagtagctgggattacaggcattcgccaccatgcccagctaatatttttgtatttttggtagagacagggtttcaccatgttggccaggctggtctcgaactcctgacctcaagtgatccacccgcctcagtctcccaaagtgctgggattacaggcatgaaccaccatgccaggccaattactattattatttatagtttttgtttttgtttttgtttttgttttttgagacagaatctcactctgtcacccaggctggagtgcagtggtgcagtctcgctccattgcaacagacacctcctggattcaagcagttctcatgcctcagcttcccaagaagttgtgattacaggcatgtgccaccatgctgggctaatttttgcatttttagtagagatggggtcttgctatgttggccagactggtcctgaactcctgacctccggtgatctgcctacctcggacttccaaagcgctggaattaaaggcgtgagccactgcacctggcctatttttatttatttttaatttttttagagatagggctgcaatgtggtggtgaagtcctagctcactgcagccttgaactcctgagctcaagggatcctcccatctcagcttcccaagtagttgggagtacatgtgcatgccaccatgcctggctaattattttttgtgaagacacagggtctcactttgttgcccaggctgttcttaaatttctaggctcaagtgattctccttcctcagcctcttaaagtgctgggattacaggggtgagccaccatgcccagccaacatattgttattttaaatctttatcttttctatgaaagtgacaaaaggtatatcagggattaaatgacaatccatacctgtttttcctaggggctttatggagaaagtgagttttaaagaaccagaattaggatatttagtctatggaaagtttgatgaccttttctctgtattggttagaagggcaggttttggtatagtggtagactccattgatttccaaattctagatgccaagtgactctactgagttgggcaaaattttgcctttttttttttttttttgagatggagtctcactctgttgcccaggctatagtgcagtggtgcaatctcgactcactgcaacctccacctcccaggttcaagcaattctcctgcctcagcctcctgagtagctgggattacaggtgcccaccagcatgcctggctaattttttgtatttttttgttgttgttattgttgagacagagtcttgctctgttgctcaggctggattgtggtggcgcgatcttggttcactgcatcctccacctcctgggttcaagtacttctcctgcctcagcctccagagtagctgggattataggcacttgccaccacccccggctaatttctgtatttctagtagagacagtgtttcaccatgttggccaggctggtctcgaactcctgacctcaagtggtccaccctcctcgacctcctaaagtgctgggattacaggcgtgagccactgcacccagccttgccttttttgtttaattcaaaattcttttcccatatggtacctgacatatcattaaacatgttactgttttcaaataagatcagatagctatgtggagttttgaacattttacattgtttgttttctggttttgtttgtttcatgttactcctggcaagctgtgatgttttctgatacgtagagcaactgccattttttagcacagtgtaaacttgaaggatgaattaaatgtattattattatttacagttttttcaagatgaagtgattatacctaagtaggaacatatatatctactgtttatatccgttttcatgtttagtatctttgtgaacaccagttagtttttaaatctcctttccctgctctttttttttttttttttttttaaaaaaagactggttcttactctgtcacccaggctggagtgcagtagtgcaatcttggctcactgcaacttccgcctcctgggttgaagcaattcacatgccttagcctcccaagtagccgggattacaggcatgcgccaccatgccagctcatgtttttgtattttcagtagagatggggtttcaccatgttggccaggctggtcttgaactcctgacctcaaatgatccacctgccttggcctcccaaagtgctggaattacaggtgtgagccaccgtgcccggccacctttccctgctctttaatcatgtaaatgctgtgttctggagtttcatttgtccacaaaggaaaagtctaaatgttttagaaattaaggttgaagtttatgtttatttatttatttgaaacctaaatataggggaggaattctcttttggatgcttgatcgttcccctgcttcaatatgatttgtttcattgaactaaaatgatctctcagggaatcttctgtgcagcagaatattttgacaaggtttatcaacgtctcaagagaatggttaatattaacatgaatagctccatgtttttttctattttagtcttgctggtggatgccctccttactccccaatatatacgtcttggatagactgttggtgcatgctacaaaaagaggtatttctttttctctgtctctctcattttattttgttttatttttatttatttgttttcttaaatattgtctctggaatcccaagttaactcttgtagctcactttagctagagttagtctagtctgccagttaatgtacactttacagtgttctgtgttttcactttggcataatagtaaaatgtgatgtttagaaatcatgagcaggagtaatgaagaagaaagaatccctagatgagacctagaagccatttgagtgcccacattcaacttacaaatacgatccaggtagattattatcctggtaaaatgatggccttgattttagactctttttttcccccaaactcacctttcataaccacttatttgtcacagtggtattgacagagctggtcttatacttctagagtcttgttagtggatgattttgcctagataccaatttagggtttgttattactatgaggtgtataatctgcaacaaaaaattatttattatctaggcaaagctttattggaaaataaaataatgggctgggtgcagtggctcacgcttataattctagcacttcgagaggtctaggtgggcaaattgcttgagcctaggagtttgagaccagttgaggcaacatgatgagacctcattgctacagaaaatacaaaaacttagccaggcatagcacctatagtcccagctacccaggaggctaaggtgggaggatcacctgagcccaggaggtcaaggctgcagtgagccaagattgcatcaccgcacttcagcctgggtgacagagtgagaccctgtatccaaaaaaggaaaataaaataacggctaggtatggtggctcatgcctatagttccagttactcaggaggctgagccaggaggatcacatgagtccaggagtttgaggccagcctgggcaacacagccagacgtgtctcttaacaaaaaactacaggccaggtgcagtggctcacaggtgtaatcccagcactttgggaggccaaggcgggcagatcacttgaggtcaggagtttgagaccagcctgggcaacgcagtgaaaccccatctctactaaaatacaaaagaaattagctgggcgtagcagcgtgtgcctgtagtcccagctactggggaggctgagggaagagaattgctttaacccaggaggtggaggttgcagtgagccaagattgtgccactgcactccagcctgggtgacagagcaagactccatctcaaaaaaaaaaaaaagacaataacaacaacaaatggattggctgtgggctaaatttagcacaggatcacttaaaatgattatcagtttaaagctgtttttgaaggggggtccacttcttaaaagattgtagaagaaagcgtataaagaagctctttgttgcattattttatagcactagtgatatataagagaaaggcctttgaaatctgaatgaaaaggcctaagtgttgtttgtagttgctcttgcttagtgtgcccacaaagcccctctgtgaatccaagcttgaatacttgaatgatttcagtacagacctactatgaacattgtgcatttcattctgagttttactctctattgtacagtgtggtccctgtttaaatggaaaaaatggcctttccttccttccttttctgactaacactctgttataggaagaaagcagacagagaatggattacggtgtcaaacacacttaaagtaggaacagttgttcctgtaggtgcttacaacaacagcaaatcttgattgggcatttactgtataccagatatcatgctaagagcttttcttacatcagctcatgtaatcctcaaaacagctgtgtgagaataggtgtcattcttaatcacccatttcacatatgaagaaactggggcttagagcagtttagtgccaattacataatgcaaggtcacatggcctatatttgggaaggctcagatttatactccagagtgtactcagttgcactcagaacattattactttatttttatttacttatttggttctttattttttagagacaagctctgtcgcccaggctggtgtgcagtggtggcatcacaactcactgtagcctcaaactcctggggtaaagcaatcctcctacctcagcctcccaagtagctaggactacaggcatgcttccaccatgtcctgttaatttttttgttttgttttgtttttgagacagggtctcactctgtcacccaggctggagtgcagtggcatggtattggctcactgcaacctctgcctcctggctgaggtctctggctcaagtgatcgtcccacctcagcatcccaggtagcttggactacaggcacataccgctaagcccagctcatttttttgttttttgttttttgttttttttaattttattattattatacttttaagttttagggtacatgtgcacaacgtgcaggtttgttacatatgtatacatgtgccgtgttggtgtgctgcacccattaactcatcatttagcattaggtatatctcctaatgctatccctcccccctcacccctgttttttgttttttgtttgtttgtttttttgttttgttttgttttgttttgtttgagacggaggcttgctctgtcatccaggctagagtgcaatagcacgatcttggctcactgcaaccttcacctcccaggttcaagcaattcccctgcctcagcctcctgagtagctgggattacaggtgtccgccactacgcccggctaatttttgtatttttagtagagatggggtttcactatgttagtcaggctggtctcgaactcctgacctcaggtgatctgcctgcctcagcctcccaaagtgctgagattacaggcgtgagccaccatgtctgcccaattttttgtattttttgtagcaacggggttttgccatgttgtgcaggctggtctcaaattcctgagctcaagtgatcctcctgccttggtctctcaaagtgctaggattaccggtgtgaaccatcacacccggcctttaattttttaatttcttgtagagatggggtcttactatgttgtccaggttgttattactttgattataagattttataagtagtccttagaaacatgatttcatttcattaagaaataaataggccgggtatggtggatcacacccgtaatccctgcacttttgggaggccaagataggcggatcacttgaggtcaggagtttgagaccagcctggccaatatggtgaaaccccacctccactaaaagtacaaaaattagccaggcacggtggcgcgttcctttcccagctacttaggaggctgaggcaggagaatcgcttgaacctgggaggcagaggttgcagtgagccgagattgcaccactgcactacagcctgggcaacagagcgagactccatctcaaaaaagaaaaacaaagaaataaatgaaagctagcacttactgaatgttaggcactgttctacatgactcatttgctaagccagctggaaagtggcaaagccagaatccaacctgggcgttctgtctgcccagagtaagaacttaataaggagaaattgtagttagttcatagtagctcagcctttcagagaatactaatccttgttctgtagtgatagtcccagttttgtcctagatttagtcacgtctcccaattggacctctctgctgatttggattggctgatctcatctcgctagatattatttgtgttttgttttgttttgttttccaggggaatatgagccgaggaaatagcttatttttccggaaggtcccctttgggaagacttattgttgtgacctgaaaatgttaatttgaagatgtggggcagggacagtgacatttctgtagtcccagatgcacagaattatgggagagaatgttgatttctatacagtgtggcgcgcttttttaataatcatttaatcttgggaaaattcaggtgtttggtgtctgccttttttgttcttttttccagcacaacataacttaccactgatactccccctttagttattctgaattaggatatttttgctccaaattcttattttacttaaccagaagggaaaaaaagttgtattttcctgaagctacaggcactttgtcatgtgatttttgagtctcaatttaaggctttgtaaaatgaagagtagaattccaagaaaaatgagaaataattttgtaaaacttaacaaaatcactaaattaaactatatgggaggttatgaattactttttcttgggtagaccctaaaatgtcagtagcatgcaccagaatctgactcccattatgcttctaagcacatttcattgaccttgtctctcatacttcaagaaaaggacagtacattgctacattaccctagaaagtctgtgtgaggatctgccccttcagtctgttattgcaaagtaataaaatgtcacctacagggagcctctgagcctactctagttcaagaggctacctgaaaaaaaataaataagataaagggtcagcaacaacaaagaaaaagacaattacagaaaataagcaagatttggaaaggaagtataatggcacttttttcctcaaaggaagttcttgttttcacataaaatatgaaaagcagatcctgcaggagtaacccccttctttaagagccaagtatttgccagtgcttaaattacaccatacagttctaattatatataatcttttgttcttcagttttttgttttgtttcctttttgttattgttgccgaaggtgagtagttttgcatttctgatgacagccttggaaagtatatttgtaactccatgtctggtaatgccaacccaagtcgacatgggtcttaggacactgaccacctcacatgccataccctcagttaagcatgttaacatttataggaggaaaaaaatcactttgggagaaaataaaattcaactcaagcataaagcttctgtttactcaggccttctaaaaagcaggttaaaatgctctaaaatgagaaagcctgtggtttcacttatttatataactcactgggacattgccaaatgagtaagcacttaattcgctgcttctgagacttctctgtcaaaacagccccactgataatattagacagaacgagaatgcaggggtctcttccctcccctggggtttaggaagctcatgaggagctcggcttaaaatgtctttgatgtctcttcctttgtctcaaaaagtaatgtcaattttatatactatttcaatattactatctgcatttgttttaatataaaaatgtttgctgcctacctttttctcccaaaaaatctttaagtaaagatgatctgggaaaatgtgccatgttt

SEQ ID NO: 73 - DNA, 6688 bp, Homo sapiens
  source 1..6688: mol_type = other DNA
gaaaagactcggggttccgagggccgcagaccgctagccctacgtcacttccgcttcctttcccgcagggcgggtaattcgaacgttttttgcagcgagtggccttcccggttggcgcgcgcccggggcggcggcgctggaggagctcgagacggagcctaagttatgtctgggaggcgaacgcggtccggaggagccgctcagcgctccggtgagcggagggcgcgcgggagacgtgaggtcgagccgtttgggggacgcagtccggtgaaagatggcctcttccctcccgctgccgccgccggaggaggcgcccttaaaagggcttgtttgggaatcttctcgctgtctctagaacctgttctctggactctaaggtctagagtcctcctctaccacttaacttttttctctttccagggccaagggccccatctcctactaagcctctgcggaggtcccagcggaaatcaggctctgaactcccgagcatcctccctgaaatctggccgaaggtgagccccagatttctcacttcctccccttgtggcccctcacctaatgttgagctcacgttcatccctcttctccagacacccagtgcggctgcagtcagaaagcccatcgtcttaaagaggatcgtggcccatgctgtagaggtaaaggctaaggagagtgttgtgggtggttaggcgggcaaaactggggaccagctatgtgatcaattggtattgtcccccgcaggtcccagctgtccaatcacctcgcaggagccctagggtgagttcactttcatctacttaattaagtagaatctgggtcactctagagctggacagcacacattggctcctcacatctgcccagggagctgttttgcagtactgcaaaaacagtttgcctgtgggcacctgcatgcattgccagtcttgattactccctgaagacttaatacacttaactttttatgccttgtgtatttctaccattttcctggaacttcctttaaaagctgagctatgtcttaactccacgtactgcctttctaatccattatgccttcagctttcatgtatgggtgttctgagataagtcatgtgtatgacatttttacagttttagcagaagttattatcaaaggatgtttcattaatagacaatctgaagacatactgactgagaaatgtgaactcctttgaagagctgatagggcttagagtcaactggggagaaagaccaatgacaagtgatagcaacgttgtgtactgggactgcaataaggaatactagatgctatgatggtagctaacccagaccatgtggctcagggaatgtttcgtggaagaagaaacatttgaactgagtctttaaagacaagtagaggccgggtgcagtggctcacgcttgtgatcctagcattttgggaggctgaggcgggcagatcacttgtggtcaagagtttaagaccagcctggccaacgtggtgaaaccctgtgtctactaaaaatacaaaattagccaggcatggtggcacgtgcctatagtcccagctactcaggaggctgaggcaggagaatcgcttaaacccaggaggcggaggttgcagtgggccgagatcacgcccctgcactccagcctgggtgacaaagcgagactccatctcaaaaaaaaaaaaaaaaaaaaagacaagtaggtttgttccaggtcaaagaagccatgtttgcagagattgggaatttaaagaaaaatcaaggttcggggaatagcaatttgtttagtgtctgcagcagacctcagcaggggaggaagcaccctaaggcagagcagatcctgatgaggcacaaaagccacactcatggcttgggcatcattcttgggtctgtgggcagcctttggagagttctgggtaaggtagtgaccgagtcaagtttgagtgttttaagaaagacccctctgggggctgtggggagaatggttttgagaagggctaccctggggctccaagaccagtggaatgacgtgaagtccaggaattctgaagcatgaagccaagggcgtgagctaaagccaggatgatatacagtactgggttcagagggaattgccccccagtggccttccctgaccacccttaccctattgctgtcacatttctctatgtaattctcttaggccttaccagttctaaagatagggtcttgttctgccacccaggctggagtgcagtggcgagatttcggctcactgcagatcttccctcctcagcctctcaagtagctgggactatagtcacatgccaccatgcctggctaattttttgatgttttctctaattttttttatagagatgagggttcactatgttgcccaggccggtcttgaactcctgggctcaagtgatcctcccaccttggcctcctaaagtgttgggattacaggcatgagccactgtgcctggtccttatcagttcttatagtgtattttcttgcatgtttgatgtctttctctcccccctctaagaacacaggcaccttgagggtagggacttctgcctttcctagtagccactcattcttgttgattgactgagattcatggtacatcgagcaggataaagttgccaggacctgggtgactgcttggctatagagaatgaggaagtcgtagtcagcagtgaccaccaatttgttcagcttccctgtgttttttttttttgagatggagtctcgcactgtcacccaggctggagtgcagtggcgcaatctcggctcactgcaacctccgcctcccaggttcaaccgattctcctgcctcagcctcccaagtagctgggcttacaggcacctgctaccacacctggctaattttttttgtattttcagtagagatggggtttcactatgttggccaggctggtctcaaactcctgacctcaggtgatccacccacctcagcctcccaaagtgctgggattataggtgtgaaccaccatatctggccacccattatctcttgaacttcatcttcagtttcttcctcttgccttcacttcagccacactggcctccttgttgtttgaccctgactagtacactgtggcctcagggttgttgcaccttctgttcccactgcctagaacttggccatgagtcactcccacacctccttcaagttgtagcttgaatgtcacctcagtgagggatgtattgacctttatctttttgcaattctaacctgccccaagcactctctcctgttctgttttcctgtagtgcttgatactgctaacataatactgaattttcttacctgtttttctcttagaatggggcaggggttttctctgttttattccctgctgtgttcccagtgcctggcacaggacaggtgactgataaatacttatggactgagtggacatttaggacaatcctcatcagctgtgtggcagatggaccacagcaggcaagggtggaaacagggagagaaatcagaaggtcgctgggaccagcctgggcaacaaagggagacctcccctactctacaaagaaactaaaaaaaaatcagccagacagagtgtcacatgcctgtagtcccggctactcagaggctgaggtaggaggattgcgtgagccctggaggctgaggcttcagtgagccatgatcgtgccactgcactccagcctgggcaacagagttgagaccgtttatctggaaacaaaacaaaaaacgttgctgagctggtctagaagacacctaatgagggcttgagttggtcagaggagaggctggatgctgggcacattttggaaacaagcgacagcaccagcagatgggggcaagtccatttgtgtcacaaaagcagactccttggaagcaatggtgggttgttttcttctctccatgtctctttcagggtctgatttgtcccttccttaaaaaaagtgtgtgttggccgggcatggtggctcacgcctgtaatcccagcactttgggaggccgaggcgggcggatcacgaggtcaggaaatcgagaccctcctggctaacacggtgaaaccccgtctctactaaaaatacaaaaaattagccgggcgaggtggcgggcgcctgtagtcccagctactcggaaggctgaggcaggagaatggcgtgaacccgggaggcggagcttgcagtgagccgagatcatgccactgcactccagcctgggcgagagagcaagactccgtctcaaaaaaaaaaaaaaaaagtgtgtgtcctgtgggtctttccaccctgaatcttctcgggcttttctggaagtaagcagtccagctaagtattgagggcatcccctcttctgtcctggtgcagatttcctttttcttggagaaagaaaacgagccccctggcagggagcttactaaggaggaccttttcaagacacacagcgtccctgccacccccaccagcactcctgtgccgaaccctgaggccgagtccagctccaaggaaggagagctggacgccagagacttggaaatgtctaagaaagtcaggcgttcctacagccggctggagaccctgggctctgcctctacctccaccccaggccgccggtcctgctttggcttcgaggggctgctgggggcagaagacttgtccggagtctcgccagtggtgtgctccaaactcaccgaggtccccagggtttgtgcaaagccctgggccccagacatgactctccctggaatctccccaccacccgagaaacagaaacgtaagaagaagaaaatgccagagatcttggtgagtgagaggcaggggtttttctctgccgtgtgctctgggagacgtgcagggctggggctctggctcttttgggggataggcagcacctgcagggtgtgggtgagatgctccagccaccatgttcccttctcactcacctgctcctcatttctcttccctcagaaaacggagctggatgagtgggctgcggccatgaatgccgagtttgaagctgctgagcagtttgatctcctggttgaatgagatgcagtggggggtgcacctggccagactctccctcctgtcctgtacatagccacctccctgtggagaggacacttagggtcccctcccctggtcttgttacctgtgtgtgtgctggtgctgcgcatgaggactgtctgcctttgagggcttgggcagcagcggcagccatcttggttttaggaaatggggccgcctggcccagccactcactggtgtcctgtctcttgtcgtcctgtccttcctatctccccaaagtaccatagccagtttccagatgggccacagactggggaggagaatcagtggcccagccagaagttaaagggctgagggttgaggtgagaggcacctctgctcttgttgggaggggtggctgcttggaaataggcccaggggctctgccagcctcggcctctccctcctgagttgccttctgttggtggctttcttcttgaacccacctgtgtaaagaggttttcagttccgtgggtttcccctttgattctgtaaatagtcccagagagaattcgtgggctgagggcaattctgtcttggaggaagaagctggacattcagcctgtggagtctgagttttgaaggatgtagggagccttagttgggtctcagaccataagtgtgtactacacagaagctgtgttttctagttctggtctgctgttgagatgtttggtaaatgccaggttgatagggcgctggctgcttggagcaaagggtgcatttcagggtgtggccaccaggtgctgtgagtttctgtggctcatggcctctgggctggtcccttgcacagggcccacgctggagtcttaccactctgctgcaggggtggaaggtggcccctcttgtcacccatacccatttcttacaaaataagttacaccgagtctacttggccctagaagagaaagttgaagagtcccagacctactagcattttgcaactatgcttgtaaagtcctcggaaagtttcctcgcgtaccagacagcggcgggggctgatagcaattttagtttttggcctccctatcctctcacatgagaacactgcctggatgcatctcatgatctctggagaatttccccatctttctcttctttccatcgtgtggattcaatagtgtggatttgaaggctgccctgcccccgactctcctgccgcacccctggccattgtaccttttgatgtttagaagttcgtggaagtagacgctgaggtgtgcagaggagctggtggataacagagaatgccagggaagatgagtgctgggtcagggtacttggatgaaacggtgcaggccaggcgggccctaataaaaccctctgccaggtctgggagtcccaggccatctgctcaacgctctgtggtttgtcagacctgcaagcaagccccctgctggggaagcctaggtgtccttgagctgaaccgcactgaagaactcttgtcctcactggctgatgcagcagaactcttgggaaatgtcttagtcctgcagaatcaggagtcaccagatgatgcagagttgagatcatcattgcaaagttctctgttcctgaggaactaaatttaaggaaaaaatgggattttgttttagagttggaaaaaaagcctgattaaagagtttctgcctgt

SEQ ID NO: 74 - DNA, 28144 bp, Homo sapiens
  source 1..28144: mol_type = other DNA
tgtaaaaaatggagtcaccacgaccagattaggccacggtgaggactgagatgatgttgtaaggcaccagcacagagctgacctacagctcaatcgtggtgggagggagtaattatccattcagaaaaggggaaactttccgctgcgcctcctgtcgctgttttccttggctcccggaggtgcgcagtatcgggtccgtttttaaggtaaagaaactgaggcctagaaagagaacaggataacccagggcgcggaggctggggctagaacccaggccggctggctctgagtccagtgcttggcctgcctctcagaggcctgtgggcacgtccccacccacccctgtccccaggcgtgggagcgaggggttgggcttggcctcagggcgtccctggatcccggacgcgcttggggatctccggctcggaccccaggagcagagacagcgctcgagcttgtcactttaaattcaagagggagcgggcgggcaagcgggcgagcgcgagggagcgcgcggcgggctcctgggagcgtgcccggactgcggcgcagctccggtccgccgccccggcccggccgagcccccggcccgcgccgcgctcctcggaggcgggagcccggcgacactgcaggggtggcgttgccgccggcggccgggctaggcgcaggtgcgtgcgcgctgcgggaggcgggccggcagctggagcccagccggagcggcggcccctccgcggagcccgggtgagtacgcaccccgccgacccccgtgcgcggccgggatcgcaccctgatcgcggacgcacgcagccccctcctcgggccctgggcccgggaccccagagccccgcgcactccgcgctcctgcacctccgcgccgcgcttgcacacgaacgaatgccgggcaccgcgcacgctgggcgcccttacccggcccggccactccgcgcagtgcgcatcgcatcgcacgccccgcatgtgcacacacgcggctcacccggccatttacacgcctccccgcgcccacgctgcacacacgcccctcactttcgcattcagcgccctgactgtcctcactgtccctgctctggcttcgcaccccctcccgacactccggtccccatacaccctggaggttcccgaggcaggagcgctgggtctgcaggaaccgtcccaatctggaggggaacgttgcaccccagcccgaggaggccctggccgtgtgaagagccagatatgaccctcagccgccggtggcaccagcctgagtggggggctttccagagcttaggagaggggtatggcggggcaggggaggaagcttgcccagactcagggcctcaaggctgtagatttgggctgaagttgggggagggaggtggggggccgggagcctggcctgtgggtggaaggccctgagctggccatcctgggagctctcttccaggggctgcagagagactgtgtgcaccctcctccattcccaaaagcctgggaaagctgcaccatggaatgtcagctccttctccccgtcaggggatgacagttttagagagcagcagcaatagtgcttcctattagaaatggggaaattgaggctcagagagggcaggagacccaccgaagttaccacagccagtgtgaagaagggttaggacaagtccccaagcccccagcctccctactctgaagtctgaaagctttcctaagcagctctgcagagtgggggctcccagcctgggtttcaaacccggactctgccacttgtcagctctggtgactgactgacaaataaaacacatctgtaggctggcagcgctgcccacactgcacctcagtttcctctccagtacaaggagcagggtagcagccccctcagagggctgcggtgctgagataacacagggcaagtcacacagtaggtgcccaataaatgccagccagcacctcccagccagtctgtcctgcggtttctgtgggctgtttgggggatggcagcaggatgtggttatctcagaaagcggaggaggggtacttgaaaaggtttcaacctaaagatcctgaagaggctcacaggttgaaggatgaggctctcctgggcccaactcccgacccttcccattgccttgctagccagagaatgatgtgaggacactgggcaaggaggtggggtggagcagaaggcagggacagagggcccctctcccccgccgaggcacaacattcatggaaagccaattctctgacaagcccaggaggggcctctgccatggtctgattccagcaaagctgggggaagtggggggctcttccaactccccaccccaaaaggcctgcctgttcaggagtcagcatggtgaccaagagcccaggcccagatccattgcaccctggcaccaatcccagtgttgctacttgtatgctaggtgacctggggccccagcttcctcatctataaaagggggatccattaatccactgaatcatcatgtccacattgtgtacctactacaaccaggcacagtgctaagcacttagcacatgttatgtccacatgcatgtagcagtaaggagatattgctaggtaggtatgatcgagctggaatttgaacctagagctgttttcaatgagtaagctctgtgcagtttagggtctggggatttgggactgaacgaattggtcagatggggaggggtgctgcagaggtagggatgtgcagtctgggagctcagtgagggtctggagccactctggtcccccatgttatgctctttgctgtgtgtctggacaccggggatgctctggtcacaggctgccctggtcccactgtacctcattgctatcctcttctagccaaagacacagtccttctgcctggcagacctccaggctgccagcgggagcccactgaggtggtcccaggtgagacagagtcaaggggtctcggggatagtgagcaaagcccttgagaagggcactggctgcacagcagcacttgcggcttggtctgagcttcctcctcactggttgggtgacctcgggccaattcactgcccttctctgagcctccctctcctcctccgtggaggagggggtagtaacaggatttgccccatgggtcttacgggtgatggggaagacggcatgagggttgtcactgctaatggaagaggggctggactgggctacaggaatgactgccaggcccagctctaccaccgctggctgtgtggctttgggcaagtcacttaacctctcttaatctcccacagctttgctgggcgtggtgagatcacaccacttcattccagcctgggtgaaagagcgaaactccgtctcaaaaaaataaattaattaaaaaaaaaaagtagctcattcaaagcccactttaccaggcttatgagcagggatgcttccagggctcaacaggttctagcagtgaatggaaggatgggagcagccagggaaggggcaatgccgacttagctccaactcctgttggagtcgggggatgcaaacccattgtccccatatcttctaactttctttttttcttttctttctttttttttgagatggagttttgctcttgttgcccaggctggagtgcagtggtgcgatcttggctcactgcaacctccacctcctaggttcaagcgattcttctgcctcagccttcccaagtagctgggattacaggcatgtgccaccaagcccggctaattttgtatttttagcagagatggggtttctccgtgtgggtcaggctggtctcaaactcccgaactcaggtgatccgcctgcctcggcctcccaaagtgctgggattacaggcctgagccaccgcgcccggccagatcttctaattttcaaagggaagctggaaatcctttttaaatcaatttttaatgggaaactctccccgcacacacacacactttttttttgaggcacagtctcactatgttgtccagactggttttgaactcctgggctcaagagatcctcccacaccagcctccccagtagctgggactacaggcatgacccactgcacccagctaaatttttcaattttaaaatgttggcaactcacttaaatgtaagacaaataaacacatctgtaggctggcagtgctgcccacactgcccagactaggggttagggggtctgtatgggccatcaccaggctgctaaccacagcaaccaatatgtgccaagcctgactacacgtaccttctcattccaccctcctggcagcctcacatctgctttacaggtggggaactgaggctctaagagactaagaaaattacccaaggccactgcagctagccaggggcaggtatgggagtcagagctgggtgcagctgactacaaaccctgtgctcaggatgacaccctctaggagcctcgacctctctcccagttctcttctccctccactcaggcaaatgagctctgccttcacagggcaccaggctggaacatatgtctggaggccaggggcggtggctcacgcctgtaatcctagcactttgggaggccaagatgggaggatcattgaggtcaggagttcaagaccatcctggccaacatgatgaaaccccgtctctactgaaaatacaaaaactagctgggcatggtggctcatgcctgtaatcccagctacttgggaggctgaggcaggagaatcacttgaacccaggaggcagaggttgcagtgagctgagatcgcgccattgcattcaagcctgggtgacacagtgaggctctgtctcaaaaaaaaaaaaaaaaaaaaaaaaaagaaggaacttctgtctggggtgtgcctagcagtcattcacaccctcactgaaatctcagctccctgggaaaggatgtcgtgttaaagggagaggaaagaacagacagcgtgggagtctggggtctgagctgggccagccatggaggtgatggggcccccgacagccagaggccagatgcagcttgaggctttgtcccgtaccacgcctgttgtgctgtggggtgtactttgccatgcataccttgctcgcgtgctgcgggcattggctgtcccagcttggccccactcttgcaaagtcagcttgtgccaggtaagcaggaaaaagccgatggcttatctgattcccggcaaggcagaagcaggctgggaggtgcgtgtgtgtacattagcatgtgtttcagcgtatccagaccagcttccgccaggagctaggaccaccttgggcaggtacatggtgacccatttgacctgcagattcttaggaaactttttggaaaccatatgcccacttgcagtgagacacagtggttaggagcatggagccagttggcctgggttgaacagtttattagctgtgtggcctggggcaaattacgccctgggactctcacccgcaaaccagagataataatagtacctacctcatggggctgttaggcaaattaaatgaggtcagataaatgcaaagtgcttagaatggcgcttgatgtgtaagaagggctcgacaaggttctctattactatcattatctccagcccaggcccaggaatgagcttccactctagtcaggatgggtgaagcccttcctggcttagcaccacccttccatcaccatgacaacgcacatctccttgtgggagtgggggcagcatcaggagaactggaagccaggagctggctgtgcaccttatctgacctgcttctagaggctcctgggcacctccaggacttaagggggtagactaggacttatggcaccccaaatgtgctggataaccctgactggagcatggcaccgaagcttcttgactccaaagccacagactggggagaaccccggaattcctgaaaatgtggagggccttagctttaccctctgattcgaccccagtcccaaagggaacctacaggatgctccgaggggttgggaattggtgggtcacactccccaaggactttttatactgcgtctgaatggtgtttgcatttttttgcaaattggttgctacctttaaaactcaggaaatggcacataaaaaattcaggtatctggcttttctttaaagtgccagaagatcaagccacggtggttggcattcctgctggggcaaaaatgcagctgcccttgggccaggccatcactctgcagttcttacctccccttccccttgccctaccaccctgcaccaggcctgcaggcttaccatgtgtaaccacctctctgaactacaagggaatccagaaattggggtgggcattatcctggccctcggtgcccttgacctgagatcagtgcagcccatcccaaattcctttttccaggactcccacatacacccacttagaacacatctgtgagccagatttacttcttagcacactaataaaacaatgagcagtcacctaggttcaggtaatgggttgtacgagctcccagacctttctagaacaacttaagcctcagtcattcctaaaagctgggggtggaggatggggtggggaagaaaccatgccaagcagtgaaaggactgataatagaatattgcagacacgcagcctttccttcccaatcaaaatggaagcatttgaaggaaggctctggctcaagccaggggggccttgctctaatgagtcacctactgcgtcgccgctggtcagcctgatgttgttaggatggaaatgagctggggttgccagatttggcaaatacaaaaacaggacacccaggagcattgatgttttggatgaacaatggaaaagattttggcgtaaatatgtcctgtggaatatttgggacacacatattaaaaacgtatttgaaatttggccaggcgctgtggctcacacctgtaatctcagcactttgggagaccaaggctggtggatcacctgaggccaggagttcgatatcagcctggccaacatggtgaaaccgcatctctacaaaaaatacaaaaattagccgggtggggtggcacatgcctgtcatcccagctacttgggaggctgaggcaggagatcacttgaacccaggggcagaggctgcagtgagccgagatcgcgccactgcactctagcctgggcaacaaagagagactccatctgaaaaaacaaaacaaaacaaaacaaaatctgaaattcacatgccactgggcatcctgtgttttatctggcaatcctgagaagagtcttagaatgcttgaaaagagctttaaacatcatttcttaaaatgccaagcctccctttggtggcactccccttatagctgagtgtaagctctggatgacaggcacgtgggtgccaggaggccaggacctaggagcgggacgctgactctctgcagccctctcctctcactctcttttcccttccagtcacagtcactgcagcagacatcatggctgtggatgtggcagaataccatctgagcggtgagtgcccagggcaaacccctcctggatcacgcctgcgagacccttacaccaggcctgggtgggaggtgtctgtgggacatgaataattagtccttgccattaatgtcttcactgtcaaggacagtcagtgacttgcccaaggtcagacagcccgccctggggacatcaagcttggcccagtctgaggtctcctcatcttgccactcaagtggctccttcttgttaaagtgactttctctctttcacttgaaagggtccccggggagaccctcatcctgctgcaccctggggatgagcctgtgactcggaatccactcaccgaggccttctgtggagactgtcaagtagccaagggaaaataagcccaggaaggtcaaggttagattcatggggcgttaaactcagagaccacccagtccagaggcagaggttatagtgagctgagatcacaccactgcactccagctttccagcctgggcaacagagtgagactccgtctcatcagaaaaaaaaagaggccacccagtccagggccatggctcccaccttgtcaccctttgcctcagcagggagatgggagctggctgggagatgcctcgagactccagacatactcctgcagccctccccatggacagcggatggggtcagagaagaaacataccagccgtcttttctccctttgttcctctcctcattcacagatgggagaagtgaggcttagagagtaacggggtcaggatgtgcactcaggtctcctgactcccagccccgtgctccccatcactctagcccctaccctaacgcagcccctggggagcccagggctgatctgaagggtgtgcccgggaatcacctttcccatcactttttcccaaaagtgagccagggagccgcacttttcaccctcaggctcacaggtcttgcccccctgcccccaccctgccccctacccgtatggccttgggcaagtggtgaaaccggaacttctacttacttatctgtaaaatgcaaaagatgaggcttgcctcagggctgttgggaagatttagagagctgatggttgtgcagcgcccagcatggtgcaaacgccactcttccagtggcagcgctttgcacacgctgttcccctgtcctggagtccttccctgcctctgccactgcctgcctgagtcctggcacctggtggtggggttataggtgcagatctggacccagtctgtctggaggcagatctctcctccgtccctcagcttcctcatctgtaaaatggggaaaacaatagaaccaacctcacaggattgccttgactccatgggttaatatacgtgacgtgcttagaacagggcctggcaaatcataaatagtaagtgcttcataaggggagctattcctcctcctcctcatcccactcgtttctggtcttcgcctagaccccacttccaatatcaccccaagactggtattccataaaatcaataaatgaatgcgaattgtcatttcatgtcaccttcctggggcttttccttctgtgcccccagccctgcccccttttctgccaccccgggcatgggctccacccttcagctcccaaagagcctcaggcacaggggagcctgaacctgctttgccacctggctgtgcccacagcctgcttagagaccttgggcctctggtcctgccctctagccaacccccggctactacccagccctgctgtgaccctgttcccaggactcccagaatacaccaagccttagcagggcggggcccgggagcctccatggatctctttgtcatgggcatacgtagcccacaggtgacattctgtcaacagcggcaggaggaaggagggtttcttcacagcccttccaccgtcgttacccattccttctgtttttccctggtctgcccagcccgtgactatgtgctgcgtgacttttgcgcacgtcacacgattgcgtgattagaccatgttggggattcatttttttcctctcttaacaatgccagaaatgtgtctctgcattgccacagtgccatcctaatgacctcaattgtcattctcgaaggccagtgacatttcctcccaagacagagccaccagccctcactggccccctcggtgggaccttcaggctgtctccagatttctgctgttataaatacagcctcgatgactcatcccagacacaaaacctgttgggattttccctttagaataaattcaccagagtgggaccgctggatgggggatgttcttgtcatccgcattttccaaacggagtatgaagcccagaggtgctgggtgacttgcctggaagccaaggtaccggtgcccggctctgccgtttctcaccgctggccttgagtggagaaacagatgtgctcattacccttccttggtctcagttttcctcttttagaaagtagggccttggccaggggcggtggctcacgcctgtaatcccagcactttgggaggccaaggcgagtggatcacctgaggtcaggagtttgagaccagcctggccaatatggtggaaccccatctctactagaaatacaaaaaattagctgggcatggtggtggacgcctgtaattccagctactcgggaggctgaggcaggagaatcgcttgaaccggggaggcagaggttgcagtgagccgaaatcgtgccattgcactccagcctgggcaacaagagtgaaactccatctcaaaaaaaaaaaaaaaaagaaaaagaaagaaaagaaaagaaagtagagccttacagggtgctcagtgctgggagggcgtcagggctggaggccagtgagtcagtgctgtggactctggccaaaggcagctcagcagacagcagggcaggctagaggggctgccccactgtgtgatccattcctgtgtggccgggcttcagggcagcagtgatgaggaactcctctagccccgggtcccctccctccctcccccggccactctgcccactctgggctttttatacccctctattcttcccgctcttgacttccagctcctgttgccgtggcctggcacacttcttgcccctcctcatatctcagcttacatgtccctcttccaggaggccttcctgggctgctcccattcccagtaccctgatctgtctatttatttgcctgccccaccccaccccctagactgccagctacttaaggacagggacttggcctggggctgactcaaccctggctacccatgcccataggctgctggcacaccaggatgggtgctcaatggatgtgcagtgatcaatctcatgccctgaggtgctcttcgcacctctccccaccttgcttccagggaactgtgcggggtcgaggccgggtggggcagtggttaccccacttgctttggggtctggctgctagagttggggtcccagcaccaccccttctgggctctgtgaccttgggcaagttctttagcctttctgtgcctcagtttcctcacttgaattgagacagacgcagtactaagagcagtttagagaactgtatttgccagcactgtgacctgcacaatgaatcccagtgtctccttggcttcctttggggaagcagagccaggtttcctgggagagggaggcaaaaccttggaacgtgtatggtcctgctgcgtgccaagcgcggtgctggggaggactcgcctgccacagttgaggaggttgttaatttccgttttcgggggcagcaaggctcagagagagaaggttattgactcatcagcagagcaaaagcctctgagcatctggatttgtctccaagccctgcacagcctgcagccacctctcacttgtggctgagttgtttgttttggtaagagattcacagagagaaaagattcacataccaagcaatttacccacttaaagtgtacaatttaatggtttttagtatattgtgcaaccaaccacacaatctatttttagaatattttcatcatcccccaaagaaaccctatttctcccaactttccagcccctgacagtcactaatctactgtatagactggtgtcaattctgtctacatagatttgccttttctggatattatgtacacaggctgatcatcctaaatccaaaaatccaaatccaaaatctgaaatattttgcgggccgacatgatgctgaaagaaatgtctattggagcattttggatttcagatttttggattaggaatgctcagactataagtgtaatgtaaatatccccaaatcagaaaaaatctgaaacccaaaacacttctggtcccaagcaacacaggaaagtgtatgtcttgttcgacatgggatctccagcacctagcacatagtaggcattcaataaatatccattcaatgtagaagtcggtgctgctccccgggtgggggtctgtatccactaggaagccctaatgagaggctgcccttgccttgcagtcatcaagagcccccctggctgggaggtgggtgtctatgctgcaggggccctggccctgctgggaatcgcagctgtgagcctgtggaagctctggacgtcggggagcttccccagcccctctccgttccccaattacgactacaggtaccttcagcagaagtacggcgagagctgcgcagaggccagggagaaggtgaggcttctgctcctgcaggtgcacagcgagtgcaaccccatgcccctaccatccactcagatcagtcttcagcccctctccctccgtcaccacctcctcctggttaatgtcctcctttgaaaggggagtagacctccctcttcccctttcacatcttcaacttttttttttttttttttttttttgagatagagtttccctcttgttgcccaggctggagtgcaatggcatgatctgggctcactgcaacctctgcctcctgggttcaagcgattatcctgcttcagcttcccaagtagctgggattataagcgtgcaccaccatgcctggccaatttcatatttttagtagatacggggtttcaccatgttggtcaggctggtgtcgaactcctgacctcaggtgatccacctgcctcgacctcccaaagtgctggcgtgagtcaccacacctggcctgctttttaactgctaacgttttctttctttcttttttttttttttttcaaaatgctccttgcagagcagggctaccccataggccaaatgcccagagtaacctgatatatttttcttcttactttcttttttttctttttctttttctttttcttttctttttttttttttttttgagacggagtctcgctctgttgcccaggctggagtgcagtggggcaatctcggctcactgcaagctccgcctcccgggttcacgccattctcctgcctcagcctcctgagtagctgggactacaggcacccgccaccatgcccagctaattttttgtatttttagtagagacggggtttcaccatgttagccaggatggtctcgatctcctgacctcgtgatccgcccgccttggcctcccaaagtactgggattacagacgtgagccaccgcgcccggcccttcctttctttcttttcttttcttttcttttctttccttccttccttccttccttccttccttccttccttccttccttcctttctttctttctttctttctttctttctttctttctttctttccctccctccctccctccctccttccttccttcctttcttttctttcttttgagacagggtctcactctgtcagccaggctggagtgctctggcacaatctcagttcactgcaacctacacctcctgggttcaagcgatcctcccacctcagcctcctgagtagctgggattacaggcccaagccaccatgcctagctaattttttttttattttttgtagagacggggtttcaccatgttggccaggctggcctcgaactcctgggctaagagatctgcccgccttggcctcccaaagtgctaggattacaggcatgcactaccgtgccaggtccttctcttttcacctcccttgtagctgaagcattttgatatactgttgaacacacatcataaacattattttaatggctgtatgagattcttttttgtacatgtgccatgattgactaaatgtcatgataaataatgcagtggatgttctgtaggtaaaactttgtcttcatttgggatagtgtgctttggatggatgtccagatgtgtaactgctgtattgggggcacacacattcttagggctctcactataccttgctgaaagttttatcatttaacacatggcagagagttttccgaatgtcatgtagagttccagagagcacagccagaatctattaccagattagagtccctcatgttcactcacttagggtgtctggggggactatctcacacgctgttgggggaatgtaaatttgaaaaaaattttccaggcctggtgtggtggctcacgcccgtaatcccagcactttgggaggccgaggcgggcagatctcttgaggtcaggagttcaagaccagcctggccaacatggtgaaaccctgtctctactaaaaaaaatacaaaaattgaccgggcacagtggctcatgcctgtaatcccagcactttgagaggctaagactggtggatcacctgaggtcgtgagtttgagaccagcctgcccaacatggagaaacctggtctctactaaaaatacaaaattagccaagtgtggtggcgcatgcctgtaatcccagctactcgggaagctgagacaggagaattgcttgaacccagaaggtggaggttgcagtgagctgagatcacgccattgcactccaagcctgggcaacaagagcaaaactctgtctcaaacaaaataaaacaaaacaaaacaaaaaaattagctgagcatggtggcaggcgcctgtaattccagctactcagcaggctgagacacaagaattgcttgaacctaggagccaagatcgtggcagtgcactctagcctgggcaacagagtgagactccatcaaaaacaaaaacaaaaaaccttcaagggactgtgtcctctgagccaggattttaagaaggctattcagtactgcagtatttgtatttctgaaaaagtacaagcaacataaatgtccaacagtggggaagagtaaattaaattatgattatctgctcaatgcaaaattggggaaccatgaaaattatggtaagcagccaggtgcagtggctcatgtctgtgatcccagcactttgggtagccaaggcagaaggatcgcttgagcccaggagttggagactggcctgggcaacaaagcaagatctcatctctaccaaaataaataaataaataaataaataaataaataaataaaattagctaggtgtgggtaggcacagtgctcatgcctgtaatctcagcactttgggaagctgaggtgggcatcacctgaggttgggagttcgagaccagcctgaccaacatggagaaatgccgtctctactaaaaatacaaaaaattagctgggtgtgatggtgcatgcctgtaatcccagctactcagaaggctgaagcaggagaatcgcttgaacccaggaggtggagcttgcagtgagcagagatcgcaccactctactccagcctgggcgacagagcgaggctccccctcagaaaaaaaaaaaaagaaaaaaaaaaagccaggtgtagtaggtcacacctgtggtcctggacacttgggagagtgaggggggaggatcgcttgggcccagaaggttgaggctgcagagagctgtgatcgcactccaccctgggcaagtgagaccctgtctcaaaaaaaaaaaaaaaattatggtaatgaaggcatggaagatgcttatggaataaaaggttcttgttttctcaaatcccaaggtcaatttagggaaaataaaactatttatttatttatttatttatttatttatttatttttgagacagagtctcaccctgtcgcccagtctggagtgcagcggcgcaatctcagctcactgcaacctccgcctcctggattcaagcagttctcctgcctcagcctcctgagtagctgagattataggtgcatgccgccacacccggctaatttttgtagttttagtagagacggtttcaccatgttggccaggctggtcttgaactcctgacctcaggcgatccgccacctcagcctcccaaagtgctggttttacaggcatgagccaccgtgcctggccaagggaaaaaaaaattaatatttgggtgagtgtcacccaacatgaaagcttcctgtgttgtaaacttcccttgtggctgctccatcatctcttgagtagctggcttctggtattcttacccattcttcttctgggacacttagattgctagctgcttttcctttttctaaacatcactgcaatcgacaacttgatgtatggaattctgtccctacaaatatacatattaagaaaaagttgaagggctgggcgtggtggctcacgcctgtaatctcagcactttgggaggctgaggcaggcagatcacaaggtcaggagttcaagaccagcctggccaacatactgaaaccctgtctctactaaaaatacaaaaattagctgggtgtggtggcaggcgcctgtagtcccagctacttgggaggctgaggcaggagaattgcttgaacccaggaggcagaggttgcagtgaggcaagatcatgccactgcactccaggctgggcgatgcagcgagactctgtctcaaaaaataaataaataaataaataaataaatagttggccaggagtggtggctcgcacctgtaatcccagcactttgggaggccgaggcaggcagatcacctgaggtcgggagttccagaccagcctggccaacatggagaaaccctgtctctactaaaaatacaaaattagccgggcgtggtggtgtgcacctgtaatcccgggtcctcaggaggctgaggcaggagaattgcttgaacctgggagggggaggttgcagtgaatggagatcgagccactgcactccagcctggtgacagagtgagactctctcaaaaaaaacaaatgtttcatatacccctaggctgggcacggtggctcacgcctgtaatcccagcactttgggaggccgaggtaggtgggcagatcacctgagattgggagttcgagactagcctgaccaacatggagaaaccccatctctactaaaaatacaaaattagccagacatggtggcgcacccctgtaatcccagctactcaggaggctgaggcaggagaatcacttgaaccctggatgcagaggttgcagtgagccgagatcacgccattgcactccagcctgggcaacaagagcaaaactccatctcaaaaaaatgagtaaataaataagtgacatgaaataatattaaacagcgaccttcctagctaagggatgcagggcttctgtgaaaggggaacttggagattcgagaatgaacaggccttactcatctctttgccgtctcccagtgaccttgcctatggcccccatgatgctcccacgtccctctttctcacccctagagagtgcctgcctggaatgcccagcgggccagcacgcggggaccacccagccgcaaaggcagtctcagcattgaggacacctttgagagcatcagtgaactggggcctctggagctgatgggccgggagttggacctggccccctatgggaccctccggaagtcccagtcggccgactccctgaactccatctcctccgtgagcaacacctttgggcaggacttcacactgggccaggtggaggtgagcatggagtacgacactgcctcccacacgctgaacgtggcggtgatgcagggcaaggacctcctggagcgggaggaggccagcttcgagtcctgcttcatgcgcgtcagcctgctgccggacgagcagatcgtgggcatttctcgggtaagtggggctcagggcggggcagaagggtgctctgggctcactagatgcctcccaggcaggcatggcggtggggcccggcaggatcccagaaaggcagtagagtgcaagtatggatgctgatcccagagctgaagcttcagactgtagagggagctctgtacagagctgggaggtggggggctccacctgaaggctcccattgtgtggagttcttagcggtcccaccaggtgaatacagaatgtggcaactgtcgttgtccacatctgccctgtgtcaacatggggtcccggcagaaaagggatgacatgcttaagaaggctaatttggggagggcttaataacaggactggggctggttgtggtggctcatgcctctaatctcagcactttgggaggccgaggcgggcagatcatgaggtcaggagatcgagaccatcctgcctaacacggtgaaaccccatctctactaaaatacaaaaaattagccgggcgtggtggcgggcacctgtagtcccagctactcgggaggctgaggcaggagaatggcgtgaacctgggaggcagagcttgcagtgagccgagatcgtgccactgcactccagcctgggcgacagagggagactctgtctcaaaataaataaataaataaaaataaaacaggactgtccaggtacagtgattcatgcctgtaatcccagcactttgggaggccaaggtgggaggattgcttgagcctaaccaggagttcaaggccagcctaggcaacatggcaaaactccttctctaccaaaaaaaataaaataaaataaaataaattagctggctgtggtagtgccagctaatttatagtcccagctacttgggaggctgagatgggaggatcacttgagcccaggaggttgaggctgcaatgagccacgattgcaccactgcactccagcctgggtgacagaatgagaccctatctcaaaaaataaaaatagggccaggtgcagtggctcacacctgtaatcccagccctttggaggctgaggcaggtggatcacctgaggtcagatgtttgagaccagcctggccaatatggtgaaaccccgtctctactaaaaatacaaaaattagcagggcatgtggtgcacacctgtaatcccagctattgaggtggctgaggcaggagaattgcatgaactcaggaggcggaggttgcaatgagccgagatcatgccactgcactccagcctgggcgacagagtgagactccgtctcaaaaataataaataaataaataaattttaaaaatgaaaataataagaccatttagagtggtgcggatggggtgtggggcagcctcagggatggcatggtaccctggaagggcgtaacaggaggggctgtcccactctagatctgaaggggtgaggggaaggtgaggttactgggcccaaaaggatagagggccaccttgtgtggagagggctaccttggtggaagctctgccctttggccaagggacatggtcatcccgcaacaatactgcagagagggacttccctccccctccagtttccttctggtgacctccactggctgacccaaccagaagccaaaggccaagggaacctgttgacacagcccatggaggtcaactctcagggccagagcagaggggggaagggtggagaataaagcgtgaggggcagggaaggtgcccagtcccttaggctaccctccacacatcgctgtaactcacagaaccaagccaacagagccacatctgggctgaagggtggggatagcctgtgagcagagtgcgaggagggcgtgtttagggcatcaagttggggtggcccagcttctgagaggcagtatagtgggcgattaggagcaggaccctggagcctgactgcctgggttcaaatccttgttccacctcttcctagcagtatgatcttggttaagtcagtttagtaccccatgactccgtttccccatctgtcaaatgggcatcatggttattgaggaagagatgggttaatgtatgtgaagttcttagcccagcctgggtcagtgcctagcaggttggctctcaggaccgtgcagagctcctgtcgtgcccagccatgttgcctgtggtttggggacgcattccttgaggagagacattggcagacagcagccgccacagcctgatgtgtgctgagaacctggttcacagagcccagtgcatccatgattctctcattagcccctgacgccaacaggacagattgttagggcatcttacagatgaggaaaccgaggctcgggaaagtgctttgcccaagacaacgccagtaaggaagcaggaggtccaggactcaaacccagggttccatcctcctccacccatgtgcacataaagcacacgctcagagaatggctggttggggagcccaggcccccatgagcaggggacagctgagaggctaatttagccgaaggagggagaggcagagccagatcatgaagagcctgaatgccgaggtcaggaggtcaggaggccaggtgggctttatcacttgggggcaaggagcccttcaagagcaggggattgtgtagggaacgtgagcactgtgcgaggagccttcccacacccaggcagtgacagaagagtgtggtcatggtggccggtggcgctgggggatttattccagggaaggcaagcttcccagcttaacagcctgggcaatcccaccagggggtgctgcccccaggctaggcagccccccagcctcaggcagggtccagggatgagagcgcctttctttaaatatcaccaggcagtgactaaagcatcccccttattccccagagacagagcccgcaatgcaccttcccagggggcctgcccacaacttcctgggaggaggtcagtggtgcccaccaggcaggactgggcttggaaaccgagttggcccaacctcgcctagtcctcccttccatccacccatccagcctacggtgttcaaacagtcctgggccaggctctgcaggaacctgggacgtcagtggctcgtgactccacaggcaactgtcccactccactgcttgcctggcctagggctagactcgaacagatgcaagaaagatggagaccagctcgtccagggcatcttgagggttctggggtgccacgggcactgaggacggaaattagttgggatcagattgtgggagcttaaaacgccaggccactagattggccgccactgaggagaggacaggaggcttttaaaccttcaaggctgagccaccaaaggaaagattggcattgagggtgtcaagacaacagagccaggactctagcctgggcctctggactccctgtccagtgctgtctccctgctgtggcctctcaggcccctagcgccctccatggccttttctcctgcagatccagagaaatgcctactccatcttctttgatgagaagttctccatccccctggatcccacagccctggaggagaagagcctgcggttttctgtatttggcatcgatgaggatgagcgcaacgtcagcacgggggtggtggagctgaagctttctgtgcttgacctcccgctgcagcccttcagtggctggctctatttacaggaccagaacaaggtaagtgacttgcctgctcgtccacctcggaagagcgtgcacacacatacacttccaggaagggactccatcatcctcatcatcctctgcaatagcctgagccccatcatcattaggagagcagagaagaagacctgagccacatccgaggaaactgcttgctgcaggcaaatttcaaaaacatcccgaccactgtttacagctcgtctgctgctttgccaccaaagcttcagaggttctacccctactgagcttctgctagagaaacattcctctagccttagaggggatgatttcagacagacaccaagctgcactttagttttataattgtaggaatgctcacagaacatcattgttgtttaatcaaagaatctaattccattccactctgatcgctgtgtattactaccgcagtgttttccttggcctgcaatgagggaacgaaactacatttgatagctacatttgacaggccgcctctgaccctccgccccaggcaggaccctcccggtggaagggaggagtggggcatgctccatgcagtggcggggggtgggtggctgtccctttctccaggctgtccctgcctgcctggagccctgtggtaaggggcccccagtgcagccacttctctatggagaaggaagccccagcctttccctggcaaccaaggctttccctggacccctcaagtcgggtggggagaagccctctgagccacctgtctgtcccccaggccgccgatgctgtgggggagatcctgctctccctcagctacctccccacagccgagcgcctcaccgtggtcgtggttaaggccaagaacctcatctggaccaacgacaagaccacagcgggtaaggcccagccggcagcccggctcctccacgtagctcagtggaagctgtggcccagctgctgtgctgtgggcacccggaggcatcggcaggtgtgggacacagtgccaaggtccccctcagctttgctgagcccagaagtcatgcagatggatagggggtggcatggggacaattaatccagccggggaaacatgagatccctggagggtggcaggggcccctgtgagggcagagtgaagggggtcagagtgatgcgggggtctcagggcaggaggccgcactcagggctgggggcactgggcagggaaccaaggtgggcatctgttccctggaactggaattcatggtggagactccattcccagagacagggcagtatcccagactccaaaaagggaccagggccacggggttggggtgggtgccaggcaggacccgatgccttaggtctgcaggagtccccagtccctctcaaagcagtgaccgtggaggcagctgtattctagagaactgaagaccaggggctgggggagcctgatctattgggagttgcaagccttggggcgggggtaggtggggggggcagctccaggcaggtgcggcaaggacaccccgtgggcaataggtgatgggcagacggcaagttgttatttcagagccgcacacggttgagtcaggctctgctgtgcgggtgcccggtgactcagggctgacgtctgcactcgggccatttatagaaggaacacggtggggctgctgagttccccagagcatcctaggaggggagcgcgtgggctgtgaggcagctgcctgagcacaaagcccagccctcacctgacgtgctgtgtgagcctcagttttctcatctgtgaaatgggaaaaataataaaggaccaatggcagggctgcaggaggtcacagcaacagttaagcattggggagtttggagtcggtgggtggagccaaactgggcagggctgtggtgagtgagtgtgacactggccctcacctgtccgcctgcccacagaccccttcgtcaaggtgtacctgctgcaggatgggaggaagatgagcaaaaagaagacagccgtgaagagggatgaccccaacccggtgttcaacgaagccatgatcttctcggtgccagccattgtgctccaggtgaggggggctgggggatgggaaggggccaggtcaccccagggctctggggctgccgcatctctccaccttctcttctcagggcccctgcaggggtagtggtttgcctccagccatcactttctagcagttattgagtgccactggggccagccctagggtgggtgctggggacacaggcatggctttctcggtgctcacaagggacaggcaggagagtccctaatccactaagagtgtcctcaggtgaggggggattcctgcaggaggggatacccagctctgagggaggaccattcctggtggagggaactgcagagggttggagaggagctggggtgagccaggcacccagagttcctgctctgaatctcccaagctccatttcagggttctgctgaactccccaggttcgcgtggtcttcagaaggtgacatgctccagggagacctctcccagcagggacatcacagaccacgggtggggcttgaagatagggcttgggccctgcttgcatgcctcggaggatggggctcgcaccaccttccctcactatctctagccctcctcggcactcctgacaatgagaaagtcctttgtgccttgagccaaaacctgcctccatagccccagggctgtacagaacccgcctaatctcccccaacccggggaccccgccagcatgtaaaggcccagaatctgcctcactctgagtgttcctaacccgggcacaccccagcatctctggcccatcctgggtatcgtagccttcacctgccaccctcgtggagcaggctgcccatgtgtcctctgcctctccctgggtgtcatagtgccacttctccacagcctctaaaagcaagagacttcttgggaccatgggggaagtggaggaggagagagatcgggctgggtttgagtttcagctcccgctctcatctcaagcagtctctcccgtcctcggttgtgagtgcaacgtggtgatattagtaatagcaacgcaacctctagcatgttctgactgtgcgcaggtgccgttctacacagttcactctttttgttcctgaaacagccctatgagatagaaaccaatttttttttttttgagacagagtctcactctgttgcccaagctggagtgcaatggtgtgaactcagctcactgcaacctccgcctcctgggttcaaatgattcttctgcctcagcttcctgagtagctgggattacaggcacctgccaccacacctggctaatttttgtatttttagtagagatggggtttcaccacgctggccaggctggtcttaaactcccaaccttaggtgatccacccacttcggccttccaaagtgctgggattacaggtgtgagccactgtgcccacccccaattttttttttttttttttgagacagagtcttgctctgtcacccaggctggagtgcagtggagtgatcttggtcactgcaacctccacttcccaggttcaagtgattctcctgcctcagcctcccgagtagctgggattacaggcaagcaccatcatgcctggctaagttttgtatttttggtagagacagggtttcaccatgttggccaggctggtctcgaactcccagcttcaggtgatctgcctgcctcggcctcccaaagtgctaggattacagatgtgagccaccatgcccagccagaacaaatattatcatcaccatttcacagatggagaagctgaggtagcaagagcccaagtcactgcccaaggtcacacagcaaggaagtggaggccaggcgtggtggctcatgcctgtaatcccagcactttgggaggctgaggtgggaggatcacctgaggtcaggagttcaagaccagcctggccaacatgatgaaacccccatctcttttttttttttttttttttttttttttgagacggagtctcgctctttcgcccaggctggactgcagtggcgctgtcttggctcactgcaagctccgcctcccaggttcacgccattctcctgcctcagcctcccaagtagctgggactacaggtgcccgccaccaggccgggctaattttttttttgtatttttagtagagacggggtttcaccatgttagccaggatggtctcgacctcctgacctcatgatccgcccgcctcggcctcccaaagtgctgggattacaggcgtgagccaccgtgcccggccgaaacccccatctctactaaaaatacaaaaattagccgggcatggtggcaggagcctgtaatcccagctacttgggaggctgaagcaggagaattgcttgaacctgggaggcggaggttgcagtgagctgagatcatgcccctgtactccagcctgggtaacagagtgagactgtctcaaaaaaaaaaaaaaaaaggatcagggggaattggggaggccagcatttgaaacctggcaggcaggtgctgccactgtggagggaggcagcaagagaaacctgagggcctaggcaggcctagttcaaactcttgcctgccatttatttgctgagtgacctggggcaagtctcctcacctcttagatcagaggtgaggattcagggagctgtgcctggcaccccactggggcctgacatttgtaaccttgaacccagaggccaagaagtacctctgactgcccctggtcctcagcacccatgttgcctcttcctcaggacctgtctctccgcgtgacggtggctgagagcagcagcgacggccgtggggacaacgtgggccatgtcatcattgggccgtcagccagtggcatgggaaccacacattggaaccagatgttggccacgctgcgcaggcccgtgtccatgtggcacgctgtccggcgaaactagcaaccagggcgggccagttgggcaatggagctgctggagcccggtacccactcagctctgtctgatgccctctccatagcccagctggagccgtgaacactggggtcccctggcagagtcctcatgacccatcctggtctctctgtccagattgcagcagaggagtgggcgtggctctgtgtccagggccccagggtctgctcctgctgaggaccagctgtggctgggccaggacagaggactcaaccctgctcctcccggtaggccagctgccgagctgggctatgttctggaacccagtgaatcttgggggccaggcactgtgctaggcaccagcaggggtaacacgaagaagacccggcccttagggcatcaggaagactagctcccctgccccggaggatctgctcagtgctgatggcagcccagctgtgtggactcagggggctctgagggctagggaaacaggaagggcctctttgacaaggtaggagctgtgcttggaggggcaggaaaagaactgagcatgtcgcaggcagcgggcccagcctgagcaatggcaggatgtgaacttccccatcgcaaatgcagttctcagcccactgcagtggatacaaggaagggcctttctcggggccggagaagagaccaagagaccaggcccgggcagcagcctaccggccacgtggaacactggctccggagttattctctgtcaaatctactccccggacctcaaccatggcaagaaccagaggtccaaagaggcccagacccaggtccttgtgctcagtcctgcgcaaaccaggcccagaccctgcaagcatttgttgatgcccttgcaggcccactgggagaaagatgcctcaggcaggtctcagcctgggggtggcaggggtggggcagagagaatactgacagcagaggtcttggtgggctgcacgtgcctgcgaagatgtggtggacaaggaggctctcgggctgggccttggaggggtggcagcggaaggacagcccaggtggctgaggcctgatgggaagccggggaaggccagggtggaagggcggcttgagggacgccaggagaagactgaatgccaggctaggaaggaggcggctctcgatcacggggtgggtgcccccgacaccgggtctcctagcttgagttccctagaagcgaaatctgagagggggattctggggcaagtagtttcttgcgggtgagtgttctcagagaaacttaccagatcaagaaagggagctcaggctggatggaggaagccacgcaagtgtggcttcaagatccatcgccttggcctgatcgctgtgggggcaggggcctggagtacgaggggcaccctgggggctcccacccagaagcagaggggctgggctgttgcacctctactggcatcagtctttggttaccccccagccccagtaggaggagagcaggcagagcttgtcatccccagcctggtgtcccgcagtcccaggaagccgcttcttgccttcatggctgagtgctgggaagggctgagctcacccaggccagcaggtggggtatcatctgctcggtggggccacccacaggtgacagcatggaccctcaggctggctgcccctgttccttggtccataactggtgagctatggagacccaggccaacaaattatccccagtgatatggggggaggaggggctagaacaagggcccaggggactggaggcaggatggtggctttccctacctgacacagccatggcccagccccaaggccaggctgtctaccctatggccacagcaggaggtcagcccagggccaggagacacatggctggacaaggctttgcagcctgggagaccccgactttctctaacccagtggctgtgcggtgcaggccactgactccccccctgccctctcccctctctccctccccctaactgcatgacatgttaactgtgtgcccaggacagccgtggtggggaccgggtatgccaactggaatgattctagaaccaaaataaagttggggcaggaagagggggcttccagggagccctgctcggccctgaatcaccttcgtctcttctctaggaa

SEQ ID NO: 75 - DNA, 9159 bp, Homo sapiens
  source 1..9159: mol_type = other DNA
agaagctccgcgggcccggctgggcgagtgtctggccctttaagggccgcccccgaggaggtgccaggcccgggtggcgccgtccgtccttcctggtcctgcgggtccaggactgtccgcggggttgagggaaggggccgtgcccggtgccagcccaggtgctcgcggcctggctccatggccctggtcacagtgagccgttcgcccccgggcagcggcgcctccacgcccgtggggccctgggtgagtgtggtccggccgtggtgccgcccacgcagttgctgccccggcttgggagcgcgtcctgcccgccagcgggctcctctcgaacggggacatgaggagggggccccggggctcgggctggagggcgctgggggcctcgagggtctctggtactggcgccggggcacaatccagagccctgcgcgccgcccgggctgcggaggccccgatctgagcgcgccccccgccacactcggcgcccacccagccgacctggccttgggccggggctccacggggcctcccggtggggcgtggactggggtgggaagacgattggcatctggcgccttttctggcctcccccaactctagaattcctgagagaggggaggggacagccctccccgccctcaccctgccctggggctgctctctccgcaggaccaggcggtccagcgaaggagtcgactccagcgaaggtgagcgccacctcccccacgcagacacttccgtctgccccgggcctggccacggccgtcctgggctccagctgcagggacagaaagctccccggaggacgcgcagcgaagcccactgccaaatttgtggggcagcgttcccggtggggccggctggtgggctcgcggtagggcggcctttgccttcaccctccccctggtcagctggggcttcctcatccactgccctgggctttggctcaggtggtggccacgggccgaacggcaggagggcatgatgggcctgaggactcctgggtccccgaccatgttcccagcagcacttgagttaaacaggtgggaggggaaaaggagcagccccctctccccacagatgagctagagtagaggggctgagagcttggaagcccccaagactggttctcagcaatattgccaaggggccgaggggttagaaatgcagatgctcaggcctccactctagacctatcgaccgcgtgggggcccatgaatccgtgtagacaagggctgcaggtgaatgtgatgcatgctagactttgagagcccctaccctaaggggaatgaggagccatgacagttgcccactgccctgccaggcagagctttgcggtgctccgtggggctgtcctgggactgcaggatggaggggacaatgatgatgcagcagaggccagttctgagccaacagagaaggccccgagtgaggaggagctccacggggaccagacagacttcgggcaaggatcccagagtccccagaagcaggaggagcagaggcagcacctgcacctcatggtacagctgctgaggccgcaggatgacatccgcctggtgagggcccatgtggagctccggggggtggggggaagagacacgcctgagggcagaatggagccctgtgtatgtgtctgcttggggagcaatggtgtgagggcagggggcagcctggggagtgttggggttacccatatcccagtgaccctgctgtttcaggcagagatgttttgttttttgtttgttttttttttgagatggagtctcgctctgttgcccaggctggagtgcagtggcgtgatctcggctcactgcaagttccacctcccgggttcacaccattctcctgcctcagcctcccgaggagctgggactacaggcacccgccactatgcctggctaattttttttgtatttttagtagagatgcggtttcaccgtgttagccagggtggtctcaatctcctgacctcgtgatccgcctgcctcggcctccctaagtgctgggattacaggcgtgagccaccgcgcccggcctgggcagagatattttgacagggcgaggtcatggctgcaggtctctggaagggaaagaacaggggaggtttgtcctgtgtgagccaatagggccaaattaggtccaaggggtgggaattccagaggcatgtttctcctcaaccagtagaagactttcctgatgatgtgagctgtccctaaatggaccagtgcacaaggcaggcttgctggacacacactgggggagggtgtgctagagggacccaggcagaggggaggaggactccagccccacggaggaagggagtccaggtggagctggagcgctcatgctcaaatacttgtggagacagctcgccgtcctcagcaagacgtggcaaacaagatgcagtgaatctttggtaaaactgaatttacaacagaagtatcatcccctatcgtgagattttgtccttaatatttctttggtgataaacatttctcaaatgaaatgatagcatttgcaagtgacagggtaaaaaaaaaacaacaaaaaaaaactggccgggcgcggtggctcatgcctgtaatcccagcactttgggaggccgaggcgggcagatcacgaggtcaggagatcgagaccatcctggctaacacggtgaaaccccgtgtctactaaaaacacaaaaaattagccaggcgtggtggcgggtgcctgtagtcccagctactcgggaggctgaggcaggagaatggcgtgaacccgggagatggagtttgtagtgagctgagattgcgccactgcactccagcctgggtgacagagcaagactccattgcaaaaaaaaaaaaagaaaaaacctccttcttgctgggcacagtggctcacgcctgtaatcccagcactttgggaggctgagaagggaggattgcctgagtccaggagttcaagaccagcccaagaaacatagggaagatctcatctcaacaaaaaacttaaaaattatctgggcatggtggcatgggcctgatgtcccagcaacttgggaggctaaggtgggaggatcatgtgagcctcggagttcggggctacagtgagctgtgatggtgccactgtactccagcctgggcgacagagtgagaccctatctcaaaacaaaaacaaaaacaacctccttcctcagcagaaacaaaaaatgtgcaacctatgtcagtcccattccccgcttttttccacacagtccctctttacccactgattttacatctgggaagaggggggatgggagaggaaggagcagggtcagcactgttctgggcctggggtgtctaggtggggagcagggtccttggggccactgtgaccctgggttcctcatctccccccaggcagcccagctggaggcaccccggcctccccggctccgctacctgctggtagtttctacacgagaaggagaaggtctgagccaggatgagacggtcctcctgggcgtggatttccctgacagcaggttcgagcagggagaggaaaggaggggcaaagaggtgagggacaggggggacaatggctttccctctgtcccctgccagctcccccagctgcaccctgggcctggtcttgcccctctggagtgacacccaggtgtacttagatggagacgggtaagcaatggcaactggaggtgggggctggagggtggaataactgagtgtgacggatgtgacggggcctgggcaccagggtacagtagaactttaggctgggactctggggcctgctcccagctccacgtcagattcaccgtgatcctgagcaaggcacctgactcctgggtctcggcttcccgtatccagcaaaaggatgggttctctgtcgcagagcctggagtctggcctcacctgtgcctggtctcctgcaggggcttcagcgtgacgtctggtgggcaaagccggatcttcaagcccatctccatccagaccatgtggtaaggacagagactgcctggactcaggccagcctctccttcgaaggaggctgcagggcctggggaagggcagcaagggaacagtgtgacccagcctctcctcctgtctcagggccacactccaggtattgcaccaagcatgtgaggcagctctaggcagcggccttgtaccgggtggcagtgccctcacctgggccagccactaccaggagagactgaactccgaacagagctgcctcaatgagtggacggctatggccgacctggagtctctgcggcctcccagcgccgagcctggcgggtcagtgtgtggaggggagggactgggtggaggggaaggcaggataatgcagtggggggcatggtggagaggggaaagggccccttgactgaggggctctgctcccaggtcctcagaacaggagcagatggagcaggcgatccgtgctgagctgtggaaagtgttggatgtcagtgacctggagagtgtcacttccaaagaggtgggcagggggcccggggactgagtcccctctagcaggggctgcaagcttgcctttcctgggagccctccccaccttgcctgtctccagtcctgagccattcctggatgccttggccttggccctaatccatctagatgggatagggtgctgtcctcagaggtcccagagggaaggtggcaggttgggcactaggagagccccagcctctcttgccctgggctctgcctgcagatccgccaggctctggagctgcgcctggggctccccctccagcagtaccgtgacttcatcgacaaccagatgctgctgctggtggcacagcgggaccgagcctcccgcatcttcccccacctctacctggtgagcttcagccaggcctgggccatggggaccgctggcagctgtgagggcggcaggccaggagcagaggctggaggagaggagaaatgtgctgttccctctctcccagggctcagagtggaacgcagcaaacctggaggagctgcagaggaacaggtagggctatgagcccctcgggccacccaccccatcttcccttctcctggcctccccgcattgggtggtagccagcttcaaaaacccctggaccaccctcagcagctgctagctctgcttctaactctgtcctggggctgttgccctggtgtgggctcccaggtggggacaggagacctgctggccagcccccgcccactctcctcccccatccacactgtgaaacaaggacagaaacaaagggcctcagccacgccaagacgagaagcagcagcgcatactgctgtaactgccttggacaagcagaaaaaggctcctcttgaatgcgcctgtgggcccagctacttgggaggctgaggcaggaggatcgcttgagccctggagattgaggccgcagtgagccgtgatcacgccactgcactccagcctgggcaacagagagagaccctgtctctaaaaaataagaaaaaagaaagagagaaaaagccttttctccaccttgccctgtctcagggaagaaggaactgcccttctccccgtggggacctggctgcctgctctgacaggtacctgtcatctgcccaccatgggcttctgggacctgctgtagcccctgccacccactgctgcagacccacccactctcagcttagctcaaaagctgttctctaactcatttctgagaataactgaagggctggagttgcagttggcccagctgtctggaccagatggggaaacaagcccagcagggcaagatgattggtctaaggtcgcagccaggtgacagctgggtcacttctcctcccactgtcactgctgcctccatctgacttgaaactcagagctaaagcgaggcccaggggctgccaggtccgattgccagtgggcctggtacctctgcccacatcagcctggccttgggccctctgggacagggtcacccacatcttgaacatggcccgggagattgacaacttctaccctgagcgcttcacctaccacaatgtgcgcctctgggatgaggagtcggcccagctgctgccgcactggaaggagacgcaccgcttcattgaggctgcaaggtcggtctcctggctttgctgcctgccccactgtggcttcaagcggcctccggtgccctcctcctgcccactctgccatcagctgtgccattccttccagccctcagtgtccttccctccttctctactctcagttggttgtgagcccttcacctgccctcccctgcaggaggcgggatccttcatggtgaggggagggtgctgaacctggcctgcttccacagagcacagggcacccacgtgctggtccactgcaagatgggcgtcagccgctcagcggccacagtgctggcctatgccatgaagcagtacgaatgcagcctggagcaggccctgcgccacgtgcaggagctccggcccatcgcccgccccaaccctggcttcctgcgccagctgcagatctaccagggcatcctgacggccaggtatgggatgggagcgagtggcagggggtgagtaggtgggtttgctgggggtggctgctgggtcactcagagctgactcagggccacctcctcacagccgccagagccatgtctgggagcagaaagtgggtggggtctccccagaggagcacccagcccctgaagtctctacaccattcccacctcttccgccagaacctgagggtggtggggaggagaaggttgtaggcatggaagagagccaggcagccccgaaagaagagcctgggccacggccacgtataaacctccgaggggtcatgaggtccatcagtcttctggagccctccttggagctggagagcacctcagagaccagtgacatgccagaggtgaggctggggctgggggagctcagcttgcaggggtgggggccataaggagggagatggggaaagaccaggatgggcgtttgactgtagacctgagcagggcgtacccgggctaagtctggcccgcccatgcagggtgtcctgggaggacccagggggcctggtcccagcctccttcacagtcagcccagtatctcttagcacccggcgtctccagcctgtcccatgaatacccctgaagatggggaccagccacgtcctgggcccctgagagcagctgagatccagtgagggcaggcggaggcactgtaggcacaggctggagaggggtcacgggggcagggcaggaagcagtgcctgtttccaaggctcctgggtgagccagccccagcctcgatcgcgggcaggttccagcctgaccacaggactagctgtctcaggggcagggctgcctccccaggccatgagctccacaggcccctgcaggccctgggggcgatctctaaccccatggtggggaggctaaattaatctctgaagcccctccctggtctgaggagcagcacctcaaaggatggggtggggaggagtctgcgcactcacgccgcccaagtcctgcctaagtcagcacccttgatgctcagtgctgcgggcacaagcctaagcctgggagccaggccctgtctgggactcaaggccaaatggctgacttggaggaaggagcatccactgagggcaggaacatttgggagaggcttcctggaggaggtgtgggtggggaaggatagggaggcgtggtgggttgatgggcgggtgtgggcgttgctaaaggcaagaggtcctcacccagcaccggacgcacgcatccacccagcccagctcaggggctggtgccggcacgggtttcacctgccggctgcctacgcaaaggcagagaaagcataggaggggaggagggcagggaggcctgggtctccagggagctgaggagggcttctgggggccagaaggaagctacaagcaggtagggttcaaggagcggggcagcagggctggggtgttgtcctccctcccgaggaagcgtggctgtggacagcttggcttttggcgtgcgtgccacaaacattccggccctcgcctcctcctggctctgtgcttggcacccctgccccagatcttcccggctctgtgcttgggcacccctgccccagaaaggcctcccatggcttccgtatcctcacacctgtccaggtcttctcttcccacgagtcttcacatgaagagcctctgcagcccttcccacagcttgcaaggaccaagggaggccagcaggtggacagggggcctcagcctgccctgaagtcccgccagtcagtggttaccctccagggcagtgccgtggtggccaaccggacccaggccttccaggagcaggagcaggggcaggggcaggggcagggagagccctgcatttcctctacgcccaggttccggaaggtggtgagacaggccagcgtgcatgacagtggagaggagggcgaggcctgagccctcacacatgcccacgctcccctgacactgaagaggatccacaactccttggagaaacaccctcacgtctgttgccgcacacattcctctcagctccgccccatacccgtcactacagcctcacctcccacccctgtcactacggcctcacctcccacccctgtcactacagcctcacctcctacagccttaagtcccaggcccatgtctgcctgtccaagggctcaagactttctaactgggatgtggtagagggactgaaggtacctttgggggcaacagcaccctagtttcattctcaactctagccctgcacactcacctgtggcacggaatgaaaacagagcttcccgtgcaaaaagggtcacgcctcccacccccgccccctccctgcacctcctgtcctctcccagttcattcctggaaccagccaggccaggcaaccagtggcccccaaaggcaggcaggatcctcaggccccagccgcgggaggctggaagggctggcagatcgcttccctcatccacctccaccggtccaggtctttgctgctgtccccagacctcctgtgacaccacgccagatcacagggcaccaggccagagatagtcttctttttgtcctttctggcctctggctagtcagtttttcatagccttacagtatctggctttgtactgagaaataaaacacattttcatatttggttattttcaa

SEQ ID NO: 76 - DNA, 3189 bp, Homo sapiens
  source 1..3189: mol_type = other DNA
gggagcggggaaaacaaaaggagacgaaggacgcatgcgtttggtgagtcccggattctggtgggttcttccgctcaggctgggtgaagcgcttccgggtcgccgccggcagcagcctcccggcgcggtaagtacagacgcaaggctgcaaccgtctccttgccccttcattcctttttcccccagagaaacccatttcctttgacccgactccccaggagctccatattgagagtccttaacccttaaagagctccagctcattggccgcttcctcgagactaagccccaccccgtcacacaaggtccgtcattcattggtgtcacttcctgtcacccagcatttctttcagttaattggtcctacccaggccccgcttttttcgcgtttagcaaccctataaggccaaatttctgtctgagacccgccctgctttctttctgttggtcaactgcatggtcattatcgtaatgagcaaagaaagggcggtggctttgcgacggtgggttgggctttcggagccgagatcgctggtctgtcagtacttcttggacatgagggtgtttaccgtcgtgcctaattacgcgggttgggaatctgagatacagggaagggcagcggctggccctgggtcggtcagataaattaagacaaaagcaggaccaggcatcgattattttctcctgctcatccctttcacggaggaattctaagccccgacacactgtatgacctaaagccagtctctgcctgtcgctgggcctcagttcgcctgtcctaagtttaattcagattatctggcactcctggtcggctccctcagccgctcaaagctgattgtacccttataatgttagttcatccattcaatcttccatctacttatttatccacttattcatgcctcctagaatgtcttactgaaccctgcttgcatatgctacaatccctccaccccgacatttggctgtgattcatgagaggtcgttagtgtcctaaatttctgacactgggtgggtgtggtatgggccatcataaagggtcaaaaagcaggttttagtgtgtggaggaggtagggatagtttcagtagaaccctgctacctctaattttgtataatttcataatgccagtctgcattctggattcctatccctacacttgactcccattctcatccctccttgaacagcctgcaaacagctttgttgatccattatttacttaattatcagaataactttgacagtggtataattgttattatccccattttacagatgaagacactgaggctcagagaggttaagtgactcagccaaggtcaaacagctagtaagtggtggagccaggactcaaagccaggtctgtctgattcctagggggaggggctgctttcctgctgtcttccaccctatccctaaatcaaattacaaccaaattaaaaacaaaaacaaagcaaaacacattcacttgaccctttccctcagtctaggagccatgtccactttgttcccctcactcttccctcgtgtgactgagactctgtggtttaatctggatcgaccctgtgtggaagagacagagctgcagcagcaggaacagcagcatcaggcctgggtgagtgagcagctagcacagcacagagacctcagcacagacagagacctccttcagtgggccatgacccagccttactccagaaatctacccaggaagagctttttgccctgagctgggaataatcgggctgggagccagggagccaaggttctcatcttgtggtaccctattttacaggggtaccatgtgacttctgggccagattagagcccaggctgctgacactcagcccaagctcttttccctaaagcacaggaaataattttgactattaattgaggatctagcagatgatgctttctaggctgataagtctctcacttcatcctcaccataattatacaaaaaaaagaaggctcagagagtttaagtatttggatcaagttcataaatggcagatgacaagaaagggattgtatctccctgagaactgggaggaagcttctccccaacacgtgtgggttgtcttctgggcagaatgggccagtcccatgcccctgacctgccctacttgggctctggccttgttcctctgtgcctttgcccacagctccaaagcatcgcggagaaagacaacaacctggttcctattggcaagccagcctcagaggtgagtggctctagcaggtggggcctgtgtgggggccgcagtggaccgaggctctgctctaattctgaatgtcctgtctctgacccagagcagttgtggttctcagatctgggtaaaagcctaaaaggggagatagaaggggtgggcattgggcctagcattaaggtcctgcagaacatgcaccagcctgctagactcaaggagggagtgtcggggtagggggtcattcattggccctagagagaggctcaagtgggtcagttcttgaactggtccatgcaggcctgtagggcttacaggctctgtcctgcccaccagcactatgatgacgaggaagaagaggatgatgaagatgatgaggatagtgaagaggactcagaggatgatgaggatatgcaggacatggacgagatgaatgactacaatgagtcaccggatgatggagaggtcaatgaggtaggcaaggggtatgggggagggcctctgttcctggacccttgctcctgacccagttgatggccaaggggtacagaaaccctggatccagccaggggcaggatctggggctgaggctggctgaggcccctccccacccacacccagcctcctctccaggtggacatggaaggcaacgaacaggatcaggaccagtggatgatctaggtagacaaggcagggtggcctcagggagattccaggccagcccaaactaccctgcatcccaacccccaacccctgcccacagaaccagctgatggccccagtgcctgaaagtgcccttgggcacctcctcagctgctgccaggatctggtctctttggcccctcccaggccatcagtctgcacttgaaatccccagggcctgaaacctactccaccttcctggccagtacctcaccccttgattgccaggtctggtctaagtttctttaataaagacaaaggagtgattttcc

SEQ ID NO: 77 - DNA, 32744 bp, Homo sapiens
  source 1..32744: mol_type = other DNA
ccaaagcgttacttccggcggaaaaggacgcgggagattcgattggaaggctgccggcgtgctactgagttcggccggtccgagtcactgtgcgtcgcctgggcccgttcctggtcttctcccccaggtgagctgggtaaaggggttctcgggaagccgaagagccggagactcctaaggaggctcttaacttcattatgaatgagacccacccagagcccggcgcttgttttttcacaagtggttctctgtaaacgggcagccatgagggtaacagaatataaacgtcagttattttattttagactcagtgcttttgcaatcacctaacgaacgtttattgaacacttacagtgccatcgagctagactcggagtgagcttttagaatcggaaatagagaggaaaaggcgcgactcttgcttctgtaatgtgcaaatacgtattcagtgggccactgtgcagagtagtacgtgctgaaaggggatcttccaaaatgctatgatggcttagaaggaacatattttaactgagccatgtgcttaaaccagagcttgaaagttttcttccttttcacatccagccagtccctaccagcctcttgaatatctcagatctgttcacttctctccgttttttactgacattattttggttcgaccctatgactgctacatagctgtgacagtaacccccccctcccccgccgccccagctggttctcctgctttcaatcttgctaccttccagtccagtctccacattgctgggctgataaagttcatatttgaccgaggcactccccattgaaaacctttcagtcgctcctatttgccctcaggtttaagcccaaactctttaacatgacttacagactctttcctatctgacttttgcctggctcttcagccctagtggttttccaccgctccagccatatagaatgtcttttgtgttcctgaagtgcactatcctccttctcaccccaaaccgtcttctgaccctgtccctgacctggctaattcttagtcagtttgcaaagccttttaaatcagaaaccctttcctgaccccacaggactggatcacagagcaccaagtaattatttgtttattctgcagatagttaaatgcttctttcgtctgtgccaagaattgctaggtactgagatccaatgatgaacaaggtagattcctgttctaatggaacttaccttttatggatggaattaaggagaatttacaaggaaactatgtgaattagactggtctaagaagacctttccaaggagttgatactgatgcctaaaagatgagcgtgatccaaccatgcaaaagagggaaagaaaaacattctaaacagagtgaacaggttgtgcaaacgtcctgaggcaggaaagagcttgacatgttaatgttcaagaatctaaggaaagaccagtatagctggaatatatttagaaaggacagttgtatgagatgagtctggaaagatgggcagagaccggatcatggttaggaggttaatccagcaccataaacaggagataatggtgatttggattaagatgatggcagaatatatgagggaaaagtgaatgatggtttctaagtatggaagtagattcaagtaccttctgatgagtgtgatgtgggatatgaaggaaagggaggaatgacaaatgactcctaggtatctggtttgagttactggttagtgagtagtaccatttactgagatgtgaccttctccatccctgtaataaatgtctcataaatgatatcaatggaaaaactgtatcgtactaagattttcctggttcatgtttttaaagcatttttcatcagtatttctcctttcactgaagattttgtctctttgtttttttgcttacttaattttcactctcctgcctgcctctcttacttttctagaattttcgtgtcaatgttactaaattattttttagggacttattatgactgcctttagaaaaattaaacaagtatgtgccattggaggagaccattagacagtgttaagaaaacaattcaaaacagccacccttcccatagctgaggcctcttggcctgtaaaatatgaaacagaaaattggagaattacaaggtgacaaagattttcatgcaaggcaagaagggtttggagaggaacgaagaaagggagaaaaattagtcatactttcttttctttatgccattagaagtggaactagttttttaaaggagtaatttcatcctttgggcacagtcttgaagcaaatacacatagtttctttcaagtgtgaagcttgagcaaagagagtaatggactagaaagactggtaagctactcatcagaaggcatgagttccagacctgattaacttctctgagtggatcagataatgttgcaaaagcactttgcaaactgtaaagcagtcaaatgaactcaaactggattatgaactttaagataggattcacatcttatacttttatgttctcttcagccccatccccagatgccagtttacactaaatacttaattgaactttttctctaggatctaacatagaataagaattagtttagattttctaatctaacccagtttttctagatcttctagtctagccggaagaagaaaaaaagatgtgttggtatgtgcatgtatgggcacggtttttcataaatgattaagttgccttctgagaacttgattatgaggtagttaagctgaaagatcaccaaataatggattagagtaaagaattgcaaaatcatccaaatgagactaagatgctgtcaggccttggggatttaactataaccatgtttatcacaagtgttacacaccatgagatagtctcaatgactaggctactggttttcaagtgtgggcaatttggccattacctgggaacttaaaatgcagattctcaggcccttatcccagacttactgaatcaaactctggagttggagcccagcaatctgttttatcaagccttctgggtgattttgatatatgataaagtttgagaaatacttgtctagtatgaaaatgggatgcagaggttgtaatcaatgagtttatatatctggtaccactgacaaaaccatctctagaatgaaaaatgcatcaggcattagcttgattccattaaatagttgattcaccaaacagctcttcttcaagcaactttctgtttataattttagtataatatgaggttataccaaatatacaaatatgggcttctgatatgtcccttccctgtgatggtaatttttcgtggtaaattagtagaacatctttggattacagttcagctccccatatggcttgtctaaaaggagagaaagcaagtattccagaatatcccatggtaaattagatatgtactatagtgtgtccacatggaccccacatattttaataagcataagtctattggagccttcattcctggacattgacctaggtaatccctggtatgtgccctttgaaaaatcaaaggccaactgaggccttaattagttctgccccaacacttacacttttgtccctctttctaccctcatttctacttttatgtgtgagagatttaaagaaagcaagattttctttgtatattattgctaatgtccctatccagcatttttatagtatttattgatttttttctaattataaaagcaatacacttagattgtatttattgattttttctaattataaaagcaatacacttagaaaatatcttaaatatataaagaaaataaaaatcgcccttaacactaccaccctgagaaaatactttttaaaaataagattatatactttcctaactatcctcttctctttccccattcctcccatcaaaaactaaattagtccccctgttatattttctcatggcactatgcatttccaaaatagaatttgccagaattgcagttaaattttttgtgtgattattttaatgtctgtctcttacactagactgtaagtctagtgactaggtagggaccttgtctgtttgtccatcaatcacactatccccacctagcatttagcagctgcacaactaataactgatgaataaataaatatgttcgcatattaaattgggatatggtttgctgtgatggagctgaaagaaatgtaatactatatcatcatccttcccaataaatgtgaaaagaaagataaactgcaaaagataccacatatgaaattgttcccaagtgtatcatcatatcttcctaattttagtatttacttattcctgatgtttcattcaattattcatcagacatgcatccactatactgcaagtcaagcagtagagagagacagagaaataaaacaaagtataaaaacacccccagagcctaggtaaataaataaataaatacaaaaataaactaggtggcaagtatgaaggaaatattatgaaaacaccaaaggaaattaattaacagtaactgtctgaaacgatcttattctattattgtccaacagacaataaatgggaagcctttttgccattttctggggttcaccaggtgaaatacaaatagtaaaaatactaatgatccctttcattacagttctcaaatttgctgtttttatagatttttagacttacttatttgatccactagagggcagtaaacccttaaataaagacaatgtaaccaaccttcctttaaaagtatagtaataagtgctggcacaattaatttagaaatgaacccaaaatttcctgcttatttaagtttttcatttattagtgagttgtctgcccaattagcaattttttttaggacagacagtatcttattttcacttagcccagtgtacgagtcatgttacaagtttattacatttcctaaagtttgaataacaattgtgtaaagaacatgatttgatgaatgcccatattgttgtggtacagtataaaattctgttttagagccctaaagaaaatagtctctgctcacaatatgaacagaagtaaaaaaattagaagtgaggataagatgtaagtaatgattaaaataagtatgaaataaggtactatatatgaaactaggctgtgtacttcgtatacaaatagaagataattttatgatttggtaaaattgtgttttatatttaacgctatgtgacaaaattgtggcttgggaagaggaaatgcaaatcatgaagattaatatctgaagttcagattgacaatttctgagcttggcactgaagatataaacagatagtccttctacgatcttactttgagtccaggaaaaacaagccatattgaacagataaatttaatataatgtggcatgtgatgaattaaagagtaatttaacttctgggaaaacgtcctagaaaagaagacttctaagaaggatcttaaagaataataagcattaccaagagaatgaaagcattttagagagaagaatggaaaaaagcaaaggcatagaaatgtgaaacatattgtgggggtggggaagcaaggaacacaactcagattgtttctcttggcataaattactagcacataaagagcaaaaagaaagttaagagaataggcattagggagaataaaaccaaatagacaatacactacaatagacaaaacaaatggtaggactacagaggtacaatagtatatggtgtagaaaaaaagaaaagccattccctttgttaataaagaaagactttttaggggaacttcaaatgaaataggaagaaaattctggttatcgtatggcgtctgcctactctgttgtaaaaattttcttgaattgcaaaattctgcttatagttcttcattcatgcaataaattttgttttgagactagtctttgttgcccaggctggagtgcagtggcgcaataccgcgcactgcagcctcaatctcccagactcaagtgaccttcccacctcagcctcctgagtagctggaactacaagcatgcaccaccatgcccagctaatattttttattatttgtagagatgagttcttgctgtgttgcccatgctggtctcaaactggtgggctcaagcaatcctcccaccttggcctcccaaagtgctgggattataggcctgatccaccacacctggccccattcaataaatatttattgtgaacttactgtgtactgagcactgttctaagcactggggttacagtagagaacagggtggactaggtccccgtctttatgaaacttaggctagtgatgggtagatgaacaaaaataagtaagcaaagacatacataggatgactatccagcagggttagtaccatgaaggataaaacaggtgatgccatagaaactaagaggaaggaggattctacttgagctaaagtggggctctctgaagggataacattagagttacagattgaaggacaataaagaaccgactattccaagacctaagggaagaatatcgtagccaaagagaatagtaagcacaaaagcctgagaagggaaatcgtttggtgtgcttgaggagcagaaagaaggccagcatggcttgaaatacagtgattgaggaggagagtggtacaaagtgaggtcagggattggcaagatctacatgacccagggctgcacagaccattgtgagatattgaggcttcattctaaatagcaggattttaagcaggtaagagacagcatgttcaggagtgagctttatgctcttttagctcccctaactcacaggtagatgtacctccatactaaaccctacactaaattggattttagaatgtggaggacaatgcctttgttgacataacatcatttgttatgttaactaaaagttataggaggcctttgttttggactaagctcctgcactaggccccagtggaccagactaaaaatcaaaatagagtcatttatacttaaagttccacctcaccaaatcaaaactacattgttatctgaccttcctagaactcagaagagagaaataaccaaatttcccacatgtgccagtttcaattgtcataacaacgaacttcgctctgcctttgatgcttacaacaaaaagtagccttatgttaaccagttattcctgtatttttctgttcctctgttcccactttaggaggaaagtaactttgaaatgaccaagctgctttttgttctttgtttctactttctttagcccttctctttctgtaaaactgaacttctctgctcagccccttgggtcacttactctattttatggaataaagtatttcccgattctagaattgttacaggaaagtagtcccaattcagacccccagagaggcttctttgatctcgcacaagaaagaattcagggcaagtccataaagtgagagcaagtttattagggaagtaaaggaataaaagacatagaacagccccgagggctgctggctgcccatttttatggttatttcttgatgatgtgctaaacaaggggtggattatttgtgcctcccccttttagaccatatagggtaacttcctgacgttgccatggcatttgtaaactgtcatggcgctggtggcagtgtagcagtgaggacaaccagaggtcactctcatcaccatcttagttttggtgggttttagcaggcttctttactgcaacctgttttatcagcgaggcctttataacctgtattttgtgccgacctcatatcttatcctatgacttagaatgccttaaccgtctgggaattcagcccagtatgtctcagcttcattttacccagcctctagacaagatggagttgcttttttattcaaacacatctgacagaatcataaataaagccaattaagatctttcacaaaattgttgtaattttgtcttttgacagttgcaatggcaaggaatttgaggttttagcacttacaatggcaattttctttgacccttctttctgcctttcctttgtatcctgtattacctaccctaccatgtcctttgagattgccatgtagcctaaggtgacaaccaaatctaggaatacataatcggctttggcagaaccttactaatgtatatataagagtcccaacaaggatagcaaaaaattaggattagcgttctcttttctgtgctcccttcagtaatacagattagtgatttatttaaattatttatctttcatctgtaaatttccatcttattaccttgagtggcaagattttatttttatagaaatgttattttgattgactatcagaattagtatcactttaacatctcccttccatagtcaccacatttctatgtttgtcatcatctttagagtactataccgaaaagattttattattttaaaaccagtgacctccactttgtcagtttgctgatgccagtgtcaaaaacagcatcacccatttcagaattgaaagtttttgccatgtgtttaaaaatgaaagtttcttaatacagctttatctcaaacagttacaaagacctttgttgtaaggcatgtattttatgttatatgttttatgttatgctaatccatttaaaaaattagtaaacaaaccaacctttttttttttttttttttgagacagagtttcactctgtggcccaggctggagtgcagtggcatgatctcggctcactgcaacctccgcctcccaggttcaagcaattctgcctcagtatcctgagtagctgggattacaggtgcacaccaggctaattttgtatatttttgatagagatggggtttcaccattttggtgagactgatctcaaactcttgacctcagatgatgtgcctacctcggcctcccaaagtgctgggattataggcgtgagctaccacaccctgccacagatcaagcttttaattttttctctctctctctctttttttttttttttttttttttttttgagaacaagtctcactctttcacccaggctggagtgcagtgccatgaatacagctcacttcagtctttacctcctgggctcaggtgatcctcccacctcagcctcccaagtagctgggaccacaagctcatactaccacgcctgactaattttttttgttttttggagagatgaggtctcaccgtgttgcccaggctgaatttttaaaaagaaagtataaagaggagaacattgctacaggcataccttggagatattgtgggttgtgtttctgaccactgcaataaagcaaatattgcagtaaagcaagtcacacaaattttttggtttcccagtgcatatattaataaaatgtttacactatactgtagtctaagtatgcaatagcattatgtctaaaaaatacatcttaattaaaaaacactttattattaaaaaatgttaatgatcatctgagccttcaatgagtcataattttttgtggtggagggtcttgcctcagtgttgatggttgctgactgcttggggtggtggttgctgaaggttggggttgcagtggcaatttcttaaaataagacaacattgaagtttgctgcattgattattcctttcacaaaagatttttctgtaccatgtaatgctgtttgatagcgttttactcacagtagaacttctttcagaattggagtcaatcttctcaaaccctgccactgcttatcaactaagcttatggaatattctaaattctttgttgtaatttcaacaatgttcacagcatcctcaccaggagtagattccgtatcaagaaactactctctttgtttatccataaaaagcaactcgtcataagttcatgccttatcatgagattgcagcaattgagtcacatcttcaggctccactttttaattctagatctcttgctattccaccacatctgcagtcacttcctccactgaaggcttgaacccctcaaagtcatccatgaggactggaatcagcttcttccaaactccaattagtgtggatattttgacttcctcccataaatcatgaatgttcttattagcttctagcatggtgaaaccttttcagaagattttcaacttactttgcccagatccatcagaataagcattatctatggcagctatggccttaggaaatgtgtttctgaaataataagacttgaaagtcaaagtgactcattgatccatgagtagagaatggatgtgttaacaggtatgaaaacaatatcaatctccttgtgcatctcatcagagctcttgggtgaccaggtgcgttgtcaatgagcattaatatgttgaaaggaatctttttttctgagcagtaggtctcaacagtgggcttaaaatattcagtaaatcatgccataaacagatgtgctgtcatccaggctttcttcttccatttctagagcacaagcagagtagattcagcataatccttaagggccacaggatttttggaatggcaaatgagcactggtgtcagtatcaagacaccagctgcattcacccctaacaagagagttagcctgttctttgaagccttgaagccaggcactgacttctctagctatgaaagtcctagatgtcattttcctcccatataagtctgttgtgtctacatttaaaatctgttgtttagtgtagccaccatcatcaactagttaagatctacttatcttaactagatcttttggataactttctgcagcttctacatcagcgcttgctgctttaccttgcagcaagttatgttttatgttttggaggtggcttcttttcctaaacttcaagaaccagcctctgctagcttcaagcatttttttctgcagcttcctcaactctctcagccttcatagaattgaagagcattagggtattactctggattaggcttcgatttaagggaatgttgtggctcgtttgatcttctatccagaccactaaaattttctccatatcaacaaaaaggctgttttacattcttacttatgtgttcactggagtagcacttttaatttccttcaataacatttcctttacattcacaacttggctatttagcacaagaaacctaacttttggtctgtctcggctatcaacatgctttcctcactaaccttaatttttgtttctgtcttttattttaaagtgagagatatgtgactcttcctttcacctgaacacctagaggtcattgtagggttaataactggcctaatttcaatattgttgtgtctcagaatagggagacccaacaagagggagagagatggtggggcagtcagacacacatttatagattaaattcatcttatataggtacagtttgtggcaccccaaaacaattacaatagtaacatcaaacatcactgatcacaagtcaccatcagatataataaaaatgaaaacttttgaaatattgtgagaattaccaaaatgtgagatggaaggtgagcacatgccactgaaaaagtggacttgcttgagacagggttgctataaaccttcaatttgtaaaaaaaatgtaatatctgtgaagcataataaagtgaagcataataaaatgaggtgtgtctgtattttattatttgacttctctgattttgtttatttggagatagggtcttgctctgtcacccaggctggagtgccatggcatcatcatagctcactatggccttgatcctcctgccttagcctcccaagcagctggtattacaggtacgtgccaccacactcagctaattctcttatatttttgtagagacagtgtctccctgtgtttcccaggctggtcttgaactcctgggctcaagcaatccccccacctcagtctctgaaagtgctgagattacagacataagccaccacacttggccttcctgatgtgttttatacaaggatattaaaacactttgagctatcatttgacatgtaacattttgctttttctgtttacaaaatctgaagtcttttttttctcttcaagatgtatcaaatgagcacactgaaatctaataaagtgatatttcagctaaaaaagaacaatttccaccaatttaggttctttaaaagattcatgtaagttcatgtacacattgaatataccttatctgaaatgtttgggtccagaagtcttgtgaattttggatttttgaatatttgcacataattaatgagatgcaggaatgggacccaagtctaaacataaaatttgtttatgttttatatacatcttatacacatagtctgaaggtaattttatacaatacttttttttttcttttttagatggagttttgctcttgttgcccaggctgaagtgccatggtgcaatctcggctcactgcaacctccgcatcctaggttcaagcaattctcctgccgcagcctcctgagtagctgggattacaggcaccccccaccatgctcagctactttttgtatttagtggagatggggtttcaccatgttggccaggctggtctcaaactccctacctcaggtgatccgcctgcctcggcctcccaaagtgctgggattacaggcatgagccaccacgcccggccacaatacttttaataatttagtgcatgaaacaaagtttgtgttaagtacttatgtgtggaattttgatttgtgccatcatggtggcactcaaaacatttcagattttgggttttggactttcagattcaagatgctcaaccggtagtttcctttgtattgatggcagacacaagttgtgtatcttcttgtaaaggtgtgaagaagctaaatgacatctttcctgaattactgggatagagcatttattaagaaacaggatacaagaattttcttaaactactctgttttaaatgtgattttcttcctattaatattttaaggagaaaaagaattaattttccaatacattgataccaccttcactttgaaagtgaaacaaatgacatctattagctttgcagtagaggttaagtggttttcctaagaaaagaatatgcactgcaatgaaagatttgccagtcatcccaatggctattttgttttgcagaccacggtgtgaacacatgaacagaagacgaaaatttcttctagcctcagtacttgctctccagaattcaagttttatatatccatcatgtcagaagtgcttctctaggataatcctggtctccaaaaggtaaaagtaaagtctgtaagtgtgagagaggaaatacaaatgcacactgtagatttcctatggctcaagggcaaggaccagatttaccaaacaaggacattagattctctcaggggttggttcttctgtaaatcccagaacagatttcactgctaatcctctattactagagaaaagttttaagttactgtcaagtcctttgctaaatacttgcctcattgaagaaaaataacttctcagagagtaagttccaatactgggtacaaaacttagcccatttctgggatatccctgggaataatataggagacttgtgtttattctttgtttatttttgcatgatcagtagaatagttgttaatataaataaataaattccttgagaccagggactatgttatagtaatttctatcctttagcaactagaaaggtgtttggcgtataattctttatcatggtgctcagatgcaagccaactatacctgagagcctaaggtcttcctctgatctttatagagtagaaacgagaggttaggtttgaagtttctccagaacactgtctctctgcatcgaagagaggacaagaatacctagtaagtaactagaactatgtaagaaagagtagtgtgccagcaatattcttaactagtctttttgtctagttagcattgaatggggaggcagaaaaggattggcagttctaactcatatctagactctaagtaatccttgaagtagttatcacactgttcctttattaagccactctctcaagcactcatttgttagctctaagagaaagaccctgtttgtgttattcatcattaaatccttggctagggcttagttcatagaaagtgttcaacaaatgttggttaaatgaatgaataagtgatagcatgatagtgtttagattgtcttaggttcaccccttttcaggttcttgcctgtcatctgaaacaactaaaacccatgggctatttgcctttcatcaaaatctgtacttagaagcagtgtggtatacagtccttacttaatgttgttggattcttagacaccgcaactttacgcaaaatgatgtataatgaaacaaatttttttctcatcaacgttataatgatgttgtttgagaatctgctataagtagttttgcttaaagtcacagtatccaagaacctatcactaacattaaatgaggacttactgtaatggaacaatttcaagcttcagagaacacaacagagtttcatgtaggctctggctctcattaactatgtgacctagggcaagatagttaacttctgtgagtctaattactcatttgtaaggtgggatcatggtacccacaatatgggatcattgtaaagttagagataatgcacagaaatgttctagtagaatacataacatatattaggatttccaaagtggtagctattattattataatctattataagtatactttaccttattgcagtatgttatcatgattaaaagcataattctctggagctgactgcctggattcaaattgcaaccctgccattatagctgtgtggccttgggcaagtcactttaattatctgagcctcaaaatggggaaagtaatatctgcctaataaggttcttgtaaggatcaaataggttaatatacataacatgcctagaacattgtctgatacattatcagtaatatatagatataaaatatttttaaaactctttctttccagtcatttattttaaagataatctgcaacaaaaatttaggttgaacaataatgccattgttacttatttagacgggtaataccagtagataacattagtgagtgtttgctgtacagtaggcactgtgctaggaactttgtgggcattatatcttttaatacaatagccctatgaagtgaatgctattgttaatgccaacctttaaaggagacaactgaagcttgggaaagttaagtaacttaccgcaaatcatcacacagccagctagttaggggcagaaacatattcaagcctaaacaatctgaattctgtctaccttcatagtcaccatattacttccaaattagcagcgaagtttgtattcagaatgacatcttcccctctctttcttagaacttaaagtgacctcggaaaggacttgtgactggacccttttggaatataaaacccatggcacatagtccttgcctatggaaacatagtccatggaaatataacctgttttctgcatatactacattgacacaaaaattttttaaaactatttccataatttctggtgcttacctttttttcccataggttattggggtacaggtggtatttggctacatgagtaagttcttcagtggtgctttgtgagattttgctgcacccatcacccgagcagtatacactgcaccctatttgtagtcttttatctctcaccccctcccacccttccccccaagtccccaaagtccattgtatcattcttatgcttttgcatcctcatagcttagctcccacatatcactgagaacatatggtgtttgattttccattcctgagttacttcacttagaataacagtctccagtctcatccaggagactgcaatgccattaattcattcctttttatggctgagtagtagttcatcgtgtatatataccacagtttctttatccactcattgattgatggacatttgggttggttccacgattttgcaattgtgaactgggctgctataaacatgagtgtgcaagtatcttttgcatataatgacttattttcctctgagtagatacccagcagtgggattgctggatcaaatagtagttctacttttagttctttaaggaatctccacactgttttccatagtggctgtactagttcacatttctaccagcaatgtagaagtgttctctgattgctgcatccacaccaacatctactggtttttgattttttgattatggccattcttgcaggaagaaggtagtatcgcattgtgattttgatttgtatttccctggtcattagtgatgttgagcattttttcatgtgttttcttggccatttgagaattgtctatttatgtccttagcctactgtttgatgggattgcttgtttttttcttactgatttgtttgagttcgttgtagattctggatgttagtcctttgtcagatgtatagattgtgaagattttcttccactctgtgggttgtctgttcactctgctgactgttctttggccatgcaaaagctctttagtttaattaagtcccagctatttgtttttattgcatttgcttttgggtacgccaatgtctagaagggtttttccaatgttatcttctagaatttttatagtttcaggtcttagatttaagtccttaatccatcttgagttgcttttatataagattcattctcctacatgtggctagccaatgatcccagcaccatttgttgaaaagggtgtcctttccccactattgttcactttgtcaaagatcagttggctgtaagtatttgagtttatttctgggttctctattctgttccattggcctatgtgcctatttttataccagtaccatggtgttttggtgacgatggccttatagtacagtttgaaatcaggtaatgcgatgcctccaggtttgttctttttgcttagtcttgctttggctgtgcaggccatgttttggttccatatgcattttaaaattgttttttctaattctgtgaagaatgatggtggtagggattgcactgaatttgtagattgcttttggcagcatggtcattttcacaatattgattctacctatccacgagcatgggatgtgtttccattcattgtgttgtctatgatttctttcagcaatgttttgtagtttttcttgtagaggtcttttgcctccttggttaggtatcttcctaaatttgttttttttgtgtggtttttttttgtgtgtgtgtttttgtagctgttgtaaaaggagttaaattcttgatttgactctccacttggttgctgttagtgtatagaagagctactgatttgtgtacattaatcttgtatccagaaacttggctgaattcttttatcagttctagcagctttctggaggagtctttagggttttcgaggtaaacaatcatattgtcagcaaacagtgacagtttgacttcctctttactgatttagatgccctttctttctttctcttgtctgattgcattgtctaggacttccagtagtatgttgaagaagaatggtgagagtgggcatccttgtcttgttccaattctcagagggaatgctttcaacttttctccattcattgttatgttggctgtgggtttgtcatagatggcttttattacattgaggtatgtcccttgtatgccactttcgctgagagttttaatcataaatggatgctggattttgttgaatgttttttctgcatccattgagatgatcatgtgatttttggttttaaaattctgtttatgtggtatatcacacttattgacttatgtatgttaaactgtccctacatccctggtatgaaacccacttaatcatggtggattatctttttgatatgttgttggattcagttagctagtattttgttaaggattttagcatctatgttcatcaaggatatcgggcagtagttttcttttttgcttatgtcctttcctgatttgggtattagggtgatgtcgccttcatagaatgaattagggagggttccctctttatctcatagaatagcgtcagaaggattggtaccaattcttctttgaatgtctggtagaattctgctgtgaatccatctggtcccagactttttttcgttggttttttttgagacggagtctcactctgtcgcccaggctggagtgcagtggcgtgatctcagcgcactgcaagctctacctctcttcacgccattctgcctcagcctcctgagtagctgggactactggtgcccaccaccatgcccagctaatcttttgtatttttagtagacagggtttcacggtgttagccaggatggtctcgatctcctaacctcatgatccgcccacctcagcctcccaaagcgctgggattacaggcgtgaggcaccacgcccggccttttgttggtaattttttaattcccatttcaatcttgctgcttattattggtctgttcagggtatctaattcttcctgatttaagctaggagggttgtatttttccaggaatttatccatctcttctaggttttctagcttgtgtaaaggtgtttgtagtagtcttgaatgatcttttgtgtctcagtggtgtcagttgtaatatgtcccgttttgtttcttaatgaggttatttggattttctctcttcttggttaatcttgctaacggtctatcaattttatttatcttttcaaagagccagcttttggtttcatgtatcttttgtatttgtttttgtttcaattacatttagttctgctttgatcttggttatttcctttcttctgctgggtttcggtttggtttgttcttgtttctctagttccttgaggtgtgaccttagaatgtcagtttgtgttctttcagtctttttgatgtaggcatttaggactatgacctttccttttagcactgcctttgctgcagcccagaggttttgataggttgtgtcattattgccattcagtttgaagaatttttaaatttccatcttgatttcatttttgatccaaggatcattcaggagcagcttatttaatttccatgtattggcatggttttgaaggttccttttggagttgatttccagtttattccactatggcctgagagagtgcttgatatgatttcaattttcttaaatttattaaggcttgttttctggcttatcacatggtctatcttggagaaagttccatgtgctgttgaatagaatgtgtaatctgcggttgttggatgaaatgctctgtatattatctgttaagttcatttgttccaaggcatagtttaaatccattttttctttgttgactttctgtcttgatgacctgtctagtgctgtcagtgtagtattgaagtcctccactattattgtgttgctgtctatctcatttcttaggtctattagtaattgttttataaatttgggagctccagtgttaggtgcataaatgtttaggattgtgatatttctcgttggacaaggccttttatcattatataatgtcctttgtctcttttaactgcttttgctttaaagtttgtttttgtctaatataaaaatagctacccctgcttggtgtccatttgcacaaactgcctttttccactcctttacttgatgtttatgtgagtccttatgtgttaggtgagtctcctgaaggcagcagatggttggtgagttcttatccattctgctattctgtatcttttaagtggaacatttatgccatttacattcgatgttagtattgagatttgaggtaccattgcattcattgtggtatttgttgcctgtgtaccttgttttttttgtttttgctttttaaattgtttttgttttataggtccttcatgatttatgcttttaagagattctgtttttgatgtgtttccaggatttgtttcaagatttagagctccttttcacagtttttttctttctttcttttttttttttttttttttttttgagacggagtttcgctttttcgcccaggctggagtgaagtggtgcaatctcgtctcactgcaccctccgcccccccaggttcaagcaattctcctgcctcagcctcccgagtagctgggattacaggcacccaccaccacgtccagctaatttttgtatttttagtagagacagggtttcaccatgttggccaggctagtctcaaactcctgacctcaggtgatccacccgcctcagcctcccaaagggctaggattacaggcatgagccactgcgcccagcctagcagttcttgtaatggtggtttggtagtagcagattctctcagcatttgtttgtctgagaaagactgtatctttccttcatatatgatgtttagtttcactgggtacaaaattcttggctgataattgctttgcatgaggaggcttaagatagggccctaatcccttctagcttgtagggtttctgcaaagaaatctgctgttaatcggataggttttcctttatagattacctggtgcttctgtctcacaactcttaagattctttcctttgtcttaactttagataacctgatgacagtgtgcctaggtgatgatctttttgtgatgaatttcccagatgctctttatgcttcttgtatttagatgcctaggtctctagcaaggccggggaaggtttcctcaattattcacccaaatatgttttccaaacttttagatttctcttattcctcaggaacaccgattattcttaggtttggctgtttaacataatcccagactttttggatgcttggttcataatttcttattcttttttctttgtgtttgttggattgggttaatttgaagaccttgtcttcaagctgtgaatttctttcttctatttgttcatttctattgctgggactttccagagcattttgcatttttgtaagtgtgtccagtgtttcctgaagttttgattgtttttctttatgctatttccttgaatgtttctcccttcacttctcgtattgttttttggatttccttgcgtcaggcttcgcttttctctggtgcctcgctgaattctttttcaggtaaatcagggatttcttattggtttgaatccattgctggtgagctagtgtgattttttttggaggtgttaaagagccttgttttgtcatattaccagagttggttttctggttccttcttatttgggtaggctctgtcagagaggcaaggtctagggctgaaggctgttgttcagattcttttgtcccacaggatgttcccttgatgtgatactctccccccttttcctatggatgtagcttcctatgagccgagctgcagtgattgttatctctcttctgggtctagccatccagccagtctgtctggctccggggtggtattcagggtttgtctgcacagagtcctgtgatgtgaatcgtttatgggtgtctcggccctgaataccacacagtatttggggtgtctcccaggtcctgcaggagcagtccacttccttcagagggtctgtgggtcctcttgggattcctggtttgttcttgcagttgttctggagctaaaattcatagtgcgagccccaacatgctgctttgtccgagttggagctgcaatctaatcctgcctcccatccgccatgatgatctaaatcctggtgcttatcttttctactgttgtttttgctttccctttttcttacttggaatcagttgtaagccaacacaggaaacagaaattcctcatgttcatttccccattgctatagcactgcaagcttatgacagaggagttccatgctcttgcctttgcagaagatcttagagatgctgaagaacagagagacgtccctaaatattttctttgaacctgaaatttttagtgactataatcataataagtattttgtgctttatggaattaactttcttacctccaagatcagatcagtagattgaatgtagttttcaatctataggtattctgcagagccttggggctccatggaagtgcttatggagggagatgggattagagtagtaatagtacctagtgctgagtagtaggtaagactctagggcccccacgttagtttcaacaagatctctattctcatccttatattagtgttccaagttaaatttcatttgaaagggggtttcattatgtaaatatacaaacatagacatacatctataaaaaaaaatgtgtacaaagttagttcggtccttcatatgaagcagtaactacacatacacacacaatagtgtatgtctgtactctccccagattataagctggagaagggatttatttatccagacaagctatctacatagaaattgcccttctgggtgactaatgggacccataattccttttagcctagaaatccatttctaacactaataactttcttttcctatcttaaaataggactcatcgctcagaggctacctatcctctcccccattcccaactacccaaaaagtttatatcatttacttaagcaagtcaaatttaatttcacacatatagatcatagttttcttactttgtgggggaagtgatatgtggaagcattaagagatatgttttttaaaatatgtctcattactttgtgtgtatttaatctgggtctataaacttggaaagggatgttatataatcatatagtcaggatattcttaagctggaatctgtggatacattataggtatgtatgactcctccagtccctaagatatgtagaatatcgtgttcatatctgttttttgtggggagagagtgagtccattgctttcatcagattttttaaggttttcaagactaagaaaacattaaggattacttatctcaccagttcttctacatctgggctaaatataagtacgctagaaaaataaacaaatgaggctgggcatagtagctcatgcctgcaatcccagcatttgggaggccaagatgggaggattgcttgagtccaggattttgagaccagcctgggcaacatggtgaaacctatcctctaccaaaaataaacaaaattaggcaggcatcgtggcatgtgcctgtagtcccagctgctcaggagtctgaggtgggaggatcgcttgagcctgagcggtcaaggcttcagtgagccaagatcataccgttgcactccagcctgggcaacaaagcaagaccttgtctcaaaaaaataaatgaataaaaataaaaaaaaaacaaatgaaacttggtatttttttaactgggatcaaacaaaaaagatagcaaattacagctattatttcagatagatcctttcagaggctccttgaactcaaatctattttcataattctaaggcattatttgccttttcactttcagtctctcatgagtgcataatggagtttcccagaggctacataacacgtactatcacaacagattgagcagagaagcagatatgagaatccagctgtctttttatgaaaccagacattaaagagatttgcaaaatgtaaaacaatgctggtctcttcttactaatttttaaaatttgaaaaacataactatttttcataaaagtatgttttttgtgttaaccatgtaaagggtctgtttttaatgaattaatatttttttgatttctcagttttaatttctcactttcatttaatttctcgttttatgagaaatgtagatagaagccaggtgtgatggctcacgcctgtaatcccaacactctgggaggccgaaacaagagaatcacttaagcctaagagttcaagcctagtcagggcaacacagtgagacccccatctctacaaaaaaatttaaaattagccacatatggtggcatgtgcctgtggtcccagctactcagaaggctgaggcaggaggatctcttgagcccaggagtttgaagttacagtaagctatgatagcaccactgtcctccagcctgggcagcagaatgagaccctgtctgaaaacaaaccaaaaaagaaatatagacagatataagataaacaagttctatggatctaatgtacagcttgagtggtaatggatgatgtgttaaataattcgactatggtagccaggtgcggtggctcacacctgtaatcccagcactttgggaggccgaggtgggcggatcatgaggtcaggagatcgagaccatcctggctaacacggtgaaaccctgcctctactaaaaatacaaaaaattagctgggtgtggtggcgggcacctgtagtcccagctaatcgggaggctgaggcaggagaatcgcctgaacccaagaggtggaggttgcagtgagccaagattgcaccactgcactccagcctggccaatagcgagacactgtctcaaaaaaaaaaaaaaattttgactatggtaatcattatacagtgtagacgtatttcaaatcaccatgttgtataccttgaatatattcaatctttggcaagtaatttttttttttttttttgagacagggtctggctctgtcacctccagactggagttcaatggcacaatctcagctcaccacaacctctgccgcctgagctcaagcaatcctcccatctcagcttcctaagtagctgggactacaggcgcatgccaccacgttcgttaatttttgtattttttgtagagacacagttttgccatgtttcccaggctggactcgaactcctgagcttgagtggtctgcccgccacagcctcccaaagtgctgggattacaggtgtgagccatcacgcctggcccaagtaaatatttttgaataaaaaaaatagatactattcacataaacaaaactctttgatattctcaataattttttaagagtattaaaggagtgtgaaaccaaaaagtttgaaaactgctattctgtaacaaatgacattttagaaatatgggtgcctctagaagttaaatcgggacggtgatgtgaatatgttgtctatatccttgtttctcaaagtatggcctaaggtacatctgcatcagtattacctgggagcttattaaaaatgcaggatcttgggcctcatcccagacttcctgaatcagaatcttcattttaacaagatctctggatgatttgtatacatattaatgtttgagaagctctaatctgtattacaccacactaacatttattttaatccagcatcgttcctaaaaggattaaagaaaactatataaataaatatcttcattatacatatgtactttataaaaatatatatagtttaatatgtaaatgcatgaacactaatagacatagttttttgaggctattattgatactgtcattgcaagcagttctttattttaaccatttggtcccactgttatcatatcataatatcagaacttcatgatacgagttcacagtcttgggtttgggtcatatatttaccaactttgtcatctcagataaaaattcaaactaatttccccatttgtaaattttacctataaaaatgaaataatgtatgttgaaaacatttgtaaactgaatgctaatgcatattagtctaagttttgctaggaattttacattaaacctgtatgcattattgcatagcctttaaagaaattccaatatatattttaaacagttcatttccctagagtttggtactaatggagttttatcccctagtgagtcaattacctttaattcattctatggctaacctacagcacaaactctagcagatttgtataggattatatgaatgggttggtatagatctatcctcagtatggcagaagaataacagcacagatctaataaaggtgagtcactttcagagctacagattttagactccccctagtggccatctggcaacaatcaaatttatacaaccatctttcaccttgctttctgtttgccttttgccactcttttttaagatctttagcaatctgaagaaaaaacaaaattctagtattagccattaccataaaatgtttttaggtgcttgttgtatttcaaaaaaattttttaaactattctgtctgttaaataaagttaacctaactgaggggtggacattaagaacctgaaagatagaaatcagagttataatacattgcaaactagaagagaagttaacagtacaagtgacagtaattatcacaatacttgatataattatgagggagaagcagactaacactaatttcacagtatttgcactagaccctttatttgtctattttaatccttcttcagccctggacttcatagatgaggaactcaagaatttagtaactgtcagacaatgagtacatggcaatagagttacactgccatgtagatgtgtactttttgactagaaagcctttagccaccattacatactgtcttaaaaaaacaagttaaattgcatggttttcatatcaaattttataatctgataagttatcaacatagtctaatgaattaaagaaagtaattttcattatggtgagaaaaatgcaattaagtgctttgtgtataaataggtattaaatattttgagattattttttgtcctctttttttttttttttttttttttttttttttttttttttgagacggaatgtcactctgccccccaggctgtagtgcagtggtgcgatcttggctgactgcaagatccacctcccgggttcacatcattctgctgcctcagcctcccaagtagctgggattacaggtgcccatcaccacacccatctaatttttatgtatttttagtagagacagggttttaccgtgttagctaggatggtctcaatctcctgacctggtgacccacccgcctcggcctcccaaagtgctgggattacaggtgtgaaccaccgcgcccggccttttcgtcctctctttcatgcacagttctcctttagttttccatcaatttggtatgtatttctatcaacttggggctgtttaatttaaatcagtaacgctaactattctgactagagaaatttaaaataagttgatctgaaagagtttaagaagaatttgagttgtgtaggagcatttatacacaaaatgttattttaaatttttactgttctggatttttcatcatatgaaaaacatttaatgaacatctccacacttttttccaccacttttctaggtctaattgtccaaaatgtggctctactggtgaatctggaaatgccaattacagatacaaactttccttaaaagttgcagaatcaaacaaattgtttgttattactgtatttggaagttgcttagatacattttttggtcttactgccactggtttgcacaggtaagaatacttaaaacatcctttttcctgactgcccttagaatttgaagatacaagtttataaggcaatatgcatttttgtagaaagataatcattcaaccccagattgtcaattcctttaaaagacaagcaagtaagaaagatgtttatttcctgaatacatattatgatgatattaaaacagtctccttttatttagggtaattaatctgtaattagaatattaagttataaatctctaatccaagttacagaaatagaggctaagaaagtaacatcatttcaaattgaagaattatccaaattgaggttagcattgaaacagttaggttcccctgaggcagaagaatctatttgagggaatatttgcatttcagaaattgaaattttattttttatctgtattgcaatttaatttgcatagtttgaccttttacgacattgtcctgagaatataagaataagcaattaaagcttttcttggccgggcgcggtagctcacgcctgtaatcccagcgctttgggaggccgaggcgggcggatcacaaggtcaggagatggagaccatcctggctaacacggtgaaaccccatctctactaaaaatacaaaaaattagctgggcatggtggtgggcgcctgtagtcccagctacgccgggaggctgaggcaggagaatggcatgaacccaggaggcagagcttgtagtgagccaagattgcaccactgcactccagcctgggagacagagcgagactctgtctcaaaaaaaaaaaaaaaagcttttcttccccctcagtcttctgccctcctcccctaatcacatgcaagaaatctatgtccacatttttgtgcttgagacaataaagggaccacaaccaggcttatcagagaaaagggatgactttttcctgctttcaagtgaagagctagagatgccaccactattcccactgccacttttatttttccttataatcattgccgggcctgatggttaggcaggtaactactttactcccacttgatcaattggttttgttgatttttctgtgctatgagaaactagagagaacaaactgcctggctcttaaagtcactttttttcctctataaaaggttcatgctgcattttcaaattaattgtgtctctgactttatggcaagtaaaatttcaaagttcattgcttcacattttttactttttttccaatcaaggtacattcaggatcctaataaaattccagaaacactggacaatgatacaactcagaatctattaactaaagcagttgaaacttgctttgttggacaaagctttatttttggagtgacggtaattgagactagctttctttttaataatctgttaacatttccattgtaatgaattatgtgaattttctaaatagttgttaggagttctgtacatgtgaaggcctgtagaaacactttaaactatgtaaaaatagcctataggtggtctgttaaaacaccatgtgtgacaacttcctctttcgaaagtcaggggagcctacttcaaatgctttcagagcttaaaaatataaatttattatatatttagaaatgttagatatttgtttttggtatttagtatttattttgccctccggattttgttcaaattctatagtaaaacttccaccaattctctagctttttaattctgtcttctataaaagagaataatggaacactgaaggcaaagtatcttgagtattgataagaatactaaaactagattaagaaagatggtcttaaatataaaagtgactgtagaagaagttaaaaaaaaaagaagttactcctttgactttgaaggagtaatagttttctgtctcatctatgctaaagggaacaaagagacatttttttccacactggaatcagggttttaaaagaggactccacaacagaagagtgagaaaaatccaaagggaaggtagaatcaacggctacagagctttacttgttaaaatcgtagacagtccttttctctcctctcttctttttcctcctcccctttttcccctcccctcccctcctctctttccttagctaaagagaactatgatagttgccatttattgagccactgctattttctaagcactgtgcagttttccattttattactaaacagtaatcctgcatttttatttttatttttattttataaaggagaagactcaggttaaataaattgtccaaagtctcaacactattaataaatgcgggaactaggatttcttcaaatcagtttaaacaagctctttactctaaggtttatattctcttacatatgctactttgcctataaaactaacagaatcgaaattggaattgggggatggaggtaatagttgtatctgttttaaccttttaaatctgtttattttattttatttttgagacagaatctcactctgtcacccaggctggactgcagtaccaagatcatggctcactgcagccttgacctccctaggctctggtgatctcccaccccagcctcctgagtagctgagactacaggcacacgccaccatgcccagctaatttttgtgggggtattttttttagaggagaggttttaccatgttgcccagtctggtctcaaactcttgaggctcaagtgatctgcctgcctcggcctctcaaagtgctgggattacaggcatgagccactgtgcctggctaaatttctgtttcatgtttaagtaaatggaagacaattttattcttacttaaatttctttgcttctttcacagaattttgaaaaccaacctggacaaggttcagatgccagtaacttcttacagcaatgctctgaccacaaaagaaaagccaaagcactagtggcttgccagattgttctaccagacccaggtattgcaggctttactgtcattgactacttccatcaacttttgcagacttttaatttcaggaaacttcagtgtgactctcaggcacctaacaatcacttacttgctttagatcactcaaatagtgatctcagcagcatatatacttctgacagcacttctgattttttcaagtcctgcagcaaggatactttttcaaaattctggcagccatcacttgaattcacttgcattgtttcacaactaacagataatgatgatttttcagcttcagaacaaagtaaggcctttggtactcttcagcagaacagaaagtccatctccattgcagaggccactggttccagtagctgccatgatcccattcaggattcatggagccttgtttcatatatggataaaaagagtacagcagaaaagttgggtaaagaacttggcttacaagctaaggagctgagtgcagttcacagcagtcatcatgaaattggagttaatgactctaatttattctctttggaaatgcgagagccccttgagtcaagtaatacaaaatccttccacagtgcagtggaaattaaaaataggtcccagcatgagctaccatgttttcagcatcatggtatagataccccaactagccttcagaagagatctgcatgttgtccaccttcgttactcagacttgaagagacagccagcagttcccaggatggtgaccctcaaatttgggatgatctgccattctctgaaagcctgaacaagtttctggcagttcttgaaagtgagattgctgtaacccaggcagatgtcagtagtaggaaacatcatgtagataatgacattgataaatttcatgcagaccacagcaggttatctgtgactccccagagaactactggagccctgcatacaccacctatagctttaagatcatcacaagtaatagtcaaagcaaactgtagcaaagatgacttccttttcaactgtaaaggaaatctaagtcctagtgttgaaaaggagtcacaaccagataacaaagtagaggctgtctctgtaaatcataatggaagagatatgtcagaatattttttaccgaatccttacctgtcagctctgtcttcatcttcaaaagatttagaaacaatagttactcttaagaagactatcagaatctcaccacacagggagagtgaccattctagtctaaataacaaatatttgaatggatgtggagaaatatcagtttcagaaatgaatgaaaagttgacaactctgtgttataggaagtataatgatgtctctgatctttgcaaattagaaaataaacaatattgtaggtggtccaagaaccaagatgacagttttacaatttgcaggaaacttacatatcctttagaaactctttgcaatagtccaaatagaagtacaaatacattgaaagaaatgccttggggacatatcaataacaacgtaacacagagctattctattggttatgaaggtagctatgatgcctctgctgatctctttgatgatattgctaaagaaatggacattgcaactgagattaccaaaaaatcacaggatattttgttaaaatggggaacatctttggcagaaagtcacccttcagagtctgatttttcactgagatcactttctgaagacttcatccagccttcacaaaaattatccttgcaaagcctatctgactctaggcattcaagaacatgctctccaacacctcattttcaatcagattcagaatataattttgaaaatagtcaagactttgttccatgttcacagtcaactccaatttcagggttccaccaaacaagaattcatgggataaacagagctttcaaaaaacctgtattttattcagatcttgatggtaactatgaaaaaataaggattttccctgaaaatgacaaacagcaagccagcccaagctgtccaaaaaatataaaaacacctagccagaaaatcagaagccctattgtatctggtgtttcacaaccagacgttttcaatcactacccttttgctgagtgccatgaaactgatagtgatgaatgggtccctcctaccacacaaaaaatatttccttcagatatgcttggattccaaggcataggtctagggaaatgccttgctgcctatcatttccctgatcaacaagagttaccaagaaagaaactgaaacatattagacaaggaaccaataaaggtttaattaagaagaaattaaagaatatgcttgcagcagttgttacgaaaaagaaaactcataaatataactgtaaaagttcaggctggatttccaaatgtccagacattcaagtcttagcagcacctcagctgcaccctattcttggacctgattcttgttcagaagtcaaatgttgccttccattttcagaaaaaggcccaccttcagtgtgtgaaactcgaagtgcttggtcacctgaattgttttcataaaaagtcacctgaacccaattcctgaacttttaaatctgtttggaaatgtttgccttcaggggtacggaaagcattctttacattttgaacacttggagagaagc

SEQ ID NO: 78 - DNA, 1646 bp, Homo sapiens
  source 1..1646: mol_type = other DNA
gagtgaaggagcaaaggggactcggccgccatgttaggagtactgggacgattccgcggagccgggcagaggttttaggggtgcgcaggagtcaagtggtggttcagtggggacggtgaggtggaggacgatctggtcggatagccgcgggcacgaacctgggaaccagagggtggaggccatgctggggactgatgtagggcgggaccgactggaagcggcatccagaggcccagtgagcctcggtctcagctcctgaaggggttgcatggggccctacgcttccttctccattttttagctaagagattgagagagtcggtttacttttgggcttggagtatcatttagatctgttaacagtacagttgagagagttggtgtcttttgttgaggtgcgaggacccgaggcggcgaccctcgcctttattcggagaagcccacttccacccacagagttggggtagtcctccgaaatgcatttttgttttgccgtttgttttccaaccccctttcactctccccaaagcttcagattcactgatttttcatacaggaatgattaacaaaggcgtccgaagaaatcgttgttggaaggtgaccaaggtggaaagagacgttgctttggccctgcaagtaagaagagagagggaatagcctgaaggagtaacactaaatttaaaatgacacttttttaccaaccagcgaaagcagatgttcaaaggggatattggccaggtgcggtcgctcacgcctttaatcccagcactttgggggcagacgcggggagatagcgtgattctaggagttcaaccccagcctgggcaacatgcggagaccccgtaccgtctctacaaaaacattaaacaaaaaaattagctgggcatggtggtgtacccctgtagttgcagctacactagaggctgaggtgggaggatcgcttgagcccgggatgttgaggctgcagtgagcctcgatcctaccactgtgctccagcctgggcgacagcaagcccgtgtctcagaaaaggcgggaggggtgggatattattgatgataggccttctgacgtctggcaatagattccagagtaacatcggtcatggataaattttttttttaactaagtgactgaaaccaaagttaattgtcttttgagtgattttgcacagtatctcaaaatgaactgtactttttttcttgtgtcactgaaacagtgctgtgtgttctttttcagagtctgtcacactaagatgagaaatgtcctttcttcctgaaggtgtctgatgtgtaaaaatatgatatactttgtgctgtttcctcccttcccttttgcatattattctgaaacaacattaactagttactttgcgtcattgaaggtatgcacttcccctctatgttaggagtgaataaaattaaaaatagatccttataacaaagaaaggcagatagaatgattaaaaatgaccaaaacatgttagaaacagtctctcaggtgtatgcagatggtaattacaaaaatactttttcaaaaaatgatcttctgtgtcatgtttctgggaacaagtcaagatgaatgagtttgatttttaagcagaagtagtatgtgttggtgtcatccatgaatacaacaatgaaaaaggc

SEQ ID NO: 79 - DNA, 352 bp, Homo sapiens
  source 1..352: mol_type = other DNA
tttctgagatctgcttttagtgaagtggatcaatgatgaaactagccaaatctgagcatcagaagtctttccagtctacctgatgcatgatctctacagttctgagaagcaaaactataaaacaatgtaaaacaataagggcatatgtctggtgtgtgtgtgtgtgtgtgtgtgtgtgtgtgtgtgtacgcacatgtgtttataaagataacagctgtaggaatgaatgagattgagggtgggggggtgcgtatgtatgtctatgaaagcctaatcatttctgggcaatgatgaaaaggttttactactgatctttgtaactatgatggtttctacacttgacctgagctca

SEQ ID NO: 80 - DNA, 5607 bp, Homo sapiens
  source 1..5607: mol_type = other DNA
gatttcggcctgactattacttgggccacggaaatagccaacccttttcttccgcacggttggaggaggtcggctggttatcgggagttggagggctgaggtcgggagggtggtgtgtacagagctctaggacaccaggccagtcgcgggttttgggccgaggcctgggttacaagcagcaagtgcgcggttggggccactgcgaggccgttttaggtaggttgctaagagggcgaggccgtccgggcctggcgggcgggggaggcgttgcatatctggggtttcccggggccccttcgttggtccggaggatcgagactccgaagtcggtccgagagggtgaagggatcacggccgcaggccactccgcgccacgcggctggtatgagtcccacacaaacgtggttgtagtgtggacgggcttcattatatcttgagatggaggtgttaaatcgtgttgcggacaagtttaaccttattacgtgatttaaatgatttaaccttcgtatgtgaggtacccattactcgcgccggttttctgcaggttaggcgctgccgggtgagaggcgctggtggtcacagcgttagctccgggtaaagcgccgctctctgcccacgtggcctctaagaattgcagaatccccacggaggcatcgacacccaagtaggagtgtcttctaaacacttcgaaaaagtgattattgagctagctttattttgataatccctacttttaaaaaaaattaactacaggtataccgttaaagcatgggggcaaatttttgttgaattccgtttttgagcattcgatatttaatgactttgtagaatcttgtacttaaaaaaactagtaagaccttgtaccaggaaaataccacagggggcatttaacaaatctgagctcttggtgaccttatcgtttcatattttaaatattttgctagttcatcctaggatttatatgtaatgactcatgtcaggtcccaagaagctacagaatgagacaagagattgactaaggcatgtacaataatgaaataagtagttatctttaatttttgttgccatgcctttttttttttttttttttttttttttttttttcctgagacagggtcttgctctgtcgtccaggctggagtgcagtggtgcaatctcggctaacagcaacctccaccgcggcttaagcgatcctcccgagtggctgggagcaaaggcacgggccaacacacctagccagtattttaagaattttttgtagagacaagggtctccttgtgttgctgaggctcactacatacaagctccacctcccaggctcaggtattccacctaccccagcctcctgaccacaggcgcgcgccactattctggctaatttccgtattttttgtagagacggagtttcaccacgttgcccaggttggtcttgagctcctgggctcaagcgatccgcccgcctcgacctcccaaagtgctgtgttacacaggcctgagccacccagaccaacctgtttttcttttttcttttagctcacaagaaggaatctttttctttttttttttttttttttttggtatgttgtatactctctaccatggggatgaagacacaagaattatgatagttcattgaaaaaggttgagaattcagaacttgtcagtttccaccaataatggcaaagatacaatatgacaaagttcagttgcttaaatgaatctaggaatgaagaatctaggaattataatggagaggtgattaggagtttaaaatggtttattgattggagatccttttcctggtttatatagggcacactttgctttaggaattccccctttgatcttggaaaacggcttttaattgtacattaatactgtattggtaattgtacgttaaaatatgtggctaatgataaaactacattttttacttatattgaaagatgcttttgttggaagggacggtacttttttggaatcttgttgcgttgaatacatttagagggtaacaactgaaagaacctgtgaatagaatttctggatttctttttaaagaaactgatctgaaatggataagaagcttaaccttggtaaatgatttcgcctgaaatcattggcatagtctgaccacgttcaacactgtagtagatactgtcaatatttagggaagctttgtcatatttactaaatttcataatttcagaaaactgtttaaaacaaagagcaattgatggataaatcaggaatagattctcttgaccatgtgacatctgatgctgtggaacttgcaaatcgaaggtgagtggattcaatcatgtttattgtatctgaattatgagaaactattgtatataatgagtgacagtaaagataattttcaggaattgggaaagaaggaaaactagatttcactgaccttccaagtttatctagttacatagattgatataatagcattgcaaatactttaaattcaaaatgtgaatatattatgggacacattcgtcgagaaaaaatgtattctttgggtcatattagcatctcttccagactacatcctccggttcggtaggctgtgtttgttttactcagacactcttagcagtgaaccgaaccatacagccttttggagctcatacattgtcttgaaagatacagtttttttgtaagctgagcatagtggtgcatgccattagtcctagctagctacttgggaggctgaggcaggagcatccctggagtttccaggagtttgaggttgcagtgagctgtgattgcaccactgcactccagtctgggtgacagcaagacgatgtctacaaaactctttaataagagctgtagcattatgggctatttaaataggatgatcagtagaaaggctagctggttctgagcccatcctttaaaaaatttttaattctgggcatgttttctgagttggtcttggaagaaatgtacatttaggactgggtattaatggtaataagcagtaagaaaagaagatgaaattaatttttttcccatttttctagtgataactcttctgatagcagcttatttaaaactcagtgtatcccttactcacctaaaggggagaaaagaaaccccattcgaaaatttgttcgtacacctgaaagtgttcacgcaagtgattcatcaagtgactcatcttttgaaccaataccattgactataaaagctatttttgaaagattcaagaacaggaaaaagagatataaaaaaaagaaaaagaggaggtaccagccaacaggaagaccacggggaagaccagaaggaaggagaaatcctatatactcactaatagataagaagaaacaatttagaagcagaggatctggcttcccatttttagaatcagagaatgaaaaaaacgcaccttggagaaaaattttaacgtttgaggtgagtcagcattttacatacatggctacacataactcaagatgcccaaaatgatttgttggccaatttagaattgtctcagatatactgggaacagactgtctgcaattttgatactcttctatactgacttacccctaaagtccaccctatccttcaactgaatcttgacttgtatctcttaatataactacactttgccatatttaaaagatagtgctccaaggctctttgtataaaatcctttgatcttatcccatctcaggtctttaaacacaaccctaaaactcagtggggataataaaagctcacataacttgaaattacttttgcagtaacctaaactaaaaccacacatgccttatgttcagtggatatattcttaaggcctagatgtttctaagccaattatctgaaaaatacgctaatacttaggagtagacttttttaaatatttgagagttgtatgttgaatgaattcagaattaatttatgatcccttgccagaacctgaaattttatttgggaggattaatacatgttaatctcttcagttaatctcttaagtttaaggtgattatagtaaacattagaaatcttattcctgtttttacattttaaaatgcctttagtaagtcccagacatgacaagatatgtacttcacttttccatgttaccagcttaggtaaattcataattgtaatgtgaattttaataatcagcatttgataagtccacaagtggggagtagttaagatagcaaattcagagtctttgctaagggggggcattgccctttttgaacataggcacctgctgggtcttaaaaataaaatctcgacatacttatggtgtttttaatatatagcaagctgttgcaagaggattttttaactatattgaaaaactgaagtatgaacaccacctgaaagaatcattgaagcaaatgaatgttggtgaagatttagaaaatgaagattttgacagtcgtagatacaaatttttggatgatgatggatccatttctcctattgaggagtcaacgtaagtggaatcatatgaaatactttggtaataggttataaattaaatttctatgttaattgcttcatattttgcctttaatatagttatacttaaataatgaacaaagatacagagtatgacaattgggattattacagttgagccaagcttggcacaccgttcatctagaattctccagaacacaaaattctcaaattttgtgtttcctttgactagtattgcagtttcagttatatttcagagtggaatatacaactaattaggtcatcgaagattctgtcatctcgatgataaattttaatattacagagcagaggatgaggatgcaacacatcttgaagataacgaatgtgatatcaaattggcagtaagtgacttatttttttcctattccattttgggaaggcaggagttggttgatacagaaggaattatatttagtttttctcttacacttcatttaacttttgaaaagctctataagtttactgcaggaaatgcaagaaggaaaataattttttagagacttgataaagaacatggggttttcagtactatttttaataagtagcattctgatacatattattgctagttaggatgtcaaatgaaaaaataagcaatgttaatttggatttttaacatctacatgtagtctctaggttatctgaagtaatccagggcattcagctatatgtaattactaaactatttgagttattgcttaatccatgattttttgtttgttttatgcagggggatagtttcatagtaagttctgaattccctgtaagactgagtgtatacttagaagaagaggatattactgaagaagctgctttgtctaaaaagagagctacaaaagccaaaaatactggacagagaggcctgaaaatgtgacaggatcatgaatgtcaaaggtgaagcatatagaaaaaacgacttcatagaaatgaataaagataaatgtggatatatgtaccagtctggtggtgaagaaattctgaaacccagaactttataacaagaaaaaaaatttttaaccctgtgaagaagtttgtgaaagaaacttgtgaagtagtaataattagaaaaaaaaccattaaaacaccagagaaaatacatagaaa

SEQ ID NO: 81 - DNA, 32742 bp, Homo sapiens
  source 1..32742: mol_type = other DNA
cagcagagaggagttgagggcgatgagagcgggtactgcgaactgccgggcgatgctgtcgctgccgccgtgatacggagagcaacagttccccagcaacacccctccccgacacaggcacacaccccccgacaggcacgcacacccaccccacagtgcccggctcggctgcggtgagtgaggggccgggaagaggcgcaccgcccagcgagcgccgcgcgccggggcttcccggggctggagaggtctggggggcgcgcgctcgcttcggccactcggccgctgggcttgtgccttttttatttggcgtgttcccttcctgccgctgcagccgtcgccgccaccggttgggggtcggctagaagggggagccccggctgtcagcctgggcgcagctgcctccccagcccttcctcttcagggcacggtcggggtgagaggtggggggcgtagcggtgtgcgggggctgagggcgtgagcagaggggtcggggatccggaggctttgtaccgccaggggctggcggagcaacagagcccgtgggtgctcttatgtatgcggaccggtgcgcgggcgcaagataaggttgtggtttatttatttgtgtgtttattcgccggccggctgggaagctagaatcggaggagctgacgagtagatctgggggcggaggggagcaggactgggactgcttacgttttgtttctctttgagaaaacgtggtgggctttttcttgattggacttgatccccaccccccttttgcaggggagggagggaagctccagagggtctgcagcgctgcgggccctcctcggctctcggcgggaccggcggtgacaccggagctcgccgtgcgctcccggccgctctcggtgggtgccggtctctgcacctgatgcgttcgggatgcctttcccaccctggcgcgcccgccgctagctcgcacagcgcctcgcacactcccgcacgcgcttgaaatgcgcacggtcccgccggcccgcggaaccacccggacgcacggagcgctccgcaccgactcgctcgccgcctccccgagacgctcgcaccgtgcttgggccgggcgcgctggccgctggcgccgctggccagaggcctgggacccagccggtcgctcccagggggtcacggccctgggtcggagagggagggcgggcagaccccttctcgcctttcctcccacaactcgctgcggggcttttgtgcttccccttcgccgcggggcgggtccgcctcccctgccgctctcgccgcggagtccagcccgcccggactgtcgccgttcctccccgtctctttcgctttccctcgtccctagctcagctctccttctttcaggagtctagctcctcgggaaaagttgcttccccaagtttgctgaagtcgtctccaagtctcggtgggggtcgctgggaactgggggggtgtgagagcgcggtcgatccccggagctcgggcgggttatcgccggctcttccccgcgccgcctggctggacgctgcagccagcgccagccggatcgcgggcgccgagcggcgggtgggggagacggctgcccgtgggcgcccagatttccctcaggacccaaaaggcttgtttcagggcgccaagcttccattcttttggctgttccctcctagttctcagaaaccccgatgtctgcgggaaagcacgcggtggctcggctcggctgaatgctcatcccaaccttgacggcctccgtccccaccccggggcgggcagcaaaaatgtcttgaccagccgtcctgtgaatcctttctgcgtgagcttggtggctcctgaactgatagagctccttctgggggtggaggcaagcaagcagtgttcgaagagtgagggagagaccttgctgttccttgctctcagtgcattcactgcaatattggtcgctgtaagacagacacggggagggtcctgggcctgcgcggtctttctaacactcctgtaagcgaggtttggagtctaggagccctcttattgatcccgaacaggctctgggagaggcctttgtttcccagccctgtcttcccttcgtactggttgtaactcacaccacaggtgctggtgccaatatcacttccagcgcctctgagccatgtccagcatcccttgctgcccctggtcacaggacttgcagactccttggagcctgtgggacacacgtggagttcacacacccagcccagcatgagcactcctggctgtaggggaccatatttaactatggtctctctccataccttaatgacccatccttcttcgttttttagatcctcctgtccaccgggcagttgtgggcaggagggtaggtacgacaccttacgtaagtgtgtgtgtgtaaacacacacacacttttttttttttttctgagacggagttttgctcctgttgcccaggctggagtgcagtggcacaatctcggctcacggcaacctccgcctcccggtttcaagtgattctcctgcctcagcctcccgagtagctgggattacaggcgggtgccaccgcgcctggctaattttgtattttttgtagagacggggcttctccatgttggtcaggctggtctcgaactcccgacctcaggtgatccgcctgcctgggcctcccaaagtgctgggattagaggcgtgagccaccgcgccctgccccacacactctttctgtctgtctctggctggtgtacatacacacagttcagattttatattatacatacaataactttgaggcttccgtgggtagaaatgacccaagttagtgtgtgggttgtgtgtgttcctgttagtacctagggatggggacaggccttgggtctgccagtgctttgcagccctgagaacagtagaaggccagaggccaaggctgatggtgagaggatagcctttgcggaggagagcccagtgtccatagatttctgtggccatggctacaggctcctggcctccaatgagtttgactctgcttctggggctcctgtagtgaggcagagtttggaaaaactgtttaaagataaggcttgacatccagggggctggcgtgaagctgacaaggaaggggctaaagtcttgctaattttaagtaagtgcacttcatcataatgaatgttggccttgcctagggagcccctactctcagacacagagaaagctgaggacttataggacttcactacaattttcatttcacttcatctaacagatgtcatagagtagtgaattaggcatctgctgtggcagaaccttctttttactctcagcatccctggcttgaaaggcagatttgtagatttctaggaagctacttcaattaaaatctctaagatcctcttgctaagggcttggcaacagggaggagggggcatgttgtagtggttgaattcttacttttagggacactgatgaatttgtcttttgttctctcatctcttttgcttcttcccctcttctttctcctagcctcctctattggcccaggaagcccacccagccccgccacgcagagcccagaaggaaagaaagcctcatgcctgagccgaggggagcaccatggatctgacaaaaatgggcatgatccagctgcagaaccctagccaccccacggggctactgtgcaaggccaaccagatgcggctggccgggactttgtgcgatgtggtcatcatggtggacagccaggagttccacgcccaccggacggtgctggcctgcaccagcaagatgtttgagatcctcttccaccgcaatagtcaacactatactttggacttcctctcgccaaagaccttccagcagattctggagtatgcatatacagccacgctgcaagccaaggcggaggacctggatgacctgctgtatgcggccgagatcctggagatcgagtacctggaggaacagtgcctgaagatgctggagaccatccaggcctcagacgacaatgacacggaggccaccatggccgatggcggggccgaggaagaagaggaccgcaaggctcggtacctcaagaacatcttcatctcgaagcattccagcgaggagagtgggtatgccagtgtggctggacagagcctccctgggcccatggtggaccagagcccttcagtctccacttcatttggtctttcagccatgagtcccaccaaggctgcagtggacagtttgatgaccataggacagtctctcctgcagggaactcttcagccacctgcagggcccgaggagccaactctggctgggggtgggcggcaccctggggtggctgaggtgaagacggagatgatgcaggtggatgaggtgcccagccaggacagccctggggcagccgagtccagcatctcaggagggatgggggacaaggttgaggaaagaggcaaagaggggcctgggaccccgactcgaagcagcgtcatcaccagtgctagggagctacactatgggcgagaggagagtgccgagcaggtgccacccccagctgaggctggccaggcccccactggccgacctgagcacccagcacccccgcctgagaagcatctgggcatctactccgtgttgcccaaccacaaggctgacgctgtattgagcatgccgtcttccgtgacctctggcctccacgtgcagcctgccctggctgtctccatggacttcagcacctatggggggctgctgccccagggcttcatccagagggagctgttcagcaagctgggggagctggctgtgggcatgaagtcagagagccggaccatcggagagcagtgcagcgtgtgtggggtcgagcttcctgataacgaggctgtggagcagcacaggtaggccccgctccagccccgcacctgatgtaggacttgaggccctcacacccctccttcacaccctggctgctcccaagttaggggcctggctcccctgtcttggcaatttgtgaaaaaaccagaacacttcttctaaagttctggcggggaggggagcaggttttttaaagtgtagtgagggggcctaggatctttccaaaaagcaccaggggacactcatgggcgcagcttcttaataggcccttccctttgttttttgcttttgggcccctgtttgttttttcggctgtttggtctgttctcctttgcttggagtgactgataaaatggagagaaggagaaaaggagtgggatgagggtctcttgggccctgcatctgaccatgttactaggtttcaggtcctcgggttcccatgcagtggtccctgtgaagacagcctgtccctttctgcagcttgggagaatgggagggtctgggggctgcttaagccacaagagcagctgcaggttctgaaccttattcctggtgaaagttaatctccttgctctgtctcccttctcattctctgatcctgcacatgcatttagggggaattgatttaaatgcaaggggaaaggatgggtataagagtcttggtcttgcagcctgtgaagtctcattcttatcccatctctgctcacactgaactaaatgccgcttcaggctagcattggcttccctccggcttccgtttccttctctatgaaataaccattcattgagctcttatgacatgtttggttcagtactaagcactttccatgagttgcattttcattacaacagccctttgagataggtaatgtccttcttttttttttggatgtgaagtttcgctctccttgcccaggctggagtgcaatggtgtgatctctgctcaccgcaacctctgcatcccgggttaaggtgattctcctgcctcagcctcccgagtagctcggattacaggcacgcaccaccatacctggctaattttgaatttttagtagagacgggctttcaccgtgttggtcaggatggtctcgaactcccgacctcaggtgatcggcctgcttcggcctcccaaagtgctggattacaggtatgagccaccgtgtccagctggtaatgtccttcttttacatggaacaatactaaggctcagatgtcaagtctcttttctagggtcacatagatagtaagaggcagagctggattcaaatttaggtccttaccccctggtactttgctgcctcttggagtcacttagacttgaagaggatcatgtctatggaacagagcgttttgaagattgcttataggaagtggagtaaataacaggggggataagtagcgagtttgttttttttttccttgcttctgtcataaaccacgtgcccatcattttatcctctagtttctgggtcagatgaatggagtcaagaaatccagctttctgttgtcattgacgacagcatttggctgcataccctgtggtctgctgttttgctgatcttgggtggattctccacttcctcccccttcacccccattcccctgttgctcgttcaggtacgggggatgtgagtgagaggggttggggtggggatatctggaagttgatctcatcacccctagccggaatctgctctgaccctgcctcctcgacagctcagaggcttaacttgtggaaagtgtggcagagctaaacgtagccgactttttccagtgggtgcgaaaaataaccgccactaaggtgtgtcttcttgatgcttgtaccgctcagaaatagactgaggttgtgtttgtttttgctcaaactttcctaaagaggaaacccgctccccaaagttgaccagatagatgtatcatctttccggatgtgaattatttcggctgtgtgctatgagaactgggtatggtgggaagtaattgtttttctggctctcatcaggtcctggttcctggttgcttttctttacccgagagggccacaaaagataccactctcctgagacttccaagttccccttcagcaagaccctcattcctctggggagagagggagagttggccatgttatattcgaaagagcctgggtattggaattggccatatttagtggtgagagcctgtgatacttatttaacctttctgggccttgtttcactcactacatttttttttttttttttttttgagacggagtctcgctctgtcaccgggctggagtgcaatggcgtgatctcagctcactgcagtctccacctcccgggttcaagcgattctcctgcctcagcctcctgagtagctgggactacaggcacctgtcaccccgcccagctaattttttgtatttttagtagagacagggtttcaccatgttggccagaatggtctcgatctcttgaccttgcgatccatccacctcggcctcccaaagtgctgggattacagctgtgagccaccccgcccggccttcactcacttcttaaaatggagacggtcaacagggttggtgctgaattaatgaagtaagatccagaaatcactagagctgtgatgggcacatagtcaccgcagcggtggagaactgaccatctgtcccttgtgttgtttaggcctcatctctgcatggtcctcattggctctgagttctagtgtgtagtgtccacagtgccaccctccatgagggttgtgttgactgtgaggtggtgcagagaatgtccctgtccttgtgagcatatgacagcaagacactggccctggaatcctccgtgtcacatgtgggctgctgacaggaagaatgtgcttttgttgttgttgttgttgttgaggcagagtcttactctgtcgcccaggctgcagtgcagtggcatgatcttggctcactgcaacctctacttcccgggttcaagtgattctcctgcctcagcctcctgagcagctgggactacagatgtgtaccaccatgcccgactaatttttgtatttttagtagagatggggtttcaccatgttggtcaggctggcctggaactcctggccttaagtgatccacctgtctcggcctcccatagtgctgggattataggtgtgtgccaccctgctgggccgagaatgtgcttttgactgagggtggaaagtcagcagctgcagcccaagaagttagagccaggggcagtgcctttgatgggaagcttgggggtctaaagaaatcagaaaggggagaaaataatcctgcgtgtgctcagccctcactcagatcaacagcccctcgggtcccagctagatgtactttgtagaaggctttttttctccccctcaccctcaaaactccaggattaatgtgctattcccttttttctactgttctctgtctccccccaacccatcagcagtctgagaaatgctatggtggaaaaaaaaaaacaacagccctataaccagtacaaacaaaaagccaagacaaaaaaaaaaaaaaaatcagaaggggagattttgaggccaggaagccatggcattcactggaaatatatcagtgataaaataacaggctacagggtttattttattttatttttaagtcaataggcctgagtgttggtaaagactagatacccagcagtccttcttgcatttcttcttggggtgggggggcagaagggaatggagaggaaatgaaggcggattgctggtaagtgaggcaggaaggcagggagtttattatggaatgtcatcggtaagtttccccatgatttgatcccaagctggtgtggagtgaagggtaagctgttggctcaacagatagtgagaatcaaacttagtggagttgtagagcctgtttcctgcagcggacagcaagatgtacaagccgtccactgcaggaatgacgtgctgtaaaagggatgcagtgtcaagtgtagtcatggatgggtgggaagaccagacaaaggcatccaatgggactgacttacctaaacaaaccagaaggaagtcagaacagtgggaagatctgatagataagcagtattctgcaggcagatgaaggagcaagctttgggcccccaaatcttcaccagtgcatccacattacagaggataatgcctgagggaggggaagatcatctcaggattctggaacactgggccctccctttcttattccaaaaggctggagcagttctgcatgtaggcttctctggaaatggtctaggaaccagctcatccaggccaggagcacctgatcattctcagagttacgtacatatgcgataagattgcagggaacagtatagttctatagacttaagtgtgaacatagtcctcatttatagtccctagtctcccatggctcacgcagcttggtctttatgtgtttctgaatttagtgctgcagaggcacaatggggtctggtttctggatcttatacagacaagcacttaggtcagctgcagtggatgtcctgcacagacaccgtcgcaactcttgcctggttcctttttgtttttggagatggagtctcgctctgtctcccaggctggagtgcagtggcgcgatctcagctcactgcaagctctgcctcccaggttcacgctattctcctgcctcagcctcccaagtagttgggactacaggcacccgccaccacgcccggctaattttttgtatttttagtagagacagggtttcaccgtgttagccagtatggtctcgatctcctgaactcgtgatccacctgcctcggcctcccaaagtgctgggattacaggtgtgagccaccacgcccggcctattgcctggttcttgaagggattctcaggaaccacagggaatgtctgagccagctttctggatccgtgtgtacagcccttcccagaggctttgtggagccagctgtacggtgcatgagctttgtggctaagatatcagagttctgcctggcccttggccttggtctctctcagatggtcagctgctctgtttttagtggttgatcatgtagaaggccaacaggtgttgaccttggtttaggctacttttgggatttttgaggtttcctgagactcttggttttctttcatcatcccgtccagaacctctgatgtcaaactaaattctgtttggaaaagggtatgctgtagaataatgatagccacagcaatgatattaataataccttttatcggttgcagcattttcttctttgcaaagcacctctaatgactttatctctcttgccctcacagccttccttgagtgggtacaggtccataatcccatatctgtgataatgaagtctgaaaagctctgaaaactaaaaagtttgcagtaaactcatttagtggcaaaacctgatctgaactgatgtgaggctatatttatcctgcttagtttgaatattcatatgttttgctgcaaaaatattaatgtgtttgattacagagtgctgccctagactctgctggggctgttaaacacgataggtgtcagagtacctttctttttttttttttttttttttttttgagacggagtctcgctctgtcgcccaggtcggactgcggactgcagtggcgcaatctcggctcactgcaagctccgcttcccgggttcacgccattctcctgcctcagcctcccgagtagctgggactacaggcgcccgccaccgcgcccggctaattttttgtatttttagtagagacggggtttcaccttgttagccaggatggtctcgatctcctgacctcatgatccacccgcctcggcctcccaaagtgctgggattacaggcgtgagccaccgcgcccggcccagagtacctttctaaagtctgaacagttttggtcgttgaagcacctgaaggttttggataagggattatgaacgattatcattctctattgacaaatgaggaaaatgagatttggagcaagtaagtgacttcccatggtcacacagctataaatgggtagaaccaggcactcagcttgccttctaattcacagtcctgggcgctctgcaccaggccatataagaacatgagcattgctcttctgggtcaaatccatctgacctagtctttggttgccatcaccatgcctaagataccaccattggaggctacaaccatcttccttgacgtcaatcctaaaggtcaggtgtagcttctcttagtagctatttatggctgccttgtcattcacagatttgccaaaatcctttttgaatccatttccatttccaggaagtatcctttttaggggtgatgaatgacaagtttataatctcctgggctcctggaaatctggtcttttggagagaggttgttggttgtgaagataggaagatggcagaaggctttgtagtggtgaggccaggtctagacctagctctgcgtttttcagctctgtcaccattgacatcgtttttttcatcgtgagccttaacttcttcatttttaaaactaggcacttcagtgagctctttctggattgttgcgctctttaaaaaattcttttattctttgtgtacccacttatatcttcatgaagtccttttggttaattgaattttgctgttttggaatctggattggcagttcagccagttaagtagggggtcagtttgatttgattctgtgtgttctgactttttttttttttttaaaatactttaacctgcttagggttactgagccatctgggatctagactgaactcttggaacttttgaagatgatttcctttattttattttcaatggaggaaagttgcccactctttcatctcagtgagaagtcccattttaatttgccatcactattggatggagccgctaattgctgggagggagaaagctatagtttagcaacacgttttcctcctgctcgttctaggaaaactattatgaatctttaaaatagtgattatcctaaactgttaaaatcaaattctattcacagctctttgatttcttgctaattcaggagagaaacttttccaatcactttaattttttttattaatttaaagcaagccctgctgaaagcccaagtatatatgacttagagtcttactaaatgaatacaggtgtgcctcagtttgtccattggagggtttctgaattttccataactaaagattttctattctgttttggctgggtgtgtggggtgaaagctcttactctctggcagttatttaagtagtaagaaatttgctacaactcttccccacccccacgttttacagataggaaatgagcactttgactgtccaggtcagacttctgattttgctacttactaactgtgacagtggttgtgttacttaacttctgtgtgcctgtttgctcatttgtgaaacagaaataatagtagtacctacttcattgggttgttataaggattcatcagaaaatatttatcctgtgtgaggaacggtggcacaaagtaagtgctccataagtgtttgctagggtatttttcttgtcattgtgtgaagtaggtcatgctagccatgcagggtgaaaaatgtgttcatgttggtccagatcctgctttctccctgagaccgttcttccgcataggcgtcaatccgtacagtgctgtaaaactgctgcctcgggcacctcatgtttggggctgagacattgcttctgcgtcttccccagaagctgatctcttgtactgtggtggccagggtactctttgtcccattgacctgaggcctggtgagtcattccagttctcgtttaaatttagccgggcagcgctccactgccatcgggtccaaatgccggggaggctcactgatgcggtgtcctgttgcctgtgcacgtggccaggcgtgcacatcactgtgcttatgagagagatgaagagcacagataccaccttactgatgggggtcctggggctgggcttgtgggtgttgggggttccagagctccttccctttcctgcctgtcagtgcaggatgcttctaaaatgtggactcagcagacattgttttgagtgcttgctacatgtcagattctgtgctaagtgcactcacagccagcatctctgtaagacctctagctgtcctgtaaggtgggtatcagtttcacattctcagatgggcggagagaagcccaagaggttagtggacttttctctagtaaagagttgtacaggccgggcgcagtggctcatgcctgtaatcccagcactttgggaggccgaggcgggcggatcacgaggtcaggagatcgagaccatcctggctaacacagtgaaaccccgtctctactaaaaatacaaaaaattagccgggcgtggtggggggcgcctgtagtcccagctactcgggaggctgaggcaggagaatggcgtgaacccgggaggcagagcttgcagtgagccgagatcatgccactcactacactccagcctgggcaaaggagtgagactgtctcaaaaaaaaaaaaaaaaaaaaaagagttgtaccaggatttatgttcaggtcttctggctccatgctctctgcagctgggtgaccagggggctcatggcttcaccagctctggcctcctcagttcctctggtggcttcttgcgaggaggaaggttactgcagagggttcagctctttaggggcccaggccgcatggatccaaggactagtacgtcatctcttaccaacacagagagatcagcttctagtgatagaggccttttatgctgacttgaaaaacagaaaaagagagaaaaaagaaacccatttacaaaaataaaaatcccatgctgttaatttcatgccagcataatcagaaattcccctttctactgtttccccttaaaagccccggtgtccttattatgctggtgcagtctggaaaaactatggttgggttttgcctacgtgaggcttatctctgcagctgcaaggaggggatccggtactttattgtcagcatggaaacttccgctaaatacttagaaaaaccttaattctaaattcctagctcactttcaactgtgtcctcgggacctgattttcttcggtgtgaacagattgtgttcagcattgcagtagaaagggtccaagttaggtaagagaaaggacttcctgagacactggggtgttactgagaaagttgttagaagactgtcacagacattttgatgaaggggggacattctgggccatttgaagtggtttttagagttctttcctctttagggccattcggttcccccagaaataagaagaaaagacatatacacgcacataaaccaccaccaccaggcttgctgagaacaagtcaaatgtgccaccaaaccatcgtcttagtgggagatggggtggcactgcaggggcagaaagactgacgtctgatggacttgggtttgaatactagtgctccatggtgaatttgggcaaatgacttcacctctgtgaagcagcagtatcctcttctgtgaagtgaggttagcccctacctctcaatgtggtttttaaagtatgttaatgagatcacttgtaacctaaagcacacagagtgtgaggccacctccctacttcctgcttctctcatgaccccagcctgacaagggagccgctgagccccctgccaccctcacccggcgttgtgctctaagtggattagctcagcgttgtgatcttaatgccattaggcctgttggcacggctctccttgccatagtgagaagcagatgtggccgaccataatggcccttagcgtgatccatcgggcccacagtgctggggcaaccattattagtgttaatttgggggagctttttatggtagctgggggaaatgtggagggattgttggaaatttatttaagctgttcagcaggttaggtgctgctggggtctactatggcaaaaccctcagctcccccaacccatctctttaaggaacgtccctccccaacaccgaagcccaggcctgattacttccagagttggagagacaacttagcaggctcttgtttcttgccgatgtaccttattagtagcacctggcatcataacccactaatgggaaccagtgctctcctcctgcgtggccagtgacaagtagccctgtcagccggagctcgccgtgcgaggaagttcctattagctttatggtcaggagaacttgtcctgttcaggaaatgaatgttgccgctaaaggtccgcggccctgaccctggcggcataacctgtgcgggccggggagaccctgtgcaggatgcttgggatttcagcccctctctggttcttgtcatatgtaaagagggaatcattgtggtatgttgcagccttgaacttttgatttatgcagtgagggcgacttaaccgtttccatgcctggacggctgtgcagtgacagagccgtgttgtgagcgtatgtgcctaggtacatgtgtgtgtggggtggtcaaggggaaggagagacccccacgtgctagcaggggctgttgctgggagtgggtggatttcatgggaggattccttttcttttttctttttcttgcattcttgcagcatctaaatttcctgcgattgttggctgcaaagtggtaagaagctggagagcattgtgtctggaattgaacctgggttcgaattaatcttctgtctcttagaggctgtgtgaccgtggcaagattcctcaccactcacttcctcatctgtgagatgaagttaataacttctgattcatactggtggtagagcagtgttgttaagtaggtgatgtatagagaatacatggcccagcgtccggccagtggtgtggcctcaggttgtatacttgaaaggatgtgtatacttcagtattttttccattgtaaaattaagggttttttttctttttttcttgagacagagtcctactttgttgcccaggcttgagtgcagtggcgcgatctcagctcactgcaacttccgcctcctgggtccaagtgattctcgtgcctcagcctcccaagtacctgggaccacaggggtgcaccaccacacctggctaatttttgtatatatatatatatatatttagtagagatggggtttcgccatgttggccaggctggtcttgaactcccgacctcaggtgatctgcctgtctcagcctcctaaagtgctgggattataggtgtgagccactgcgcctggcctaagtttttaaaaattaaaaagaatggcatagtgcttttttgctctttaacagatcaagaccaaaagttttccccccatcatagcccaaagtcctaaagaaaggctacttaagttgttcgttttcttttgtttctcccatgagtaatgtttctaagtgtgatttttgcagagaacagcagtgtctgacctcattcttgaggggaacttttctgcctgcctcttcttgagaaaaaatgtttgtgagttgtctggcaaatggatgcgttacttttgctgctgttgctgccgctgccgttttaaaggcccctggtgacaaaggagtgaactgcactttcggggaaagcatgccggaatctggcccagaaaagaggggccgctgggggaagggtttggagatgacgcctcctcaggaactttaaaagaaatctgtccatctgtctctggcatttatggcatcgttgacagcagttcaaggaaaaataaaaataagttcttatctgattgcggggctgattgcaaagccgaaggactagagtggccagcgagtcgggcggctggatctggagttttggagaaagggccactggctcatttctgggcacgcacgctcacggaggcaagttctcacctcctcgtgggcttctcttcactttacgtggaaaaactgtgtacgtctcaaattaaaagcagctcttgccccgcttagagccggtgaaagctgcttcgaaggcgtttgtagagtagggattggaaatgttcaatgcaaaagttaaatcgtgacagttgtcccctaaatgatctgctaaattaaggatccgctaacatttgtgagtctacctccctgcattccccccacccccacccccgcccccttggcagaagggataaagatggtacctaaaaacaatgtgaagcggctgctaaatcgagtgactctaaaaacatttttctttccttgaagttcagtgtggaaaaccagactggacttgtcagggatgcagacctatatagggcccatgtgcctggcccctttcctcactttctagcacaatggttttcattgccacctctcccgcgcctttccccccttcataattatccactattttactttctgtgtcctgacagctacaagagtagtttttgtttttttgagctgagtagctgctaaatattccccagcagccagattcaacggctgggggggagaataggccaaaccttggcatcccctgttgcaaaagtgaaaaatatttctgtttgcagttaattttagtggcaagcagatcatgttaactggatgtaattgcttccagatatggccgagggttttgtgtgttgagatgaagggtctggtaagtgcttacttcctgtgtaaattagcctattccattcagtctttcattctggccagccctggattctgtcattctgctcccattttccccctccccagcctgcagcctggtgtgagaagccgcttgctatgttcctctaagtgtaattcttttgtcacttggagccactctcctcttggttcttgatgtgagtttgcccttaaataatgagaagggtttgaaaagatgccacctggaccccaggccacctcccgcctctttcccagcaaaggcagatctgaagagcatctcctggtcatgggggttgcatcttggaacccagaactccttgttttctatgcatttttttttcctactgccctctgacccccgactctcacctgggagaacaccttctctttctctcaattagtccgactcctcctcagcctgaactaagcacgttccagtgggtccgaaatctcagaaaaaatgaaacggctgttgcgcagaggagaaggttgtggccacagaaaggagttgcctcatcagacgtgaagccgccaccttgccttgcaaagcaggctgcacctcctgacacacctgcccctccctgcaagaaagggaggggaaatcccacccaagagaaccttctccaggttcctgtgggtttccagggttgcaactgaagaaaagtgttaagattcatgttctcctaaattctgcttttgtcctgtggccagtcccacattcttagtgctatttgcataagaggttgctgtttatcttcctatatcagccccactgataacccctgtggtctgtttaacaacctatgaggagtagattacttgataaatgccagtttttccaatatgcaaagataaactgttggggtcagggtgaggggtggtgtgttatgaaggaggggacaggtggggagccaggaccctcttttagtgggctggagaagtgtgaaagagcctgatgaaagaaaacaggtagcttgtcacatacaacagctgcatttatcatacggttgatcagcttcctgccctcacctacttttctcctccttcatgtggacatgcagagtctctgagaacatttcatcaagtgggttgcctatgcccacattaatacaagatgggaaagggtggaggttatctttgctttttaagttcccatctttttctcccttggtcgtctcccacccctacaagttgttggctggtaagcaattgatgctcagaaaaatgatgttcatctgaaatcttaaatgagtggactttttctaccttccctgactttgcaggtgcttcttgaagagccaaggagaaaagaaaacttctgacctcatcacctagtcaataagctgtctgagaaacaaacaaaagagtttagactggctgctaaagctaggaacccagctgatagctttgttttgatgtccttgtaatgtttgcggatcgcagagggtgctatttagagcagggggcatctactgggacagactcactgggaagttgaaacagctagctcaaagtccaagagatgctaaagatagtgaaatacagcccaggaattgagggggagggggttcctcactcaagaaggagactttctaggagggggcgggcgtggtattttctagggacagtatggaatgaagggaagaaggttggctttagaaggaggcaccctgtgggaggctgagacaggtgggtcacctgaggtcaggagtttgagaccagcctggccaacatggtgaaacccagtctctactaaaaatacaaaaattagctgggtggcaggtgcctgtaatcccagctagtcgggggaggctgaggcaggaaaatcgcttgggattacaggtgcctgtaatcccagctagtcgggagaggctgaggcaggaaaattgcttgaaggaggcggaggttgcagtgagcccagatcctgccgttgcactccagcccaagactttgtctcattaaaaaaaaaaaaagaagaagaagaagaaggaggcaccctggatgaagactcaggctccagaatttactatctgtatgtcttgggcaagtggcttagcttctctgagcccctgtttacttttcttttgaaaatgaccaccttgtccatggtaatgaggataaaaaacgtgtaaagtgcatagcagagtgcaggtgtactgggtagacatgtatgattgcgctgtagccctgttatggcccggggagaaactatgaaaggaaccagtgaaatcttttgttttgggcactgctaaattgatgatagtactaaccctgtgctagcagccagctggtgaaataataggtgaataatgttagtacattgtgaatataaaagtttccatttgcaaagtgctactgctgttctaaagaagccacatttctaataaatgattgcttaatcctgtgatgctgccacagccccacagagtttgggaatgtttgggaattctttctgaagtgtgtgccgcattcttttgctttgccttttgggagggtagatgtgactattggaaatggtcaaaataatgcagtagcaaatctgttgactatagtgagtgataagcactgtcggctgctgtgtctgactcggaaggcagattctggaaggggtgtgtggggaaggcttgttggctcagcactggggtgagtgttggcctcacttcttaggtgggaagtggacaaggccaaggggcttttgatttccagctactatggctggactcccagtgaggaaggagtcgctgccatggattgcctgggactgggaagactccttttaactgctgtaatgtttctgcatttgtggtttggcctcctgtgagtttgggctccggggcggcacttctgttgttaaaagaacagaaaagaaaacaaaacaaaacaaaaaaccaggactgtcactgttagatgttggttgaggctagaaagaatggattgagttttgaccccctacaccccggggagtagggaggcctgggaggcacagtggcctgagtttgaattctgactctgcctctttggaaggctctggaaggttaaaggagcttgtgtgttcaaatcttagcctggtacctggcatatactcagcatgtatttttttcccctttcctgacaatgttccttgccccgaacacttgaatagtggagagaggaatgtttgcttttcctctccattgaaccaacactcgcccatccactgagcccaagattcaccttaggattgtctgttggactcggctcttttgtgacctaacagtgcaggggccttgtgctgagctgcacatgctcgctctcgctggtgctccctctctctctctctctctctctgcattatttatagtaaaccatattagaacagagtgttaaagaggaaggatgagtcattcccattgaaaccattgatgacataaataaaagcaaaatgcttactatgtgttttgtgcagtatttaaggccaggttgtgctaatttgaatgctcccaaactggatctgtgaaagcatacatatgtgggaaaaaattcaggtttaactagagggaagttatttattgaaaatccatttcagtatctgctttctcccttctatttacttcagatccatattcatatcatgcttgttgttctggctaacgagagggactggcttattcactagctaaggtttgtttattttcggaaggttgaggaatagcacagagaggttgtctaagtgtccctgtctccattcctcctcttgccacctgttgaggaaggcactctccacctgctttgcaggcgtgggctctcaatgtgtccaagaatcacagtcagagctgaagggcccttggaatcatttattgcagcatgctcatttgggaggagtaagtggaggtccagagaggttctgtgattttccctaggtcacacagcaagctagaggcaaaaccaggaccctcactcccagcccactttaattcttccttcacaagcctgcctgtgactgcccaggtctgttctctgcttctaccaaggggtaggcaagactagaatctgacttgagagcagtttcagatctttgtctgtgagggatgctggggggtttctggcatggtgacttgcctcctgggacactcattaacctctctgctgctgagcctgagcagactaatgtacatcaactccttaggatttacagacaatgccctatgttgggggttttgagacccaaagattgctaagacatgggacttttccttgaagagcttatactttgagttaaaatatgtatgttgatatctatgacagagaataggaaatggaaagactatgatatatatattcagagttgaaatgacttctgtctggagtgattcattttaaattttaaaaccttgttgagcacttactgtctgctgggcacctgggtaggccctgggaatactgtgatgagcaagatagacaagacgtctaccctcctggggctttcctaatggggaagaaagatccttacttagctagcagtcctgtccgtaactgtgtaagggtgattttgatacatgttgggagcctggatgaagtagcacatgagtaggatattaaaggataagtaggttttgaagacggggacagaaagaaggaaaattgtggtcagggccaggggagaaaacaaggagtaactttctttggcaggaatgagggtgattcatgctggaatggtaggctggggtcagactgtggtgctataaatgcgtggagagagattagagaaggcagcatgaagaatggagagaaaatgagtttgaagttgagcagacccgggttcagattttcatgctgccacttgcaaactgtgtgatgttggccatcaaggactgtgaactggctgggtgcagtggctcacacctgtcatcccagtgctttgggaggccaaggcaggaggattgcgtgaggccagaagtttgagactggcttgggcaatatagcgagacgatctttacaaaaaaaaaaaaaaaattaaaaatgcagctgtgcatgcccataatcccagcttctcgggtggctgaagagggaggatggcttgaacttataagttcaaggctgtggtgagctatgatcacgccactgcactccagcctgggcaacaaagtgagaccctatctctatttcaacacaacaacaacaacaacagcaacacacaccatgaactgtagcttcttcattcctacagtgcagttattgtgtgggatagcctgaggatttggggtagtgtacttaacacactctgcacagtgcctgtaacagtgtagttgctcaataaatataactgctgtttgttttaactgctgtttctttttggactttatcccgggagagttggagccttggaaggcatttgaaaaggagagtgacgtgactggagtgctccatactgatgtgacatccactaggcatgtgtctgactgccccctgctccttccctgccttcacgagcctgtctgaaaaggagtttagtgcgtgatcatcagctcctaaggagacctctcccctgtatcttgtacctggcactctaccaagatttgatgagaggacatgaaatggacccttgccacctctcggtgggcggggaagctgggagaggggcctggggagagggggtcttcagctgtcaggatcaaaggaagtgacactctgaagctggtctgccggactgttacccgtctctctaactctcttttaatagaaacccagtctcccctcttgcctccctgatagtgaacagcgacgctatctcccgcgggccagtctcggctgtggtcgtagcactacgcaatgtctgcaaaccgacagtggcatggggagataagggccccaacgttgtgtaacgaggggcatgggctgtttgcccgagtggctcctggcccctgggtaactgctaacctcaacggaggagcgggccggccttggaaacgccgttccagggcccctcgctggttccacggatgcctttttgtggttggataaaggaagctcatgtaggccgcccacagcgcagcatggccttgggctacgggtgtttggttgttttgtttttctcttttctttgtcttttttaaaaaaagaagttgaaagggggatagtcttgcttggcacctaccacctttaacccaaaaccaaataaaacaaacagttcctaaatataaattaaacttcaacctgcagtatagacatcctccttccctgcccgaaacccactggccactggaggctagctttaagaaattggttttggagactctggcttgaaaaggagccatgcccacttgtctcacgtcccagtcgctggctccagggggccgtggtagaacatatattgtacttcagctgcctttcccctccaagcttcctcagccacccacagccctttcagatgagctgagccctagcactgtgccctctcccctctgccctcttagggtgatagaatccactaccctgacatctggggttgccctgttctgctgtggtgggagatgggctggaagggacttcggaggctctcccgtgttctgtaccacccagcttccccttggatccctccacccccgcagccaggagagggaagtaactgttctttgagcaggacatttcattttcaaagtattcttgatgccgcccccccgccccaccgccaagaattctgctctgtgggtgatacttataaggtaactatatggcttccttatttaggcagcagtttctcttctatgattttagttcctctcatgattcttataaccctctctcagatacttccaggatgataaatcttctatcactgtttcatctgatcacatcagggtgattatatttcgtgacataaccaggtggctttaatccgttggtggaagaaccaggctctcacctccattgtttaagatgttatgtttctactaatctgtccactgagtgtctccatcctattgtttccattgcatgctctcaggttatttcctttgttcttggctgtctgattgctcccagaggctgcagttattttattttatttatttcattttttggtggcagtaggggattgatctctctcttgcctttagcttgaatgggtggtcatttccaggcttacacattgctccatgcccactgtaggggtctggcttagagatggtcgggggagagaaggtggtgatttaaaagatttggaggcggtggcttacattgattttagcttatctaaccctttagctagaggctgctcttccctcagagtgtccaactagctgtaacttaaagcaacagagaaatgtatatcatcccttttcttgcattaattagggctgagaaattcattatttagagggataagagctccggaggaggagggttttttgaactaatgtagagatctgtggccagctgtgtgattctcaggtagcaggtgagcgggtgggggttgatgagaggggtgagaaggagcaggtgccagggtcaggcaggggagggagcccccactccgtgcatcatcccagagccctgttcctccaagcccagattagacacccttctccacgtggggcctcaagttagaaatcctgggaggaggccttattgctcaggatcatctgggaatgttgctttctgggtttaaaatacagtcaatgtttagatgagctgctgttcaggcacatggtctggttagcaaagggttaaatcctgcatcccgtttttagtcatcaagctagctcagatctgcccaccttggagccctgtgctttcctgccttagtgggcagagtctaggggacctgtggcatgttcaatgattgaggactcttgtccagattccaaaaacctactgtgatgatgctgttctgaagctgtggtaggcggtgattgagtggagtgtgtagtgaccctcaggaattcttcagaagttaggattttgacgatacctctgataagttgggtttttaatttgctggtttatcttagagtggaggctgtggcccacagcaagtagtacattttccatctcagcccagtgcatggacaaacgtacctcaaaccaaaggttcaatgaaactctatttatctttactatatgctctggtatcttctcttccattctatcttatttcatttaagaacgttaatgaagacccactaatggattgccacccatggttcgaggaggtcccccaaacagtgaggccttagccataggtattcaattcaaaaagcatttactgagcatcactgtgtactaggtggttgctaaatgctatgggggtaatgcagagaaattaataaatccctgtaagagttcactgtaaaacagaaatgacagccatatgtgtatgactttgtgtgtgtgtgtgtgtatatatatatatcagactgtatgattaaatattatataagtgaggtatgggggagcagaggagaggaattgaattttgaattttgattgaagattcaggagggcttcatggaggaggtagcatttggccaggttttagagaatggctaggctttggacaagtggagacaggaactgccatttggaggtaggagatgagctaatgtgtggcagtgtatgggtgggggcaggtgcctgtatacaaggtagtgtgctggaatggggcgatgggcatggggtaggatgggagatcaagcagggaaagtggattggggccaggtcctagaatgatttgaataccaagctagctttctggacatttgtaaggcgcacttgataggggttggatcattgcgatattattggaagacaaaactggggagggtgtgagaccatgtggctgctcagaatgcagagcccctctgatgtcctcagccttctacgtatttagtgatgggggtggtggtggtaaagagccttgcagacagcctggcttgggtgcttgcttgaagttcttacgcccactaactcctgccctgctctgtggagcctgctgaatggggcattaggctagtcacacacctgtcctttttcacattcatgctgtaccctttgcaaacattacgcagcagtgcaaactcagccctgggcctcagaggagccaggcgtggccaggagagtgggatttggaacggaagtgcttttgtttttggcattcactactcccccacccccactggcacttggattgtccttctttttctccttggtgtctctcatcctgtccagccttcaagacctcctcaagtcaggcttctctgggaagcgctgtctgtctgtcttggtgcttgctggcttcctcttctgtctcctgtgccatctccagtttgcaccatttgagtataagctctgctgcctcgtttgagtttaagttttatccccccagccacaacctaagttccatgaggatagtgattgtggtttatcttctctccctcagctgtctgctgacaccatgctgaatacatagtaggtactcagtaaataatagctaattgagcatttactatggacaaagcactttacttgcattaacacatcccatcctcacaaccacctgtgaggtgaatcctattaaaaggaatacttgggtgctttcagagttattctctccagctttggacttcttgtttcatttgccctgagagctcctcaactctgttgatgctgttctttcaaaggttgcttgtgacctcttagttctcaagagcactgtattaggttggtgcaaaagtaattgctattttagacattactttcaatggcaaaaactgcaattacttttgcgccaactaatactttcccagactccagtattggctccattgacccctcctgttcctgccaacttctccccctcctcctctggtatttcctggaactccctccctagggtcagtgccatgtggtgcctggaactccctgggatctgtgtttgaatcctgacattgccactttctaagtggcaaacactttggccacctccccctcttcctgagtctgtttcatcatctgcaaaatgctggtagtttctcttctcacgggaaagatggtggttgttcatcgatgtctgttgaaaccgtgaccctctctgctgaatgtagaagaagatgaccttaccagttctcctgtctctccagtgtctttcttgacaatcttgtggtttccacaagcaaccctctgtgggtgatttccagatctctacctctagttgtttttcgttttttgtcttttcttgtgtttcacacattcttttccagtagcctcacgggcacaccagtcctgcaaggatctagaatgtgatgtgtttgagctagttcaacaccttcctctcgaatcgtctcctgtgtcctcatgttttgtggtctctgccctcttcccaggcacccaactgcagactttggcatcatctgtggctcctgtcttccctttgccttccatatccaccatttgcctctccagcctacttaaccagatggctgtcctgatttcctcaccagccttcctgcagtgcacccctgcaaggctcatcaccccacttccctgagcagagtagggctctgatggggttgctctcctgctctgaaccctgcagtggctcactatggcctattctagagaagaaacgagagaattcttagcgtggcattcaaagccatccgggatcctagattccagctacattttcactcttcatccctttctctgcatatttcttagaatgtacacccctgaaggcagggaccatctttttcacatctgtgttacaaccttttagtccactctctagcatatggcaactcagcagatgctgctgttgagtaaactcttatgcttcccttcccatgccatatccttctctggtcatcgcaacagggccaaatctctcatgcttcagtgtaaatgccctctccttgcagcatcctttcctggggcattcttcctccttgcatccagttggaaataatatgtccctccattggagctcccacaccagaagaggtatagataaagccagatacttctttttttttttttttttttgatacagagtctcactctgttgcccaggctggagtgtagtggcatgaacttggctcactgcagcctctgcctcttgggttcaagtgattcttgtgtctcagcctcccgagtagctgagattacagacatgcgctaccatgcctggctaatttttgtatttttagtagagatgcggtttcgccatgctggccaggctggtccccaactcctcgcctcaagtgatcttcctgccttagcctcccagagtgctaggattacaggtgtgagtcactgtgcccggcctggatcttttattgtttgtatttctgttcatttcttccctaagaaaccccacgtttttgtgggcaggacctggaatcctattcagttatacagccccgcttcgtccactgctccccttcagagtctagtgccctggacatcataggtattcagtacctcttgctggcttaggaacaggaggatgcctgatggccagggtgttcctctgaagcaggggtggctgagctttttgaatatctgcattgtgctaagggttaactacccaggcagtactggtggggaagggccccagaagcaggcccagactcaggtattgttaaagcagagtcatctttgctctgaagttttttcttttatcttttcttttcttttttaattgggggaaaccttgtcctaattggcatctttattgtggcaggaataggccaggcagggctgggggagtgtgaagtctgtgaagggaggtggcctgggggcccccccacacaatgcctgattgtgcaggcataggtatgaacacattgcagcctgtgtgcacccacagggtgaccacgagcaaggcctggggacgaggactacgaggcctgcagctgggtcctcttttctccctcctcacccccacccagtacccacgtgattgggccacatcccagtaacaagcagtccttgtggaagagccttcatgaagacctttgctgggagtggcgggcagggatctgcggggagcgttgctggttcaagctggggctttcctatggatgatgtcctgtgaagggtagatcctggagggacagacaggtgtctgatctttggcaggcagggatgtctcatttgtacattataggtattcagtatctcttgctggcttaggcttcataatgtctcatttgtacatcatagccttcagtacctcttgctgatttggttaacccagttgttataccacgatattgatttttcatgccattttctttaggaagattggaagatcattgaggatagggactgtgaccttttctttttttctaccccagtacccaacctggcaggtagcacagcgcaatgatccacgatgtttaataggttgaattgtagagggggcctctgattccaaagatgggggcagaatatcagtcctctccagactgcctgggaatcctcctctctccagcctgggcctggccagtgggagacagaggctgctgaagtagctggcaaggaggcaaagaagatgatgacctagctacggtcctcatgtgcccactggggaatcatctttttgcatctgagttagtcaatgtgctgtgcattctctgcagaatttgtgaacctggtataggtatgaggtgagagaggccaggaggtctggctgctccccctctagacttcgcaggtaaaacccaaggtgtgtgccacgtaaaggttcagaggttttataggcatccagatagcacatgtgggtctctgcccctgcttgcagcctccctggggcagccagccaggctcagggcaggaagctgctgattctgggtcacttggctgctcttgcttgctgctgctgtgattgttcctacagttaagatcttagctccataagggacatacggaggtcatctaggtcatctcatggctctcaggcaagaaaagtagcattattgctctcatgcccactttatggataagtgaccgaggcctgcagaggcagagtggctattccagccattaaatgtggctccctgctattctgttccctgccaggatattctgtggatggttaggggaggggtcttacctcagctaacgaggtgcattttctgtggggtgaggccattcttgtcacttaggtgtctgaggcctgatggtgttggggaatgtcctggttctattcccagggctgtaacgtgggggaaggatggaggaagacagaatggcctctggaacttttggatctttctgagttgaggccttgtctggccaactccgggaggctgctggcatggcaagcagggtagggatgcctggcctagccaggggagctccctctctcccctctgctgcccctctttccacccccatcataaacacgtgtggactttctggtggtgagaagatggttttggagggctgggctgaggtctaggcaggcaagagcttccaaatgtgtggctttgattctcagccttttcatccctcaatcctgggagactcattttaaaacttaaaaaaggacttcattctattggatgctatgtgggcaggccctgggctgttgtagagaggcctgaaacccacttcagtttcctggacaggctgggagtgtgtacccatgggttccctgctgccctattcctggaagacactaatatccctcccaaactcttggttggtttctgctttttttctgtagcattttgtctttgtgggaaattttaagaaacatatgtatggctttttggtttccacttatttattttcccctctgagtttcagatttcatccttctccaccccttccccctgccctaaggtggggctagtgcaaatcgcagtgtgtgtgtagtgggatggttaaagagccgtacatcctcacacctggtgacgcagactaaggcaattaaccttctttagtaaagaccctttcagctgggtgcggtgggaggcacttcgggaggccgaggtggaaggattgcttgagccctggagttggagaccagcttgggcagcatggtgaaaccacctctctaaaaaaatataaaaattaacgggacgttgtggcatgcacctatagtcccagctacttgggaggctggggcacgagaagtgcttgaacctgagagatggagactgcagtgaggcgagattgcaccactgcacttcagctaggtgacagagtgggaccctgtctcaaaacaaaacaaaacaacaacaaaaaaagcatgttttcctgtctttcccttcctctcctccaccccctggcatgaactctcaactcctggcctgtggatgtccgtttctataaatgctggtgctcggtggtcaccgtagacgtccgagcagcccctggggctttggcttgtgttttctctgtacttgtgagggtggttgccacttctggccttctttgtgctttctttttctttcctttccccaatcttttgttcctccctccctccctccctcccttcctcccttccttccttctgctttcctgtttaaagtatatggctgcacctagcatgacacagttcctatttattcctcagacttgctgggacagtctcctctgtatgcggcgactgagggtgggttccagtgccccagcccactccccttccccttgtttttgtccacttggctggacaaagagaacaaaaccaaatggcctcccctccccctctcctaagccggtcaagcagtggtattctgggatgattttccctgcaaccatttaaacaagtgctttgatgcttacgagtcattggaatgaccaggcctgtgcgccccttctcactgacacccttagaccaggctgggcctcacccttttgtcttgctgcccctcggtgcccagtgggcgtgggcagtaggactgagcagaggggccgaggctgtgctggccggcagctctgttacagtagagtggaaggaggtcccggccagaggggcaggtcaaacaggcctcttttatttacagtgctctctttcacggcctcactgaaacaggagacccgagaggctccggtgaaagggcactgtgtttgtgcattcaggccttccagggctggctacaaaggtgggggcacccggagcactgaaggggctttttgtcattggcagtttggcttaggggagaagcgagggagagccagtgtgggagccgcctctaggattgtgagcaagtgcctgtttagacagctccacgctgctccttaaaacctattttgtggtctggggttggggcgggggcacactgcctcgatcctcttgttgtgtggagcaaagtgattcctct

SEQ ID NO: 82 - DNA, 16703 bp, Homo sapiens
  source 1..16703: mol_type = other DNA
aggaggtgcttgccagacactgggtcatggcagtggtcggtgaagctgcagttgcctagggcagggatggagagagagtctgggcatgaggagagggtctcgggatgtttggctggactagattttacagaaagccttatccaggcttttaaaattactctttccagacttcatctgagactccttcttcagccaacattccttagccctgaatacatttcctatcctcatctttcccttcttttttttcctttcttttacatgtttaaatttaaaccattcttcgtgaccccttttcttgggagattcatggcaagaacgagaagaatgatggtgcttgttaggggatgtcctgtctctctgaactttggggtcctatgcattaaataattttcctgacgagctcaagtgctccctctggtctacaatccctggcggctggccttcatcccttgggcaagcattgcatacagctcatggccctccctctaccataccctccacccccgttcgcctaagctcccttctccgggaatttcatcatttcctagaacagccagaacatttgtggtctatttctctgttagtgtttaaccaaccatctgttctaaaagaagggctgaactgatggaaggaatgctgttagcctgagactcaggaagacaacttctgcagggtcactccctggcttctggaggaaagagaaggagggcagtgctccagtggtacagaagtgagacataatggaatcaggcttcacctccaaggacacctatctaagccattttaaccctcgggattacctagaaaaatattacaagtttggttctaggcactctgcagaaagccagattcttaagcaccttctgaaaaatcttttcaagatattctgcctaggtaagtctgttgtctgcatgtctccccactaatgtgagtcatatagatggagtctcagggcacgactgggttttgtgtctctcgttgttgcttcacagcccttttggcatcacccatttatttaactaggataaaaacgaatattggtatagcgattccacagtttacaaagtgcttttgtatccactgtctcacttgatcaagcaaaaggaaaccagaggaccggagtgctgtcctgagtctaccttgatttgctaggcgacttgagggagacttttagcctcaaagggccacttaagtggaaattctaaaacagtacctattctgatcctaactcaagggaatgctgtgaatatgcatgagataaagacctcccaatatatgaagaactgggtgatttttggagaaagacattatatactcaatttcttttttaattaactttccttgaaagtattgcttaatagtttttacattctccatgtaacagactttctggatctggtgttcagtctgtacaccagatgtagatcttttttaccttctcctagaccttaaaattcctggcaacatgcctccaccctggattggggaataaaaaatgaaaagttttttttttttctttttgactttaaattttattaaagtttgaggtttttcaaactgatgtgctttatttaaaattcaagtgagacatttttagtctttttgatatttatattttctttgtcactatgatgtaaattacagggatttggggaaaatatgggattttttttttttttttggagatatagatctcactctgttgcctaggctggatggagtgcagggatgtgatcacagctcatcatagtctcgaactcctggactcaagggatccttctgcctcagcctctccaataactaggtcttcaggcacacgccaccatgcctagctaattttaaaatttttttgtagagatgaggtctcactatgttgtccaggctggtctcatcctccaggcctcaagtgatcctcctgccttggccttccagagtattgggactgtaggcatgagccactgtgcctggcccagaaaagatgttttaaaaaaacattttgagggaaaagttgtgaacagtagtggtctgtctttgaggatcgccagcacagtcccagggaagacaatgtaaatttgactctgcccactgccatgagatgcctgatctctcctctttgttcctcccactaatccagacggtgtgaagggagacctgctgattgacatcggctctggccccactatctatcagctcctctctgcttgtgaatcctttaaggagatcgtcgtcactgactactcagaccagaacctgcaggagctggagaagtggctgaagaaagagccagaggcctttgactggtccccagtggtgacctatgtgtgtgatcttgaagggaacaggtagagaaactggtgtctacttcttggcttttgaaggtacctgagtgatggttggcaaaagcaacagacagatagggaccaaagagaaatccaaatggagaatgagtggtaacgagagagcgagagcaagagagatgagataggcccatgtgtgtgcatgttagtaaatttgtgtatgtgcacgtgcatgtgtgcaccagagtaatggaagacacagggagagggttgaagaaatggatactgagcaaagaggagtaaacccccaaattttccaggcctttggggacaagagcagtgtgcagtcaagtaccttgggacctaggtttaggacagctgcaagtaaaaggctaacccagcttctcaccagcagcttttggatgtcagtgcttgtcccttgcctcactgccatgctgctgtagccatccaagcctatagaacttggctgtgagtgtggctaatgctgacatcaccagatacaaccaaaatctgactaggtttttaaactgaggtaagaaacataaaggaattacttgaaaagaatttattaatcaccatccatgaaagtagactttgtatacttacaactaatggtcaagatcttacactaccacatctacatgtaaatttatgcaaatgaatctcatttgttcatgtaaattttaatttcttccaacacgagaaattggcaatagcctattagccagaggtagccacgcctgcaattcactgtctttctcatatccttatgcacttccatcttctgctgattgtctgacaatatccagtctgttccccaactgaccattcactcctggagcaacatttctctgctgctatgcatattgctgagaccccacagacttctttgcaagctgcataaaaagatgaatgtttgcaattatagtatctgcaaataaaaataggttttgttcttctattccaactttatgctttttatttatttttctgcccttattatgttggcaaaaactttcaatacaatattgaatagaaatgatgacagcagacctctgtgccttattccatattctaggataaaaaatgttcaatgatttatcattaagtatattaactattggtttttcatagatattatttatcagactaagttctgcattcctagcttttttgaaattttaatcaaatgttgaattttgtcaaaatttgtttgcatttattaagatggtcttatgattttcctcctgtattctgaaaatgtgaattacattggaaaattttgaatgttacaccaaagtggcataaactacttggtcatgaagtataattgagctataattttcttctagtgtgcttcacaaattttgatatcagcatgatgctggctggagtcataaaatgagttgggagtgatatcccctcttctattttctgaaagagtttgagtattattagtataatttccttcttaaatgattgatagcatttaccagcgaagccaggtgaatctgaaatttttgtgcgagagaagactttattaaaaacagtatttctttaatggttacttggattttccgtttgttcttttgtctgttttggtaagtggtacttttcaagaagtttgtcctttttatcttggttgtcaactttattggcatttttttttttttacaatatccttttaataccttattatgtctgtaggatctgtagtgatctctcctctttcattcttgatattggtaatttgtcttgttttctttctgttgtcttgatcaaccttgctacagattgatcattttattaatcttttccaaaaaccaacttttggctatgttgatttttctctattgtctgtccattttctatttcattgctttctgctcttatttttgatcactttctttcttctagttattttaattttaattcttttctagtttactttatttttttctagctttctaaaatgtcttgtttttaattcttcttttagcttcttaagttggaaacttatatcatttatttcacatatctctttttctaatgtaggcatttaatgctgcaaatttcctttagcactgttttaactgcatcccatgattcttgtatgtggtatttttattattttcaaattcagcatattgtctcatttcctttgtaatttcttttttgaccatgaattatttagaattatgttgcttaatttccaaagtattgggatttttctagctatcttattgttattgctttcaaattaaattttgttgtagtcagagatttattttgtggctctgcatatggtctatctcagtaaacgttctatgtgctttctacattgaaaagagtgtatattgttcagttgtagatatagtttctataaatatcaattaagtcaggcaggttgatagtatcattcaaattttctacatccttactgacgttttgtttactttctctgtcaattactgagagtgttaatgtctcaaactatgattgttgatttatcctttgctccctatagttctgtcaacatttgctatatgcattttgacacttgtttttagctctgttatatacatttttaggattgttatgtcttcttgatgaactgaccactttaccattgtgaaatatctccctttatttccagcaatgtatttgtcttgaagtctactttttctgatgttaatatagctacatcacccttcctatgcttgctgttttgcatggtgtggtgggcagcctctaagatggcccccaataatccttgtgtcagtattttcacctttgtgtaatccccttccctagaatatccactggatttagtgattcagtactgacaagtttggtagaatgcagcatagtgatgggatatcaattgtgatattaaattaaaaggactacagcaccactacacacctattagatctaggccagaatctggaagactgacaacaccaaatgctgatgaggctgtggggaaagaggaactcttatttattgttcgtgggaattaaaaatggtgtagccattttggaagacaattcgactattccttgcaaaactattcaatctagcagttgcactccttggtatgtaacccagaaagctgcatgtattacactcctcagtatgtaacccaaaaagctgtggtatgtctacacaaaaagctgcacacagatgtttatagtagctatattcataattgccaaaaattggaagcaaccaagatgtctttcagtaagcgaatgaataaataaactgtggtacatttagacaatggaataatatccagtgctaaaaagaaatgagctatcaagccacgaaaagacatggaggaaatgtaaatacaattactaattgaaagaagccaatcttaaaaggctacatgtatgattccaactatatgacattctggaaaatgcaaaactagggaagaagtaaagaagataagtggttgctaggggtcggggagggagagataaataggtggagtatagaggattttttagagcagtgagactactctgtacagtactataatggtggacacatgtcattatatatttgtccaaatccatggaatgtacaataccaagagtgaatcttaacgtagattacagactttgggtgataatggtatgccaatgtaggccttctgcttgattttgcggtgaacctaatattgctgtaaaaaacaaaatcaatttttaaaaaatgacagctttttattgggtattctgtctctatctcactctcttgtcctggggagtgagcttggaaccaaatttcccccagttgaaccagaaaaaacagagaaataagtgtttgtcatttttagctgctaaattttggggataatttatcctgcagttacatataactaatatacatgatatatctacatatctttttctacccttctgttttcagattatgttttctctttttaatccagactgacaatttctgcctctaactggattgtttagtccatttacatttaatgtaattactaatattacagggttgaatttaaatctaccatcttggtatatgatttctatctgtcccatctgattgttgttcacctgtgtctttcttcctgttttcccttggtgaatgcagtaatttttagtattccatttagtataagtgtacatatttttagtatttattttttatctcccctgttaacctcttctgtgtcttgtgtgagtttgtgtggtttttctaggaattgcaatatgcatccttgacatatctattgtctcatgaaggatgtaagatattccaaaagtgtaatttccttaaccgactttcctggcccttatgttcttgtcatgtattttatttctatgtataacactataatacatatattgttattagttttgctttagttagtagtgattttatttatttttattgtcttatttttaattttgatttttaaaataaaatttaccatctttactatgtttaagtgttagttgaatagtgttaagtatagtcacataagtcagtatacagttttaaacaatgtatataacaatatatattaaacataggaattttggactgaatgtttttatccctccctcccaatttctgtgttgaaatcctaacccccttatgatggtattaagaggtcggggctttgaaaggtcattaggtcatggaggtggagacttcatgaatgggattagtgcccttataaaaggaaccccatagagctctctagctctccttctgccatataaaggtacaatgagaagtcagctgtctgtggcccagaagagtcctcatcagaccctgaccaggctggcatcctaatctcagacttccagcctttagaattgtaggaaataaatttctgttgtttatgagccacccagtctatggtattctgttacaggagcccaaactaactaaggctatattatgcatatatttaagatcttttatatttacccacatatctttcttctctagtgtttttcattcctttcccaagatctgttcttctgtttggcatcattttccttcacctgaagaacttattttagtattagttataatgcagttctgctggagacaaattctcttaacttatcaagtcgggtaaaaagttagtaattgttttcctccctgctaacttgaggaatttaacaatttttgataaccaaagtcccctggcatctctcttaccagtatttattattgaaatctgagattttaaagttcaaatattgtaatttaaagtattatttttatattttctttcaagatcagtttggacatttgcttttggtttgtaatcaaatttagaattatttggacatatttggtgctcattttatacaatttttctagatattgagtctttaattttggttcatctgtcaactgaatagatcttcaaatatttatttcaagaggaacatacagtgacgtgttttctaagtccatgcatatatgagaatgtattttgtcactcttacacatgaacaaaatcataaaattgtttaaatattgccccactttttttctgacatgtagtaagaagttgagagaggctattctattttttttagacagggtcttgctctgtcacccacactggggtgcagtggtgagatctcactgtagccttgacctcctgggctcaggtgatttcccaccttagcctcctgagtagctgggactacaggtccacactgccatagctggctaattttttgtagagatgggagttttgctctgttgcccaggccggtgagagcctattttcatatgcattttaacctgtatacccctgacttagaattttatattggctatagccttcaaagtggggctatattcttcaatataaaaataatttcatacaccttttttttctgttgactatgtgattctacagaatgaaattgatattaactagaaacaattgcagctatgacaatttggacaatatctaaagttatttagtaaataaggaaattcccagggtttgtagaatctcagggaaactttgtaataagtaaataaatcttcagtcactgttagacaacacaccttgccaaagtccaaatcatctgtcaagaaggcctttgaaactttgttctcactttctgtatccaccaccggcctttccatctcattcaaaaataaacccttacaatctagcaggatagtaaaagcattacttatctcacacctgaaatgtcagcttggaacaactagctcttgagacactgtcccctcccaatcactctgttggacattgcatttttggcagtaaatttctgcattcttatccttatccttgtgctagatcctgtggctttaattattttaagaatgataatgatcctatgcaactcatgtctttcctgcatcttcaagtagctttatcaacctacaacctatttccttcaagatgatttcttctttatctgaagttttttcttgtgctaaaggctgccaaagacgtatgtactgtctcctgttcttctacctctgcatttaaataccactcattttaaattagctggccatagtggtgcacacccgtattcccagctactggggaggctgaggagagaggatcacttgagcttgggagatcgaggctgcagtgagctgtggtcacattccagactggctggcagagtgacactctgtctcaaaaataataaaaaataataataaaaataaataaccctcatttttacaactatccaaaaaagttttaagaaagtcaaacactaagatacaattactcaagcttatacaatgaacagaggaaaatgagctctttccttaagaaattgtagaagctgcattacttaacctatggttcctggaacttggaatgcatagcttaggcttgtggtccctggactagtagtttgacaacacgtgggagcttttagaaatgcaggctgtcaggccccactagctacctacagaatcagaaccttcactgtaagatctgctaagggtggtatgcacattacagtagaagaagcactggtgtctggagcagggcttccctctaggtgtgccagggcacacacacaggtgggtgggaatcagttgcaggcatgctgtccaagctgttttccttggccctcttgacagcaggtggggcatggaccacctcctggttgcctctgtagagagtggctcctccttttttttttttaattttttattatactttaagttctagggtacatgtgcacaacgtgcaggtttgttacttatgtatacatgtgccatgttggtgtgctgcacccattaactcgtcatttacattaggtatatctcctaatgctatccatgccccctccccccaccccacgacaggccccggtgtgtgatgttccccaccctgtatccaagtgttctcattgttcaattcccacctatgagtgagaacgtgtggtgtttggttttctgtccttgagatagtttgctcagaatgatggtttccagcttcatccatgtccctacaaaggacatgaactcatcattttttatggctgcatagtattccatggtgtatatgtgccacattttcttaatccagtctatcattgttggacatttgggttggttccaagtctttgctattgtgaatagtgccacaataaacatatgtgtgcatgtgtctttatagcagcatgatttataatcctttgggtatatacccagtaatgggatggctgggtcaaatggtatttctagttctagatccctgaggaatcaccacactgacttccacaatggttgaactagtttacagtcccaccaacaatgtaaaagtgttcctatttctccacatcctctccagcacctgttgtttcctgactttttaatgatcaccattctaagtggtgtgagatggtgtctcattgtggttttgatttgcatttctctgatgaccagtgatgatgagcattttttcatgtgtctgttggctgcataaatgtcttcttttgagaagtgtctgttcatatcctttgcccactttttgatggggttgtttgattttttcttgtaaatttgtttaagttctttgtagattctggatattagccctttgtcagatgggtagattgtaaaatttctctcccattctgtaggttgcctgttcactctgatgctagtttcttttgctggcagaagctctttaatttaattagatctcatttgttaattttggcttttgttgctattgcttttggtgttttagacatgaagtccttgcccatgcctatggcctgaatggtattccctaggttttcttctagggtttttatggttttagatctaacatttaagtctttaatccatcttgaattaatttttgcataaggtgtaaggaagggatccagtttcaactttctacatatggctagccagttttcccagcaccatttattaaatagggaatcctttccctatttcttgtttttgtcaggtttgtcaaagatgagatggttgtagatgtgtggtattatttctgagggctctgttctgttccattgttctacatttctgttttggtaccagtaccatgctgttttggttactgtagccttgtagtacagtttgaagtcaggtagtgtgctcctcttaacctcagcatacctgacagaagaaagcttaggcccctgtcgaggtggcagttctctgaggtaaatgctctctgtgcaaagacctccatttctatttaaaaagatgtttgtatgttgtccaaaaatagacacagttgtgccaaatgtgttccacaaactagtgaaccacttctattccaaagcatctctggactttcacagcttgcaaaaggatattgataagctttttcaaaaccaggatcttgatgatcatgatgattgtttcagtgatacctaggaaacattcccgccttttacaaggatgcctctctcttaaataggtgctcttgccaccttatctccccaggaaaattcacagggcaggttaagaaaccttcaactagctatttcctcaattgtaaacatttctactcacaggtctcagagcacttcaaactcagtgtgtccaaaacagagctaccatctgctccagatctgctttatttctggtattcttagctccttgaatggcaccatcatataataaattggacaagccagaacctggaagtcaatttgtcctttccctctctgtcatgttccatatctaacttaacatcaagctctgtccattttacttcctgacttcctctgtaacccatttcttcccgtgtttaccatcacctggtctcagctacccctgtctccctcctgactggcctcccacttccactcttgcccctccactcaattcttctctgttctgcagcccaagtgaccctctcaaaatgtaaatctgatcatgtcactctcctccttagtgctccctagtgactctccagagcttttggaatgaaaagcaaaattcctgtcatggtccacaaagccctgcctagtctggctctgccaacctatttccccacaatccagccacgttggctctctcctcctgtgtttcctgccaccacgtggcctttgcacttgcggtttcctcttactggaatttcctcccgccctccctgcttgcttcagtctggttaactcctacgtatttatcctctatatctctgcttgcccgactcctttttggaggagcttttcctgatcctctaggtcaaggggagctcccaacatctccccattagtgccatgctcctttccttccttgcatttgtcagttttaatttccactcctatgagtgatcactgggttaatgctttctcccgccacccacccgtctacaatctccatgaggttagaatctgtttctcatttgttcatccttgtgtccccagtgcccagcctatttcctgaacatagtagaggttcaaaacatatttggaaaatacatgaatactcacattttgcttttcagacttttcctcctagaatatcattcacctgattcgggtgtggggtgtggtctctgtcaaagatgcactaatgattgttccttgcccgtacaattctcacagtgacctccacgcttacttagccttgatttccttgacctgttttgatggttctttctcaggagagcctgcaggaacttctgaggatggggctttggggatgtgaggacaatgaaaaacagcttgtcagggagattctgatgcactgccagccttgctgagacagggcaggaggaaccgcctctaaatctcaggatagttcacctggaatgtgggaagacattctcagaaagggttcttcccggggccctcctcttcatcctttcttgcctccctcccttcctccccatacccctcaggcttttatagatgcatatttacagaggacagggctacctttttttgcatattgattcttttgaaagggcagacctttagaactaaagaaatgaccacaccgctgttagctttctgcaaaacagcatagcactttcccggtgtgtgtttattacctaccccatgagctaaacatgaggcaaagtagtaattggctgggtctctggtgagtccatttccctgcgttgccccgaggtgtatgcaggctttacacagctaccttggcaactgacttccccaatgtttgctgtgtgtccaaggacaagcagggatctatgacactgggtgtttctagcaaatttccctctcaaattggcacattctctgtgagctttggagacttcacagtgtggctcacagtttgggaacaatttgcatcatcatctgactggtaagttctagttctgtggtaactcaagtgtttcaaatagcttaatacgcaatagggcacggaggttcgttctgcttctgttggaatcaaacacacatttccacaatgttcccgttatacaggatcatcccgaaacacatcccccagaacactatgttgtcactactctaccttttgatatacactttattattattcctatgtgcagataggttacttaagtttttctgttctagattagtttgtctattcaaatacatgtttctcacacacttctacagtgtttttctttttgttgttattcttaaagtgttctatgaaaacttccatgttgtatcaaggctgggtggtagctttgtaactagtttcccaccttagaatgactgtctgctttgtccaggactgcaagggggacttagaatatgggatttttcagtgctaaaactagaaaagtctgagacaaatcaggacaaagtggtcaccctgctaccatttctagccttgataaaggagcaggtagacccaaccaaggataatttttgttttctatgtagataccagtttagtggttggtaggaattcccccaaatcaacaccttgctaagctcatctctctctctctctctcttttaatatgacagcttattgagataaaactcacataccatacaattaatgcacccatttaaattgcgaaattcagtagtttttagtatactttcagagttgtgcaaccttcatcacaatcaattttacaacattttcataattctcaaaagaaatcctgtacccattagcagccactcccatttctctccaaatccctcagctcctggcaaccactggtctgctttcagtctctgtagctttgccttttctggacatttcatataaatggaatcatacaatatgtggccttttggttctggcttttttcatttagcctgtgtctagaaggtccatccatgttgtagcatgtgtcagaatttcatttctttttgttgccaaataatattccattatatgtatatatcacattttatttacctattcagaagttgacggttgcattgtttgcaccttttagctgtttataaacattcattacaagtttttgtatggatatatgttttcatttctcttgggtatatacctagacagatttcctgggtcatgtggtaactctatatttaaccttttaaggaactgccagactgttttccaaagtaactggactattttacattgtcagcagcagtgtatgtaggttccagtttctgcaaatccttgccaacacttggtattatctgtcttttttattatagccgtcatagtgatgtgaagtggtatctcatggttttgatttgcatttctctgatgactgacaatgttgagcatcttttcatctgctaattgctaagctccttaaatggaaaattataggaagcataaagcatgtttgcaaagaagtgattatattcgctaggattaagattttaagtgaatatttaagatgcccatgactagtgtccactctctcgaatcaagttttatttaaaccattgacttttcctcataactggaaatggtcccagtgaaagtctccctcacttgctggaatgtggggccatctctgctgtctgtcaagccttgatgcccaagtggccattttctcctggagtctgcatcagatggtagagtgtgtgtttcctgagtgtgagactggatctgctccacaatgctttgctggttaactccttccaagagtgcaatacccaggggtcactcctactcttagtgctctggggcctgggcccttaacacactcaatgtttcttccccttttctcacttatctgatcttctgctacttctttctcctttgtccgcccctgctctctggtttctcttgtacactctgtttatttaattttgatcatttgtttgtttgttcctttcttcctcctttaacaaattcaaataggatacaagccactctgtcccatctcctgcccttgccttctcttctttcattcttttattaactgatttttctcttgagaaatcaccactgggtcaggtgtggtggtggctcatgcctgcaattccagcagtttgagaggctgaggcaggaggatcacttgaggccagaagttcgagaccagcctgggcaacatagggagaccctgtctctataaaacataaaaaaattagcctggtatggtggtgcaagcctgtaatcccagtgctttgggaggctgaggtggggaggatcccttgagcccaggagtttgaggctgcagtgagctgtgatggcgccactgcgctccatcctgtgcaacagaacaggaccctgtctctagaaacaaaacaaaacaaaaaacccaaaacatgccattgatttggcagaaaaggacagggttcctggcaaggctaccaaaaacatgatctctgtcagaaaacatactatctgcaatatttgttggaatctgagaatgggaaatgtagctttcttctctccaggagtgccctgttcacagctgtgggataatgatcaatagttcctaaaaatatctatggaagacctcaccactcttattgatcagcaactactgcaaagataatgtttcagcatttgaaaccccttattattaatacttattctgtatgggtcaagtagccgctaacttacagtttggcagatggatcaagtataataataataacctataaatactaataaatgagccagtatagtataagtgagtactatactaagcagtgaaggaagaataatttcatggagggaagtccacggtagaagcaggctgctaggtattattatcgttttcacatactattcactttatgaagagatttaacatagctcagggtaatatggtctcattcaaatgccaaaatgacccctcagttcttctttctctcctttcccgatagaggtggccctaaggacacacatctgggacaatacggccatttttagccttgacccaagagatctgggttccccatgactggagtggaaaacaatgtctgtgggtttgtgtttttcagagtcaagggtccagagaaggaggagaagttgagacaggcggtcaagcaggtgctgaagtgtgatgtgactcagagccagccactgggggccgtccccttacccccggctgactgcgtgctcagcacactgtgtctggatgccgcctgcccagacctccccacctactgcagggcgctcaggaacctcggcagcctactgaagccagggggcttcctggtgatcatggatgcgctcaagagcagctactacatgattggtgagcagaagttctccagcctccccctgggccgggaggcagtagaggctgctgtgaaagaggctggctacacaatcgaatggtttgaggtgatctcgcaaagttattcttccaccatggccaacaacgaaggacttttctccctggtggcgaggaagctgagcagacccctgtgatgcctgtgacctcaattaaagcaattcctttgacctgtc

SEQ ID NO: 83 - DNA, 1869 bp, Homo sapiens
  source 1..1869: mol_type = other DNA
agagactgcgagaaggaggtgcgtcctgctgcctgccccggtcactctggctccccagctcaaggttcaggccttgccccaggccgggcctctgggtacctgaggtcttctcccgctctgtgcccttctcctcacctggctgcaatgagtgggggagcacggggcttctgcatgctgaaggcaccccactcagccaggcccttcttctcctccaggtcccccacggcccttcaggatgaaagctgcggtgctgaccttggccgtgctcttcctgacgggtaggtgtcccctaacctagggagccaaccatcggggggctttctccctaaatccccgtggcccaccctcctgggcagaggcagcaggtttctcactggccccctctcccccacctccaagcttggcctttcggctcagatctcagcccacagctggcctgatctgggtctcccctcccaccctcagggagccaggctcggcatttctggcagcaagatgaacccccccagagcccctgggatcgagtgaaggacctggccactgtgtacgtggatgtgctcaaagacagcggcagagactatgtgtcccagtttgaaggctccgccttgggaaaacagctaaagtaaggacccagcctggggttgagggcaggggtagggggcagaggcctgtgggatgatgttgaagccagactggccgagtcctcacctaatatctgatgagctgggccccacagatggtctggatggagaaactggaatgggatctccaggcagggtcacagcccatgtcccctgcaaaggacagaccagggctgcccgatgcgtgatcacagagccacattgtgcctgcaagtgtagcaagcccctttcccttcttcaccacctcctctgctcctgcccagcaagactgtgggctgtcttcggagaggagaatgcgctggaggcatagaagcgaggtccttcaagggcccactttggagaccaacgtaactgggcactagtcccagctctgtctcctttttagctcctctctgtgcctcggtccagctgcacaacggggcatggcctggcggggcaggggtgttggttgagagtgtactggaaatgctaggccactgcacctccgcggacaggtgtcacccagggctcacccctgataggctggggcgctgggaggccagccctcaacccttctgtctcaccctccagcctaaagctccttgacaactgggacagcgtgacctccaccttcagcaagctgcgcgaacagctcggccctgtgacccaggagttctgggataacctggaaaaggagacagagggcctgaggcaggagatgagcaaggatctggaggaggtgaaggccaaggtgcagccctacctggacgacttccagaagaagtggcaggaggagatggagctctaccgccagaaggtggagccgctgcgcgcagagctccaagagggcgcgcgccagaagctgcacgagctgcaagagaagctgagcccactgggcgaggagatgcgcgaccgcgcgcgcgcccatgtggacgcgctgcgcacgcatctggccccctacagcgacgagctgcgccagcgcttggccgcgcgccttgaggctctcaaggagaacggcggcgccagactggccgagtaccacgccaaggccaccgagcatctgagcacgctcagcgagaaggccaagcccgcgctcgaggacctccgccaaggcctgctgcccgtgctggagagcttcaaggtcagcttcctgagcgctctcgaggagtacactaagaagctcaacacccagtgaggcgcccgccgccgccccccttcccggtgctcagaataaacgtttccaaagtgg

SEQ ID NO: 84 - DNA, 3530 bp, Homo sapiens
  source 1..3530: mol_type = other DNA
tggggactccaaatgatcaggcagtgctgcaggccatcttcaaccctgacaccccatttggagacattgttggattggacctcggagaggaagcagaaaaggaagaacgagaagaaggtgggcatttgatctggagtgtagctctgcacataggctggcctgctggcctcccgaggtagcagagagggaggtggttttataaggccccttgttccatgattatgattgagattggaatcagagaggttggctgctccttagcgcactgatgggggtttggtaagagatgtcctgccaagaggagtaagctggggtttgtctctcgatccatcagctctcatgcctctgaacttaccacttaattgactgtatgatccaagcttaactgccaggtgatgttaaactctcacatttttgtcataacagagaataccaccaccagaacagaagactgaaataaggcagggcatggttgctcagttgagtggttccaatatagcaagcacaaccagtaaccgttaaacactgtcacaagccaagctccaaactaactcttccgcagtgagtgcgttcactggcttttccattaatccctaatgaaggagtttttgatcctttgtttctagaggagtaaagcctacaccttactaactcaggccgaaacacagagggatacgtcagaagtgatgttcatgatctgggaatgtcatggtggcctttgcataagaggcggtgtagtagagtaaaatgcagacaggagccagaatgacctgggttcaaatccaagctctgcaacgtatggcctgttgaggccatacacaaagaacttgagcaacttctttaacagattgaggagtctgggcttcattctcttggcaatggggaaccaaccaaggccccttcccaggtctcttggaactcaggcaatgctagctcccagccttagtgacctcatctccccctaccccaaacactgcaactgacccctgctgtgacccatacccagtcagctctggctcagatctcagaattccaaagcctgaggtggctttttcttcttgctaccaactgcacacctggcttctcctggctccttccctggcccagatgaagttttccctcaagcacagctggaacagtccaaggccctggagctgcagggggtgatggcagcagaggctggggacctcagcacagccctggagaggtttggccaagccatctgcctgctgcctgagagggcttcagcctacaacaaccgtgcccaggcccggcgactccagggagacgtggcaggtaaggggagatgccctgtatcctctgcaaaagggcccacgggagggcacagaccagaactgaagtggctgtgcggctggggtggccttgctaaacccctgtggagcctgtcttcttacctataaggtaggagtagtatcaggggacctgctaatatcatggggttaatgtgaaattcagaagagactgcattccattgattaaggaacagttaatgagagcctactatgtggcagtaggctggtgctgaggacactgagataaaaggtatatggatcaccaacatttatatagcagtcactatgtaccaggcattaatcactttacatacaaactagtaaatcaatcctcacaacaaccctaaaaagtatgtactattgttatccccagtttatagatgaagaaactgaagcatgaagaggctaagtaacttgcccactatcatacagtcaggcagcagcagagctgggatgtcaaccaggtggtagggctcgagtgtgtgctcttaatccccacatgatactgctcctcgaaaagctcccagtccaggaggcagggcagacacataattctgagaccagcaaaacaagttcgagaggggtcagcgtgggacctgttcctgaagggcgagttttgaaggatgagtgggagttagttggtgggtggagaaggtacagtctgtagaggtccaaaactcctgctgcattcaggttattctaattaagtgaagacaatgggaccatgctggggaccaaagatgaggctaatgtgaaggtataaaccacggaaacctagtactacttgactgttaggagcagtggtgacacaggtgctcccagaaccagcaatgccaggctagggagttttgagtccactccaggaacaatgggaacctcccaggagccccttatccaggcttatctgccccagatcactggagacagcctgcagaccaaaaccccagagagatgcagtggtgattccaactggagattcctccagaccagctcctccgagggaaaccaaggagtactgcattctgagcgcttctccggaggctcaggctctttgggggactagagaacatgagtgaattgaagcagagcccgaaagaagccagcctggtggactttaagaaggtggctggctgcctgaagttctgagttcagagttctgaggcccaacccaagtattttatgagaataataacaataaaaatggtgcaggccagctctggctccaggaccaaggaaattagatacatggagataaccaaagaatgatgaaaggcaatcagtccaggatacaggggagagagaaggtgttctaaagaaagcaatggaaaagagaaaacggccctcaaaaggaaaacaatgagaaactgtcttgattgtacttgtaagaaatgattgtgcggttaatattattttttgaaccctgacattcagagtcagtcacctggcacatagtggatgcttaataacaggtgtggaataaattggctgctacttgcccgggcagtgggccagactcataaacatagtggccattcagaatcctgcaacgttcatgttttcgtgtattagcggtggaaaataataggaacaaggcgagacctggacttcagtcccagctctgccactaagtggcttggctgtagagcttaactcttccacagtcttcatctgtgtaatgggaataacgatccgtacctctagcaggtgcgaggcgggttgtaaatggccacgcccgggagccgcaagaaccacggtgatccgcgcggccgcaggtgggctggggctcgggcaaggccgccctggcctccgctgacccccgccccgcccgtctcgtcggtcccgcaggcgccctggaggatctggaacgcgcggtggagctgagcggcggccggggccgcgccgcccgccagagctttgtgcagcgcggactcctggcgcggctgcagggccgagacgacgacgcccgcagggacttcgagagggcggcacggctgggcagccccttcgcgcggcgccagctggtgctgctcaacccctacgccgcgctgtgcaaccgcatgctggccgacatgatggggcagctgcgccgcccccgtgacagccgctgagcgccgcggacccgggcgtccgcgggcgaggggacgggactgggccctgaaccaataaagccgtcgggcctcaccgactccgcctgctcctgcgtcctgcccgcgcccg

SEQ ID NO: 85 - DNA, 32742 bp, Homo sapiens
  source 1..32742: mol_type = other DNA
taaggctacggatgggcgggacggagcagcccaccgcaaagtggcggtctacttgaggcggttaccttagtactccgagtagactgagtctgtggcgagctgcgggccgattcctggccagtgccatctcagccggagcaggcctcggggcctcagaagcaggcttttatctggcccgaggctcccagccgttcagcgcgtcttcccataacctataccgattattgggactctcggctgcagacacaggtccccgcccctccctctttctccgggttgcagctgtcattcctcccttcccgcctcgctgcgcccacagctgaggacagtcttcgttctctcattcccatcctttctcttccctctcatcgccatttcttctagaaggcaacttaaaaacctttctttgcctctttatttcttcccatttctcttcccttcttttcttcctttttctctagaatccgtgtgtttccacttcatgccaggcttctgcctccagggcttctctccttttcacgggcctgtggctcatgtgttaggaggttgaacttttaatgcagtcatttgaagattttaagctttttctttctcctaatcaggagtcacagatgctgggaagtatggcccgaaagaaacctcgaaatacctcaaggttgcccctggctttaaaccccctgaagagcaaggacgtgttggcagtgctggctgagaggaacgaggctatagtaccagttggggcatgggtggaacctgcctcaccaggtagttcggaaatcccagcatatgtgagtgtcagtttgatccaaatatggtggggttccccaccaccctttttattagccttctctaatcctgggtgcttaaagatgaacagtccgaggatgctgtttctattctgccataaatagtttatgctcttgcattaggattatagaacaagtatttgccaaaacttgactgcagctttagttggcataatcaaatatttattactcacctactataatatatagagcataatctacatggaacaggttatatagatatatatctgtatatcagtttacttcagactcttgattgcttgttatgcccaagacataagcactatctacatcttccagacactgcaacttagtatggatgatagttggcatacttcaagtaacattaattggttgcttaaggtttatgataaattttgtaatgaggattcaggcaaaatggagtaatagaataaaggagaaagagatgaactctgataatctgagaaagtctaactagaaattccatggtttctgatagtctttcaccaaactgtgccccttagctatttgttcaaatttaacttggcacttaccacattgtgttatagtagattgtttatatatcttttcctgatgcagtgtgagctccttgagcgtagagaacaaatgtcatttatcatcacattcccacttttatcttaaatactgcctaatcaatatagacactcatgaagtatttatgaaaggcacaaaatgtcttctgtatgtgtagacaaggtgctgaacatggatgaaaaaaggatgagatatgttccctcagtgtacttgatctcagaagagaaatgagatgtgtttaaatgttaaagtaatgcaatatactatattcattttatttatgtttgcacatatgtatgtatattcattgatttattcctaccctgcctatttccaaaaaggattttaagagtctaggtggtatctctatctaagttctaagaatataatgctcaatcaagaagctatgacgttgggttgatgtgacccaggaaagtgtaatgaagaatttgatcggagaagggaagggaatgattctcctattaaggagaatgaggagagtaagaagtaagcaaggttcaggattctaagggtagattagatcgattggagtggaaagcttagtaggagaatggttgctgacaggattatggaaaatagggatggtagagtaccttaggaaattttggagaagggattgactttgtttaatatttacaggtgaatgtcatgatcaaccagtgttttctttagatgaattgcttcaaaggttttgaaggatagggagtgattggatcctggggataaattagaatataattataataatttaagcatggagtatagcatcgaaactttgttagtggtaagaaatagagaagaacagccttgaaaaaggatgattgaagtgcttgagcccacgaattgtaggctgcagtgaactatgatcatactactgcactctagcctgggcaatagagtgagaccccatctctggaaaaaaaaaaggagtggaatgagaagggatgaatgcaggaaacaccccacaagacttggtaagatttggtataaagatattttggtatttaagttgttgacacctctttgtaattgctcaaattacatctgtataatatcagtagtgtcaacatgcctaaaatttgacaccatcaaactttttctatgttaagaagtattgactatcgtattcacacacattaactcaaaatattaaagtcttggaacatggataaacatatctccttttcctgatttaaaaatttctgatcagttccagccaaagggagtttgatcaagcatctaatagaactccttatagctttagcatatctagtctgggtatccacccttattaacggatatagctctgtcagctcaaaataaatgctgaatagttacttctaaagcttggcccttagatcatgtctgttctaaaggggaacttctactcatttttctccccaaaatttcagggggccatcaggattcctaaaaatgtcatagctttagactacctccccccaataattattaataaattagcatcaaaagacactgctgttctatcatcatatatgggattgcattattttataatttgttctggttaccttttgctgtgtaaccaaccaccccagaacttagtggtataaagcaaataatactatgtaacaggaatttgagcagggtacagtggtaatggcttgtttctgccccatagtgtctgggacctcagctggggctcaaataactggacatgtctgagacaccttgactattttccggctattggctggagctagacaatagtcaagttctcccagtaatgtggcacctgctgggctgtaatgtccaagatggctttcttattcacatatctgacgcttggcctaggatgactagaatgtctgggtgctggttagatatgtttctcttttcacatggcttctctgtttgactaacttgggcttcctcacagcatggtaatctcagggtagtctgaatttttatatggtgctgacttccttcagaatgagcactctaagaacagaggtggaagtttctttatgacctggcttgtaatcttgtggagtaaaagaggagcagagaaaatggaggtaaaagaaagaggccgaatggcttaaacttgtctggggcttgagttaagctgggtcagttgttcaggcttcattacgtatatatctctccgttggaattattttacctaattgttctttgacacttgtacactccactagagtagtttatgggatagacatcttggaaattttaacttaaattgaaatttgaatgcatttgattttgagaatttaatgacagcctgtaaaatgatctgaggtacccttcagaattagaagttggaatcactgagttagaaggaataggtacgagatatgatgatgattttatttaatttgaaaattcctagtgaaagagagacatagtcaagagaaaagcagtgtagagaggaacataattgttggagtcagaaacttctaattctgctactagttagctatattaaaattacttaatctttctgaactccagcttcctcatctgtaacataagggataagaatacctactgccaaaggtggttttgaggatagagtgctacaaagtagttaaaatacttgtcacctgatagatccataataatgataagtgctgttatgatgatgactatgattattattcaaagcacttagaggagataaatgcagatcaagaactcaaatgggataaagtgttccagattgttcagaacaagcttgtccaacatgcggccatgggccacatgtggcccaggatggctttgaatgcgacccaatgtaaattaataaattttcttaattaacactatgagtttttttgtgatttttttttttctcatcagctactagtgttaatgtattttatgtgacagttcttccaacatggcccagggaagccaaaatattggacacccctggtttagaatatgttttggaattgagcaattatataaatatatattgactacccttatagtgaaggctctgtactagatgccgtaggggaaataaaggagaattgaatacatatcctgtcctcaaagagttcataatctagtaggggagtcaagaagtactatactcagttaacattggtgaaatgagaggtgttatagcataagagggcttagagagagagtgttgtggaaggtactggggagtgggtattaaatggttgtgaaaactgaataggcctttactaggtggagatgaaaggaagggcatgccaggttaaaaatggagcataatgccaaatatgaagacattttaacaataggacatatttggtgagtggtaagtaacctggtgtgtcttgactatttactccattttagaaaatgtgtaacgtgttaggttttatttggttcattaagatttaatgaagacatcgttagttctaattcaataaaaaatttaagatttgatactcatacattccatttttttttgtacagaatggaattatttttttcaggattgtatccttatcctgactgttttgtgtttaaaacagccctaatggacaaaactgctaacatttaagttcattttctgtctttcatctttaaagacatcagcatatttaattgaagaagaactaaaggaacagctaagaaaaaaacaagaagctttgaaacattttcagaaacaagttaaataccgagtaaatcaacaaattaggttgagaaaaaagcaacagcttcagaagtcttatgaaagagtaagttcaaaagtgagcctgagtaaagattgaatggaaaatatgtgtgttatgagataagctattaggcagtaacagaattgctttcctttgattacatgcctaatataatctaattaactagtgaagacagtaaattttttttgtagagaaaccatgttttattcctgtgttctgactcaattttttgcttttaccaagtagttaaaagcaatgtcagaattttgggttcagacttgagtttgaattttggctttgctacttctagctattgacttttggctaattacttaacttcactgattgtagtttcttcatccataaaataaggatatgatacttctctcataggattgtgtgagagttagatgagataacctaaattattagcacatgggaggtgcctggtaaatgttagtttctctgccagctaaagcctctcccctgccccccaccccaatttaaaatcttctgaactgctttagaggcattatttgattgctctggattggggtagaatgttactatccccctttcttctttcgtgtaggcacaaaaagaaggctccatagccatgcagtcttcagcaacacacttaacttccaaaaggacaagtgtttttccaaacaatttgaatgttgctattggaagttctaggttacctccttccctgatgcctggggatggaatagaggatgaagagaatcagaacgaattattccaacaacaagcccaggctgtaagtacctgttctttttattttatgtctatgatattttccctatcccctaaactataaatatgacatctagggtatgaggtagggattaagagttatcacactcagcttcacttttgataatcatccccctttttttttttttttagctttgtaaagtggggaatagtgggataatgctttttaaaaattttaaatttaaattcatttgtgtttggtaagatactctaaaattatctaaagaaaagtgccgcggagcctgcagtgagccgagattgcgccactgcactccagcctgggcgacagcgagactccgtctcaaaaaaaaaaaaaaaaaaaaaaaaaaaaaagaaaagtgccaaagtgctagaattcaaaacctattagaaagcactttaggtcaagaacatggattttccaagttatattgaaattatattctaggcaagctactattagtttgtaatttacagagagaaataattcttaccttcgttgcaaagaagttcagtatacataggtggcatttcatttattatttatctttgtctcatttttcttatttttgttttttaatctgattatcacaataaatgaatctatagttgtaggttaaagaataatacatagtaaattcgtaacatatccagagtttttggaaaaatgtaatttttatttaatgactcattttatatacctaatatttaaaaattaaccactgtgagtagatttcatccattcacattgcttgactctgtccatttagcccccaccttagtatacctgagcttttgtccagttgatacagtcttcaactctgcttcagtaattgttcttcatcttatttaaaatgtattactagaaataatgagaggaagagagaaaatatggaaaattatgagtatgtgaaaataaaagctgtattactgcttaacatacttggtcaaaatttaattgtgctattagtataaataggaaaagtttagaagcacacattatcatgttgaactactattaaaatttttttctttgtccacaactatttgactctttcttgtcattgttcagtttgtaataatcatttttatttgtttagcaaatatttattgagccaggcactgcataaagtacaaggaatagaacattgacttaagacagacacagtccttgctttcgtggtgcttgtagctgttagtcccactgtagtgaggattttacttcatctgtttaatacaaaaatagaactcatcagtcagcagtatttgcctatgctgtttgttatggattgtagcgatactaaggaaatgtaaaataggaccttccatgggtttatattttcaggtagaaatacaaaactaatagaccactcattgtatcagataataatatagagagattttctgtgttttgcaataaagttgtgctatgggagttcagaaatttttaaggaaacagtaggggaagaattcatgggagagatagacttgaactacacattttgtattggtaaattcaagagaatttgtttttcttagagacggagtctcactctgttgcccatgctgtagtgcagtggtgcagtcctggctcactgcaacctcctcctcctgagttcaagagaatctcctgattctcctgcctcagcctcctgagtagctggggtaggtgcctgccaccatgactggctaatttttgtatttttagtagagatggggtttcaccatgttggccaggctggtatcaaattcctgagctcaagggatccgcctgccttggcctcccaaagtgctgggattacaggtgtgagccaccacacctggccgagataattttttcttaaaaaccacccaaacaaaaaaaaagcctagaatctccaatgagccaggtgtatttgggaataagtaatggaacctttctaattggtagtttataatggagaataaccaaaaatggggttggataaggaggaggaaatcaggttatgaaaaaccttaaatgtcacaagattttttaaagtttttataatacccccacacttttttttttaaaaggacatgaactactgaagaatgctcagtgacttaactattttgagcctgtaaactttgtccatatgactccatgacaatagatgctttctgatcttaccacttctgttgcagtttttatccactagatgtcaccgtgaaactagacaatgagacagttcaggcacgaactcccttagtttatctagaactggttgggtaaatggtacacataattcactttctgaatgttagtacacgtctcagttttctcgtgttggtgttatagaaacatgtgatcttggagttggaagagtttcaaacattcatctgacatgttgaaacatttatacatgaaagtatttgatgtctggaatatacttaaataataaaagaatgaggtaaagtagggagttacggatgaagcaagattggctaggagttgatagtgctaaagtgaggtatccatatctgtccatggtggttcattatagtgttctgattacttctgtatatgtttgaagttttccataggtttgaatttatttatatttttaattaaatgttaaaaaagaatattatctggtcctatctttctctgtccaaggaattcagttctttttttttttttattatactttaaattctagggtgcatgtgcacaacgtgcaggtttgttacatatgtatacatgtgccatgttggtgtgctgcatccattaacttgtcatttacatgaggtatttctcctaatgctatccctccccgcttcccaccatgccacgacaggccctggtgtgtgatgttcccaaccctgtgtccaagtgttctcattgttcaattccgacctatgagtgagaacatgcggtgtttggttttctgtccttgagatagtttgcttagaattatggtttccagcttcatccatgtccctacaaaggacatgaactcatccttttttatggctgcatagtatttcatggtgtatatgtgccacattttcttaatccagtctatcactgatggacatttgggttggttccaagcctttgctattgtgaatagtgctgcaataaacacatgtgtctttatagtagcatgatttataatcctttgggtatataccaagtaatgagatggctgggtcaaatggtatttctagttctagatccttgaggaatcgccacactgtcttccacaatggttgaactaatttacagtcccaccaacagtgtaaaagtgttcctatttctccacatcctctccagcacctgttgtttcctgactttttaatgattgccattctaactggtgtgagatggtatctcattgtggttttgatttacatttctctgatggccagtgatgatgagcattttttcatgtgtctgttggctgcataagtgtcttcttttgagaagtgtctgttcatatcctttgcccactttttgatgggattgtttgattttttcttgtaaatttgtgtaagttctttgtagattctggatattacccctttgtcaaatgtgtagattgcaaaaattttttcccattctgtaggttgcctgttcactctgatggtagtttcttttgctgtgcagaagctctttagtttaattagatcccatttgtcaattttggcttctgttgccattgcttttggtgttttagtcatgaagtccttgcccatgcctgtgtcctgaatggtattgcctaggttttcatctagagtttttatggttttaggtctaacatttaagtctttaatccatcttgaattaacttttgtataaggtgtaaggaagggatccagtttcagctttctacatatggctagccagttttcccagcaccatttattaatagggaatcctttccccatttcttgcttttgtcagatttgtcaaagatcagatggttgtagatgtgtggtgttatttctgaggcctctgttctgttccatttgtctatatatctgttttggtaccagtaccatgctgttttggttactgtaaccttgtaatatagtttgaagtcaggtagcgtgatgcctccaactttgttctttttgtttaggattgtcgtggcaatgcgggctcttttttggttccatatgaactttaaagtagttttttccagttctgtgaagaaagtcagtggtagcttgatggggatagcactgaatctataaattaccttgggcagtatggccattttcacgatattgattcttcctgtccatgagcatggaatgttcttccatttgtttgtgtcctcttttatttagttgagcagtggtttgtagttctccttgaagaggtccttcacatcccttcatgtaagttggattcctaggtattttattctctttgaagcagttgtgaatgggagttcactcatgatttggctgtttgtctgttattggtgtgtcggaatacttgtgatttttgcacattgattttgtatcctgagactttgctgaagttgcttatgagcttaggagattttgggctgagtcgatggggttttctaaatatacaatcatgtcatctgcaaacagggacaatttgacttcctcttttcttaattgaataccctttatgtctttctcttgcctgattcccctggtcagaacttctaacactgtgttgagtaggagtggtgagagagggcatcgctgtcttgtgccagttttcaaagggaatgcttccagtttttgcccattcagtatgatattggctgtaggtttgtcataaatagctcttattattttgagatatgccccatcaatacctagtttattgagagtttttagcatgaagggctgttgaattttgtcaaaggccttttctgcatctattgagataatcatgtggtttttgtctttggttctgtttatgtgatggcgtacgtttattgatttgcatttgttgaaccagccttgcatcccagggatgaagccaacttgatcttggtggataagctttttgatgtgctgctggattcagtttgccagtattttattgaagatttttgcatcgatgttcatcagggatattggtctaaaattctctttttttgttgtgtctctgccaggctttggtatcaggatgatgctggcctcataaaatgagttagggaggattccctctttttctattgattggaatagtttcagaaggaatggtaccagctcctctttgtacctttggtagaatttggctgtgaatccatctggtcttggactttttttggttggtaggctattaattattgcctcaatttcagagcctgttattggtctgtgcaaggattcaacttcttcctggtttagtcttgggagggtgtatgtgtggaggaatttatccatttcttctagattttctagtttatttacgtagaggtgtttgtagtattctctgatggtagtttgcatttctgtgggattggtggtgatatcccctttatcattttttattgtgtctatttgattcttctctcttttcttctttattaatcttgctagcggtctatcaattttgttgatcttttcaaaaaaccagctcctggattcattgattctttgaagggtttttgtgtctctatctccttcagttctactctgatcttagttatttcttgccttctgctagcttttgaatttgttttctcttgcttctctagttcttttaattgtgatgttagggtgacgattttagatctttcctgctttttcttgtgggcatttagtgctataaatttccctctacacactgctttaaatgtgtccgagagattctggtatgttgtgtctctgttctcattggtttcaaagaatatctttatttctgccttcattttgttatttacccagtagtcattcaggagcaggttgtccagtttccatgtagttgtgtggttttgagtgagtttcttaatcctgagttctaatttgattgcactgtcatctgagagacagtctgttgtgatttctgttcttttacatttgctgaggagtgctttacttccaactatatggtcaattttggaataagtgcgatgtggtgctgagaagaatgtatattctgttgatttggggtggagagttctgtaggtgtctattaggtccacttgttgcagagctgagttcaagtcctgtatatccttgttaaccttctctctcgttgatctgtctaatattgacagtggggtgttaaagtctcccattattattgtgtgggagtctaagtctctttgtaggtctctaaggaattgctttatgaatctgggtgctcctgtattgggtgtatatacatttaggatagttagctcttcttgttgaattgatccttttaccgttatgtaatggccttgtctcttgatctttattggtttaaagtctgttttatcagagactaggattgcaacccctgctttttttttttgtttgttttccatttgcttggtagatcttcctccatccctttattttgaggctatatgtgcctctgcacgtgtgatgggtctcctgaatatagcacactgatggtcttgactctttattcaatttgccagtctgtgtcttttaattggggcatttagcccatttacatttaaggttaatattgttatgtgtgaatttggtcctgtcattataatgttagctggttatttttcccattagttgatgcagtttcttcctagcatcgatggtctttacaatttggcatgtttttgcagtggctggtactggttgttcctttccatgtttagtgcttccttcaggagctcttgtaaggcaggcctggtggggagaaaatctctcagcatttgcttctctgtaaaggattttatttcttcacttttgaagcttagtttggctggatatgaaattccgggttgaaaattcttttctataagaatgttgaatattggcccccactctcttctggcttgtagagtttctgccgagagatccgctgttagtctgatgggcttccctttgtgggtaacccgaccttctctggctgaccttaacattttttccttcatttcaaccttggtgaatctgacaattatgtgttttggggttgctcttctcgaggagtatctttgtggtgttttctgtatttcctgaatttaaaggttgacctgccttgctaggttggggaagttctcctggataatatcttgacgactgttttccaacttggttccattctcgctgtcactttcaggtacaccaatcaaacatagatttggtcttttcacatagtcccatatttcttggaggctttgttcatttctttttattcttttttctctaaacttctcacttcatttcattaatttgatcttcagtcactgataccctttcttccacttgatcaaattggctactgaagcttgtgcattcgtcacgtagttctcgtgcatggttttcagctccatcaggtcatttaagatcttctctacactgtttattctagttagccattcgtctaatcttttttcaagggttttagcttccttgcgatgggttcaaacatcctcctttagctcggagaagtttgtcattattgaccttctgaagcctacttctgccaactagtcaaagtcattctccatccagctttgttccgttgctggcgaggagctgtgatcctttggaggagaagaagtgctctggtttttagaattttcagcttttctgctctggtttctccccatctttgtggttttatttacctttggtctttgatgatggtgacctacagatggagttttggtgtggatgtcctttttgttgatgttgatgctattcctttctgtttgttagttttccttctaacagtcaggtccctcagctgcaggtctgttggagtttgctggaggtccactccagatcctgtttgcctgggtatcaccagtggaggctgcagaacagcaaatattgcagaacagcaaatattgctgcctgatccttcctctggaagcttcgtctcagagggcacctggctgtgtgaggtgtcagtcggtccctactgggaggtgtctcccagttaggctacaggagggtcaggaacccacttgaggaggcagtatgtccgttctcagagctcaaacttcatgctgggagaaccactgctctcttcagagctgtcagacagggacgtttaagtctgcagaagtttctgctgccttttgttcagctatgccctgaccctggaggtggagtctacagaggcagacaggcctcgttgagctgcagtgggctccacccagttcgagcttcctagacactttgtttacctactgaagcctcaggaatggcggacgcccctcctccagccaggctgctgcctcgcagtttaatctcggactgctgcgctagcagtgagcaaggctctgtgggtgtgggacctgccaagccaggtgcggggtataatctcttggtgtgccatttgctaagactgttggaaaagcgcagtattagggcgggagtgtcccgattttccaggtaccatctgtcatggcttcccttggctaggaaagggaaatcccccgactgcttgcacttcctgggtgaggcgatgccccaccctgcttcggttcaccctccgtaggctgcacccactgtccagccagtcccaaggagatgacaggtagctcagttggaaatgcagaaatctacctgtcttctgcgtcgatcacgctgggagctgcagaccggagctgttcctattcagccatcttggaatggaccccccaattctttttatattatctccatatgtggccatctaattcctgccacaacacctccactattggacaactcattactttttcagactgatcattttatttttagaagacttgaaattattgcaactattttttcaacatgttgagtcaaaaatcttcctccctataacttttatccattggtcttaattttgccctctcaggtaataaaaaataagatagcatctgagagcacttcaagtatttgattatagttatcatttttcttttttgggtttctatattcctaatgccttattgatttcttctgaatactattttgtttttcaatattcttctgaaataggacctcaaaaacaacacaatactgtattttaaatatgatttggccactagtgctcttaatccgcaccccttacctcaccctctgcttgataatacttggtattacctacttgttcaaaggtcagttaagattagttgcctaaaggtaggagctagaattgtagactggaagaaatttcaagtgtcttataatatatagaaccagtattttgttttcattaggactgatatttatctttagggattcagtttctgtgatgtcccttgaaagcggcattttggtgaggaattgaagaacaactgatcattgttttagtcttaccatataataactttttattgatctgtccctattcagtttgctactgttttctagcatggtttattccagctttttgtttctcactgaatcttttactatcttatttctatttttattctctctttacagtgctagttttccagctttttaaaaccatggaaataattactttttgtagtaaagctttaagtaatgtgaaatagcctgctaaattcttgtaatctaccattgaaaaaactagtatttcagtcagacacttttgcctgcaagaactcaggctaacccaaacaaggggaaagtttatttgaagaatacacatgggttaataagggaagaatcagaatctcacacaaatccaaactcctttgaggaatgcaactggagagtttttctggatgtgagtttttctggatgtgagctccagtgaccccaagagcatgagatatttgatcttcacactaatatttaatcagtagcttgattgattcagttcttctcatagggtgaccaaccttccctattggtctaagatcgaggggtttccaggacatgggacttttcagtgctaaaactgagacagttctaggtaaactagtatagttggtcaccttgtttctacatgtatgcttccctcttattttctcatttctctaccattaactggtattgtcatctcctcatcacagcttcataactttggtatacttgaggacccgttagcctcttttttccagtttaggaccttttatgttcaagtcctctctctaacttttctctggatatttcctagtttattatctgaggtaaggaatatttattggcccagcttgcctttttgcattaggtctacattactggccatcttatagattgatagcaattgtgacaaaagaaagataatgcaactcgctgcattgcactgggattcatgggctataaaaagtggctcatgtgagttcaacttttaatgtatggtattttctggccactgaaaagtctaacacatttaaaaatcagtatgatatcatttgcaaataaactacattatacttgaatagaattcaactttgattagatttttatggccttaacaatacactttacattggtattagtcctccatgataataaagtaggtaaaattctataaatattagatctcatctatactcttttcccatgacctacatagtattactaattgttttgtttatacagttacatgtaaattctatcttattcttgattggctaaaaaattacacaaacaagttaaaaagaactgaagaaaatatgaacagtgtcctagttagatatctatatttctcaaattttatccttcatatttgcttgatgctttaaattttactatctaatcatagtttgctttagattttaagatttaaatctcaaaatttatatattacaattttcgttttgttacaaagaagtgcttttgctaattgttaaagttatgtttctgtgtgcaaaatagacattttttttggtgtgcagaagacattgcatcaaggcctatttttatttgacatattactacacaacccttgctccagtcagctaaggctagggaggaagttgcctaaggccgcccctttaatagggcttgtaggcctggcagtattccttagaaggcactgtgattggttgtctggtatacctgggatatagtctctaggggtcagtgcaagcaaagttttgttggcaatggtttgttagttaggaaaactaacaaacagaaaggaatagcatcgacatcaacaaaaaggacatccacaccaaaaccccatctgtaggtcaccatcatcaaagaccaaaggtagataaaaccacaaagatgtggagaaaccagagcagaaaagctgaaaattctaaaaaccagggcatctcttctccaaagggtcacagctcctcgccagcaacagaacaaagctggatggagaatgactttgatgagttgacagaagtaggcttcagaaggtcggtaataacaaactgctccaagctaaaatttaggcccatgttctgtaggatattcctgaggtctgatatatgtacatatgtatttatatatgcaatatgagaaccaaaaatgcatttatatgtttatgttgttcatgagaggaagctttttgagggatattgtctgggattttttttctcattttttacactgagttttattgaaagtatatatgtacatagtttgaacaagtaaagtaaatagttgcatgcattgttattaaaaaagataagtactttgcacatttcctcatcttcctcagaagcaactatttgcattcttttagttttgtcttttggtgttaatattcatatttctgagcaacatgctagtaatactccttcttaattaaaaaaaatttaggcattttttattgatttaccactaggaaggatgaggatttattcctctttctctcccctgccaccactacacatgcactctttccactcccgtcctctctttatagttatattgtaattttgcttagatctatattaaacatttatgttgttatgactatataaacattagtcacagctgatctatgagtaaactatgattatgtttccgtctatgtatggctttttgttttatctggagttatattgatttttcatttgctaggttttctatttatctaattatttatctaattatgagtaattcatcttcatcagggaatctaagccttagagatttaatcgtagtctgttaataacagttaactacaaaagaatcaatagtgtgcctaaggttctagatagaaaagacttttggtcaaattttatgttttgagtatttacacacatacaacacatgcacatatgcatatgtacatttaaacatatatgtaagtatacatacaaatgtatatatataccacagacattcacacaattacatatatatgtaatgaccaacatcatcttgcagagaaatgtgcttatctacttgtttatttgaattattgcataatttaatttataatatccccctgggttctatgtttttgttaaattgcttgttaacattaactttagtctttgtattagtttctggtggctgctgtaacacattacctcaaagttaataacttaaaaaattacagaaatttattatctctcagttctggaggccagaagtccagaatccacttcactaaaccaaaacgaaggtgtcctcagggctgtgctccatcctcaggttctaggggaaagtttgtttcttgacatttccagcttttggtgtctgctggcattccttttcttgtggctgcatcacatcaatttctgcatgccattttcacatcacctccttttctgtatgttgaatcttcctctacctctctcgtaaggacacttttgatggcatttaggacccgtatggataatccaggattatcttctcaatgtccttaagatctcaagatccttaacttaatcacatttgcaaaggcccttttttcttataaagtaatatttacaggttctagggattaacacctggtatctttgggtggccattattcacccaatgacagtcctcaaagcatgtcattgaaaaagcctttccaagattgaggcttggtgaagggttatggtaactacagagaaacagaagaaaaataatgtatattctagcttttggagcagttgaaatatcctgcttaagggcctataatcaatgtgactctaatagaggtttggacttgatgggaaatgaaaattctgaatccctatttcaaatttgttacaatggggatttttgaatccttggtcacatggtgcagggtaataacacctaccttaagtgtcaatgaataaaaggaggcatagtcatggggctatttttttttttttataatttcaactacacatatctctttttgcattgtgaacagctctatcttgattccctttggccactccgcagctgaccaaatctagaagtcttccgcttggcaaaacaaagagtagtatgtttcaatctgatttctctggacagagttatagacctctgaaaacaagcttaaatagaggtgatgtgctgtaaaaaaatctgggctggtagagtagagtgttttcatccttaggtaattattaataaagccataaaatttattttatttttttttaagacagagtcttgctctgtcgtccaggttagggtgcggtggcgcaatcttggctcactgcagccttgaactccaggctcaagcaatccttccacctctcctacctcagcctcttgagtaacagactacaggcgtgtgccactacagcaaattttttttgtattttctgtagagaagtcataaccatcatttctcttcaagggataattgatattattaaacttccaatgagtggattagtagcgatcttggctttgccataattttactgactagtacaggatatacttttcctccacgtgatacagtgcttatctttatttttcaattttaattttaatttatttatttttttaagatggagtctctgttgcccaggctggagtgcagtggcgctatctcgtctcactgcagcctctgcctcctgggttcaagcagttctcccgcctcagcctcctgagtagctgggattacaggtgtgcaccaccatgcccggctaatttttttatttttagtagagatggggtttcaccacattggtcaggctagtctcggtctcgaactcctgacctcaggtgatccgcctgccttggcctcccaaagtgctgggattacaggtgtgagccaccacggctggcctacagtgcttatcttaaaaatgatatatgttttatttgtttccctaatgagatattctttgcaaatttgtgagatataaaataggctgtgcttctctgaaaaagaaatcaaaatagccgcatactgaaatttctggagataaggaatgaacacgaaatcaacatttaatattagtagtcatttattaggtgttacttaaagtagttgaaacaaattggttcttttgaaatgtttgaatttgtgttctaagttaatttaggaaggcttcttggaggaagaggaagggagattcaagaaaagactttaagtagctatggtcttcaaatgttgagggtggtgaaaggagtcatgtaaattggggataaaagggctttaaggaaactaggaatagagtcctagcaagcagtgatgaaagcaattaagcatatatggagcacttgaagaaataactccttattgacaaaggtggatagaaggtaaggaatgtgtctggtcagtgatctccaagtgtattaattcagactttaggttttcatatttttgtgtacatgctttatataaagtatacattatttcttaaaaaacagtttgagtaaccgcccttaaaccaagttacaaagtacaatctctagaataatgacaataatgttgtaccacactatcagcacatcaaagtctcctttgcaagtaatcctgttgtcttagatctggcattttttaataatagggacctgttttcctgttggaacacttagtgcatttggaattaaaacttatcctgcttttgtttgctttcttccccctttccctggcagcttagtgaaactatgaaacaggcacgtcaccggctagcatcctttaaaaccgtgattaaaaaaaagggatcagtgtttccagatgatggaaggaaaagctttcttaccagagaggtaaattaatttctaatacatgatttaaaaaaatacaggtaaaaaatacagataaagatttacttatatctcagcataatttagaactgtaaaataattggaaatagccttaaatacccaatagtaggggatgcttgagtaaattgtgacatatccatatgcagccattctaaaaaatattttcaaagaatatctgaagataagggaaagtgtctgtgatataaagttaagaaaaaagttggatatgaaattaagtatgatatgatcttaattaaaatatatgtatatgtattcaacaaatacttatggaatgtctgtgattgccagcattgttctagaaacaggacttatagtggtgaaaagacagacaaagatccctcaaggagcttctgtgctagttgggaagcatataataaacaagcaaataaatatagaatataatttcaagtgataagtgctatgaagagaaatacagcaaaataaaaagatggaaagagttccatgtgcatagacaaaagcctaggtacaaatggcacaagaggctaatactgattatttctgggtagtagtattacaggtgattttcttctgttttttatttttaaaaattgtcataaagtatgtcactttctaatcaggaaaaaattgaaactattaatttttaaaaagaaaaattcttttgattcaaaacttaagtgagtgtggagctaggcttaggaggatatgtaagtctatacttataaaatgacattgttttggtgcctacctcagaattcacaaatttggatcctaaatttatgtgttttcctgtgtgtacttaattttggcattaatgttttataggcagcatctagtaaaatagaccattaatttattttttaataaattatgtttttttgccaataaatatgttatttttttgccatcatcaactgcctcatttagttctttcccagttttacttcctaattagtatactcttatattttcctggaatatgcatataatatatataatatataaatatatagatatataattttgtatttttttccatatcttgacccaaccattaaaaatgtttgtctcatatatgttggcaattggttgaatactaaactgtaatgtttttctctttaattacaactaagaaatttatagttaaatttaaaaaacaagtgggcgtggatatgtgtccatgtatggcaacacatcccacgtgcgtttatatggttgtctttttctagcattgccttgtggctcctcagagtttcttttgtacctaaattattttcagatgttggtttcttgacagttttcatacctatcgtggtttggtagtactatagtttgggccattagactgactccagggtactgttagatgaggtgattagacactttctactaaatcagaaaaaaaaacacagttatcagatcttagagatggatatttatattgcttggaacatgctcagacctttcaactggtgtttttccagaaagtgtactattcacagttctgattgaaataattatccaatagacgggaggattaagtctgagataacatctttgtataaaccagttttttacgtcagaggtgccatttaagtgtaattcattattgttatggtgataatgatgaattcaggctacctacttgcttccaaagaaagcatatatgtttttcaggtaaaaatatgaaaaacaaatctactcaatacaattgggaatgatctaagaaattggtgaaatttttcttattacttgtatcaagctttccctcaaatctcaacaattttctaccttcttagttgtgtgaagtgggaatttgcaaatcagaaagaacaatctatgattgagttgaaccctggttttatttcattattagtctttagtgacattagaatctgtctggttgttattgatccggatttggagatacaagtggaacacatacttgcttgtactctggcaggttgccaagactaaaatcatgagtcttctgaaattgttactggctagaataggtgcaagttgtcatttataaagttaatatattctcctgttttattccatatggttttatatgtgagcgctttgtttgtacatatgaagtagaactcatgttttttccctttactgtgtattagactaccaaaacctactaagataattttagatctttcacagaaactcaacttagtctcatgaatatgttgcttcctctagacctatttatatttgtagtaattttttttccaggaagtgctttccaggaaaccagcatccactgggataaatacaggaataagaggagagttgcccattaaggtccatcaaggtcttttagctgctgtaccttaccagaattatatggaaaatcaggtagggaaatataaaaagtagaggggaaagacattggcttattagaagtatccacagctaactaaggatgggataaagggttaagatatccagtattttttttaacggactttattgagatataattcatataccatacaattcacccatttaaagtgtacaattcattggtttttagtactcacagtttgcacagggttgtgcaactgttaccacaatctaatttagagcattttatttttaattttttaattaattttttaaaataacttttattttaggttcaaggatacatgtgtagatttgtcatatgggtaaattgcatgttacaggggtttggtgtacagattacttcgtcacgtgactttacctaataggtagttttcccatcctcaccctcctttcaccctccaccctcaagtaggccctggtgtctgttgtttccttctttgtgttcatatgtactgaatgtttagctcccgcttgtaagttagaacatgtggtatttggtgttctgttcatgaattagtttgcagtttgcttaggataatggcctctagtttcatacatgttgatgcaaaggacatgatctcattcatttttatggctgcatagtattccatggtgtatgtgtaccacattttctttatccagtctgctgttgatgggcatttaggttgattctgtgtctttgctattgttaatagtgctgtgatgaaaatatgtgtgcatgtatctttaaggcagagcaatttatattcctctgggtatataccagataatgggattgctgggttgaatggtaattctgttttaagttctttgaaaaatcaccaaactgctttccacaatggccgaactaatttacattccccttagtggtgtataagcattcctttttgtccacagccgtgtcagcatctgtaatcttttggctttttctgactggtgtgagatggtatcttgtggttttgatttgcatttctctaatgagtggtccttggccatgtgtatgtcttcttttgaagtgtctgttaatatcctttgccctcttttatggagttttttgcttgtaaatttgtttaattccttgtattctggatatcagacctttctttgatgcatattttttcccattctgtaggttgtgtgtttactctgttgatggttgcttttgctgtgcagaagctcttcagtttgattagatcccatttgtcatttttttttttgttgcagttgcttttggcatcttcatcatgaaatctttgcctgtttctatgtccagattgatatttcctatgttatcttctagtgttttttatgcttttaggttttacatttaagtctttaattcatcttgagttgatttttatatatggcataaggaatgagtccagtttcaatcttctgcatatagctagccaaatatatcccagtaccactgaattgggagtcctttccccattgcttgtttttgtcagttttgctgatgatcagattgttgtaggtgtgcagcattatttctgggctctctatctgttccattggtccatgtatctgtttttgtactgataccatgttttggttactgtagccttgtagtgtagtttgaagtagggtaatgtgattcctccagctttgctctttttcttagaattgccttggctattcaggctcttttttgttttcatatgaattttcaaatagtttctatgaagaatgtcattggtagtttgataggaatagcattgaatctgtacactgccttgggcagtatggccattttaactatattgattctttttatccatgagcatgaaatgtttttccatttgtttgtgtcatctctgatttctttgagcattgttttttaattcttattgtagaggcctttcacctccttagttagctgtattcctaggtattttattcttttgtggctattgtgaataggattgcatacttgatttggctcttagcttgggtattgttggtgtataggaatgctactgattttgtatcctgaaactttgctgaagttgtttatcagatcatggagctttgggcagagactatggggatttctaggtatagaatcatatcttctgcaaatagggatagtttgacttcctctcttcctacttggatgtcattttttttctttctcttgcctgattgctctggctagcacttctagtaccatgttgaataggaatgatgagagaggacatctttgtcttgttctggttttcaaggggaatgcttccagttttgcctattcagtatgatgttggctctgggttttttgttatagatggctatttttattttgaagtatattccttcaaacaaatgcctcgtttgttgagggtttttaacatgaaaggatgttgaattttattgaaagccttttctgcatctcttgagatcatcatgtggtttttgtttttagttctgtttatgtggtgaatcacaattaatgatttgtgtatgttgaaccaaccttgcatcccagggatagctttattatggtggattagctttttgatgcactgctggatttggtttgctagtattttgttgaggatttttgcatctatgtttatcaagaatattggcctgaagttttgtttttttgttgtgtctctgccaggttttggtatcaggatgatgctggccttgtagaataagttagggaggacttcctcctcctcaatcttttggaatagtttcagtagaaatgataccagttcttctttataacatctggtagaattcagctatgaatttgtctggtcctaggctttttctggttgataggctttttattactaattcattttaagaacgtgttattggtctattcagggattcagtgttttcctggttcaatcttgggaggttgtatgtttccagatatttatccatttcttccagattttctagcttgtgtgcatagaggtgttcatcatagtctccaagggtttttttgtgtttctgtgaggccagtggtaatgtcccctttgtcatttctgattgtgtttatttggatattctctctttttaattaatctagctagtgctctgtcttattaattctttcaaaagaccagttcctggattaattgatttcttgtgtgttttctgtttctcagtttttatcagttcagccctgattttggttagttcatgtcttctgctagctttggggctggtttgttcttgtttctctagttcttctagtttgatgttaggttgttaatttgagacctttctaactttttgatgtgggtgtttaaaactataaacttccctcttaacactgctttggctgtgtcccacagattctggtatgttgtatcttttttctcattagtttcaaataatttcttgatttctgccttaatttcattatttacctggaagccattcaggagcaggttgtttaatttccatgtaaatgtatggttttgagtgattttcttagcactgatttctatttttattgcattgtgatccgaaagcatggttggtttgatttttgtttttttgtgtttttttgaatttgctgaggattgttttatggctgattgtgtggttgattttagagtgtgtgccatgtgcagatgagaagaatgtatattctgttaactttggggtggagagttttgtagatatctataaggtccatttagtcaagtgttgagctcagatcctgaatatctttgtcagttttctgccttatgatctctttttcttttggagatggagtcttgctttgtcacccaggctggagtgtagtggcatgatcttggctcactgaaacctctgcctcctgggttcaagtgattctcctgcctcagcctcctgagtagctgggactgcaggcacccactaccacacctggctaatttttgtatttttagcagagacagggttttaccatattggccagtctggccttcaactcagtgatctctttaatattgtcagggggccgttgaaatctcccactattattgtgtggttatctcagtcttgtggggtctcactctgtcgtccaggcaggagtgcagtggcatgatctcagctcactgcagcctctgcctcctggattcaagtgatgctcccaactcagccacctgagtagctgggactacagatgcacaacatcatgtgtggctaatttttgtattctttggtagagatggggtttcttcatgttggccaggctggttttgaactcctgatctcaagtgatccgcccacctcagcttcccacggtgctgggattacaggcatgagccatcgcagctggcctgagtctcttcataggtttctaagaacttgctttatgaatctggttgcacttgtattgggtgcatatatatctaggatagttaggtcttcttgttcaattgagctttttactattatgtaatacccttctttgtctttttttaaattgttatttgttcagagtctgttttgtctgaaactagaatagcaacccctgcttttttatggtttccatttgcttggtagatttttctccatccctttactttgagcctattggtgtcatttcatatgagatgagtctcttgtagacagcataccattgggttttgcttctttacccaacttgccactctgtgccttttaatggggcatttagtacatttacattcaaggttagtatttggtgtgtgcagatttgatcctgtcatcatgttgttagctggttatacagacttgtttatgtggttgctttatagtatcactggtctatgtacttaagtgtgtttttgtagtggccagtaatagtctttcctttccatatttagcactctctgcagcacctcttgtaaggcaggtctgatggtaatgaattcccttagcatttgcttgtctgaaaaatatcttatttcttcttcacttatgaagcttagtgtggctggatgtgaaattcttggttgtaaattctcttctttaagaatgcttaatataggcccccaatctcttccagcttttagggtttctgccaccaggtttgctgttaacctgatgggattccctttgtagatgacctatctcttctccctggctgcctttaacattttttcttttattttgaccttggagaatctaagaactgtgtggttgggggatggtcttcttcttttgtagtattttgcaggggttctctgcatttcctgaatttgaatgttggcctctctagccaggttggacaaattttcatggatgatatgaaaatatgaaatacattttgcaagttgcttggtttctttccctctcagggatgccaatgagtcatagatttggtctttttatatacttccatattttttggaggttttgtttattcttctttattcttttttctttatttttgtctgactgagttattttggagagccagtctttgagctctgaggttctttcctcagcttggttaattctgttattaatactactgcattatgaaattcttgtagtgtgtttttcagctctatcagatcagtttgcttcttataatggccattttgtctatcagcttctgtatcgttttattgtaatacttagattccttggactgggttttaactttctcctgaatgtcgatatttttgttcctatccatgttctgatttctattcctgttatctcaaccatttcagactagttaagaattattgttggggaactagtgcagtcatttgaggtaagaagacattctggctttttgagttgtcagagttcttgcactggttcttatgtttgtgggctgtgttgttccttcagtctttgaagttgctatcctttggatttttttttttaatcctctttgatgtccttgggggtttgattctggtataagggggagtcagttgactggcttcatttctggaagattttaggggccagaactcagctcatgactcttggactgtgtgctccaaatctggggggctggtattggccctggctttgttctctggcctcttaaggttaggaacctgccacactggaggagctaaggtgttcccaggctgctggtcacaacacactgatggatggtgccagccaaaacgcttttttgggtggtggcaatgggattcatgcttgtttttatgtgccagcagcagtggcagcgtggcagggtacacgccgtggtggggtgccggcaggtgcaggggtgctggcctccttgtgggcatttgcagtggtggtggttgcagtgctgcaccagaggatggagcggcgggagtggggcctactggcatcagtgtgcatgttcactctggtggcagtgtcagcatgtcatggggcactcacaggcatggggctggttccctccaggtaggcgttcatgtgcagcagtggccgtgcagggcagggggtagggctgctcgtctccttgagtgcctttgcattggcagtagtgacacaccattgcaggcagggtgcgctcacattggcagcagtggcatggtgggatgcatgcacactggtggggaagcagaggtgaggtctgcctgcacacacacatgtgagtaaaatgatgtaggtgttgctatggatgagtgcatgctggaaaagtggcatgagggaggacgcagtgggggaagggcataggcaggctcatgctggttggtgtggtctgctgtgatggtcaggcatggtctgccagcacaggagctattatgtgggcctctgggaggcaccccggtgggcatctgaggttgcactgcaagcagggctggggccctgggagaggctggtagacaggggtgcactcatgtaaaactggccctgtctcacgggcaagatcgccctgcactgttcacgtccgacagttcccctgtggctaatgtctcctaggggagcaaggtgggccttgggggatggacagcctgaccatgccccactacagatactcctttaccaaaccctctaggctttgcaccggctggaattctgcccaccacctctctaagcagctctccctgccagcgcaagtgtcagtggggttatggggtctcctgctgccaggattccagaggtctgtggagtgagcaggtctcttctcacttgttcaattcatcccttccccaggagccactgggggccaggaacaagtcctggtgcacggtagccctcttcaaggttcccaccttcctcctcctttggcccagcatctgtgtcttccctctgtccactcttaatgccttccctccagagatctgctaagagtgtacctaatgttccagtctctcggtagtagatgttcctcctggctgcttctagccagctatcttgtttttgggatttgctctagagcattttcttcactcctaagagaaaccctctatctcattctctccttgcccttaacctcaatcctaggcagctactaatctaccttttgtctgtataggtttacctatactggacatttcatatgaaaggaattatatgatatatcgtcttttgtgactgttttttctctttgcataatgttttaaagttcatccacattgtagtggatgtatcagtacttcattctttttattgctgaataatttattgtatagatgtaccacatttggtttatccatttatcagttagtagactttggcgttcttttcacttcttggtgtttatgaattatgaacgattgtgtatgagcagttgtgtacacatttttgtgtggacattcatttcttttaggacattcatttctaggagtgaacctgctggatcatatagtaattctatgtttaacatttcaaagaactgctaaacagttttccaccagcaatatgtgagggttccaatttctctgtatcctccaacacttattattgtccttctcttctgttatagctatcctagtagatgtgaattggtatctcactgtccttttgatttgtagtatattttcctgatgactaatgatcttcagtatcttttcatgtgcttgttgcccagttgtgtaactcttgtggataaaatgtcatgcatgtgctttacccattttttaattgggttgtctttttattatcaaattgttaagtgtttatatatatataaatttatacataaaatgtatatatataatatgtatatattctggatacaagttccttatcagatagttgatttgcaagtattttctcccattctgtagactgttatcttacttgattaatagtattgtttatggcataagatttttaaattagtcacttctttttttcttatgttgcttgtgcttttgatgaattatctaataataattgtttatcttgagatcatgaagatttattcctatgtgttcttttaagattttatagtttttagctcttaattttaggtctgtgatccatttcgagttaatttttatgtatgctgtaaataagtggttcatcttcattcttttgaatataggtgtctagttgtctcagcatcacctgttgaaaacactattctttcctcattgaattttcttggtactcttgtcaaaaatcaattgactataaatgtgagggtttatttctgaactttgagttctgttccattgttctgtatgtgtcagtattacaatgtcttgattcctataactttgtggtaacttttgaaattgggaggaatgagatcttcatctttgttcttctttttcaagaaagtgttttgctactatgggttccttgcatttccatctgaattttatgattaacttgttaatttctgccaaagaaaagccaagtggcattttgatagggagtgttgtaaatttgagaaatattaccatcttaccaatcttttctcttgatccatgaacatgttatgtctttccatttattttgatcatctgtcatttctttcaattatctttttagttttcattatacagtcctgcactgtaaacattgtataacatttgactatgctgacctactaaaattataatagcagtgacctgaagcctagaattttattgcaatcacattgtttcttcctataatagctacatggtgctgtgtgtgtgtgtgtgtgtgtgtttgtgtgtgtgcgcgcgcgcgcgtgcgcgttttcattgtttttttctttaggaacttgactatgaggaacctgactatgaggaatcttcatctcttgtaactgatgagaaagggaaagaagatttgtttgggagaggccagcaggaccagcaggctatccattctgaagataa

SEQ ID NO: 86 - DNA, 32742 bp, Homo sapiens
  source 1..32742: mol_type = other DNA
ttttaaatttgcgttgtaagatttattttggctctccccgcctgttctttgcacattaaaaatgaaaaagtttgtagaactaagctaagcagatggtcttcctgcaaaaagaccgggctgaagtaaagcattgttttggagctggttcacagaaaaaaggcaaaactggttatcctgacttcaagctccaacataaactgctcgctttctccgggaaacttgccccgccacacacacttgactgcgtggccagttctttcgaagcctctcgctcccaacacggagttcctcccatttcttcacagtcggctctcagcagctgctgctggtttctcggctccagcaccacgagtaccgcactctgaggtttacaaagcactctgcttcaccgactgtgatcctcacagtcctgtccggtggcctcacgcaggtggcggtgcagcctttcaggcccagagcggccaggagcgaagcccgcagccccgcctggaagcgcagcgcggtcggtcgcgcgcccctgaggcttggaggcctgggcttcccccagcagcgctcgagcaccgcccagtcgagcctcacaccggatgccacttcatatttgggcccagagctcaattcgcgccgatgcggtccgccgtccttaaatctcttcagccaggatctctccccgactgcaaagcagccctgggcgggagcggcaacatctccacgtcacccttttggagccgccgacattcagaggggcaggacacgggaacgcgcgctgtcttgctttacggcgcgggtgcgcgagtttgcggcagcgtgacgccctcaagttttggcgggaaaagcgctgcatttggattcctgcagtggtgggcaaaggacagtccggtgaggaagggcggccggtagagtagggaaggtttctaaagaaggagttcggggtctagattagtgagggagggcatggtgggagaaagttagcattgactagcgcaggggattggagagactcctgcggaggggcggtttcggagggtggaggaatggtaccaggaggttcccgttgtgggggcgggggcaggagggactaacccgctgctagctaagaaccccaaggaagagtcccagcccttcctttcgcctctgggggcagtttggccccgccccggcctttgggacgggtggggctgtggatggggatgggaattggaattgagcaattgggaggaggcgctgccgcaggcgttttctgccccataccgctccctatatcctcttcctctcttccccagacccccacctctccctcctccttccccagtcgttcgccggaaagcatttgtctcccacctcttcataacaacaattaatttcctctggggcctgaggagggcagaatttcaaccttcggtgtgcttgggagtggcgattgtgatttacacgacaaaatggtcaggtttagaatagttgttcgtggttgaaagacttggataaatgtggatgagatagaaggggaaggcaagagctgttaattttcgtgggcaatcctggggagaggcggggctcagtggcttcactggtgatcttacactctacatcttttctggattcctgccttttacagccgaggtgctcggtggagtcatggcagtgccctttgtggaagactgggacttggtgcaaaccctgggagaaggtgcctatggagagtgagttcttttaagcttgccttcgttttctgagtgcatattcattgttttggagtctcacactctggtgatttagaaagtagatgtttgagatccaagggttttggcaactgaagttacacagccttttgctaggattaaaaattttttccttccctttaaaaaaaaaagttttctttgtagagagctggaagggacacgaagttattgtttccatgcccacaaatggcttctcagggtttaagcattgcggttaatgagcaaatgagcagactctggagattgcctgcctggtttcagatccttgctctatcacatactggtcattgttttgtgatcttaggcaagcttcttaatgtcattgtgtacctctccttcactacctttagggtggcaataatcgcatctaccccataggagcttaggacagtcagttacacaagcacatatagtatgggattaatgctcttaaaagtatatgagtagaacatgtatatatgtgatgtggcttagaattatctcaatctattttatgaagcgtttattaaatgacttgtgtgacagcataatgacgtctttggagggttagctattgtatttcacattttagaaaagagtagtgtgtgttgagaacatagcagaaaccacttccttggtttctcctttgtggaaaaagtaatagaggtaaaatcgttttggatgagtcatgtttaatctttggaagttttagaagaaatggaattctgtaatgttaaaactcttttcctttttagagttcaacttgctgtgaatagagtaactgaagaagcagtcgcagtgaagattgtagatatgaagcgtgccgtagactgtccagaaaatattaagaaagagatctgtatcaataaaatgctaaatcatgaaaatgtagtaaaattctatggtcacaggagagaaggcaatatccaatatttatttctggagtactgtagtggaggagagctttttgacagaataggtatggaagaaatttaagataattattttaaacaagtttttaaatttgttttttaaatcttgggcatgctatttggtcgttgtcctttcaaaattgctcatgcaactgtgaaattggaatacattatctttaaaaaatttttccacctggtgttaataacataaaagcatatatagagtcaatgaaagaaaacttctttcccaagttatataagtgattttgatttaagattggtgtcttacagaatttaagagtgacaaacaagttttatggtacatcataaatgcagtgtatcctaaatgcaatgtattgcctacacaattttttctttgtagacattctagttacatgaaatcattgtatacattttatacatttacagatctaaaatagcatgctgtttcctcttggtttacatgaaataattgagaattttctaggattgctttttgtatattaagtaaattctatgtttgctattaatacttaaatattcgatgtagaatcaaaggattgatatttcagaacactgagaagtacataaaatctggatctaaatttataatttaaatttataatttaaagctattgtattaaataagtttatcagttaaaaactgataaagaggtattaggatctccagtgtgactcaggagagagttgagggtaaaagaaatggagttaatgagagagatcaaaatataaaaagataactgataaaagaactttcataataaaactgtttcacgaaggacctcacaggcatttgtggttttgtactgtgagactatatgaagtttaaatctgagccaggtgtggtggtacatgcctgcaatcctagctacttaggaggcaggaggattgcttgagctcaagagttccaggttacagtaagttatgatctcacgccagggcactccagcctgggtgaaagaacaagaccgtatctctaaaaaaagttaaattataaaagaagtataatctgtaaaatatttagtgaaattggcttagatttgcccagacttcccctttggcattatatttcaggaatgagaaaaataattagcatagcatttagaagaaatggggggaatttcaaggttactaaataaatcagggttagtataagaggaagcagaggctttgaagtcatggcttgcattcttgatttggatattggttttctctttataatttttctgtgatgacgccttttgccacctaacacaggtaaatgtgagttaagccccatatgtgttagtggactcctgaatcttttgttggcatttgcttctgtttgcctaagcacatttgtaaatgtctaagcttcaaattaagaagctatgtggttgctacctgattatatttagtcaataaacttactttcatatttgttttagagccagacataggcatgcctgaaccagatgctcagagattcttccatcaactcatggcaggggtggtaggtatagttgtctatttcccttttacttaaaattagagtgaatacattacattaccaaattctagtgtgtttctctctgcatccctcttaggtttatctgcatggtattggaataactcacagggatattaaaccagaaaatcttctgttggatgaaaggggtaagtttagcattttatcactacctaaaataaaataaaataattacctaaattattttaattacctaattattttaatatagccatacaaggcaaaatcaagtctttttgcattactggaatttcaagacaagatctgaaaaatcaaggaaattttggagacttcgtatatttggaaatcacaagtctcattttgcaatacaagtgcggatcaggtagagaaatctgacctaggtgcaagcctagctcactatatgtataagaataatttttttttttttgatacaggctcactgtgttgtccagtctggggtgcactgtattatcacagttcactgcagccttgacctcctaggctcaagcaatcctaccatctcagcttcccgagtagctaggaccaaccacaggcaggtgccaccatgcctggctaatttttgattttttgaagaggtggagtcttcctgtgttgctcaggctagtcttgaactcctggactcaagcagtttaccagccttagcctcccagagtgttgggattatagacgtgagccaccatgcctggccaagaatagtttaaaataatcctttaatggattaataaagggaagttcctgtggaataccctggaccttagtcttgtcctgttcactctttttttatgtatgacgtggataaaaatgtaagaaatttagttatattttctgaatgtcatcaaattgagaaggatggatagcgaaagctttaagcttacagggtcagaatcaaaaaagaaatgtcagctgtatgaggcagtagtttttgtctggtttaatgctttattcttagtattagaatagtgcttaacaaatggtcagcttttttttttttttgaaacagagtcttgctgtgttgcccaggctggagtgtagtgacatgatctcggctcactgtaacctctacctctctggttcaggtgattcttgtgccttaggcccctgagtagctgggattacaagcctgagtcaccacacctggctcatttttatatttttagtagagatggggttttgtcatattggccaggctggtctcgagctcctggcctcaagtgatctgcctcccttggcctcccagagtgctgggattataggtgtgagccgctgtacccagcctatacatgcttttttcttatgtgcatatggattttactttttacccctttaaactgagtttatatgacataaaaatctttatttttatttaaaactttaaaaattcaggtacacaaaaattcttatgtattataatgaaatgtaaatatatgtatatcaacccacctggtttaaaaatacaacattattcgtatataagaatgctcacagtggtgatgtttttaatatagcaggaaactaacccaaatgtctgtcaacaataaattatgaaatgcatggcttttcaagccatgtcacaagcagtgacacaagcatgtcacaagcagtgacatggatgaatttcaggtatataatgatgtagagcaaaaagagacagttgcaaaagaattcatatggtctgattctgtttatacaaagttcaaaaatatgtaaaacctagtatattgttcaagtatgtaaacatggagaaaaaaacatgcagaaaagcaagggtataataaaaccaaattcagaatggtctaagaaagtaggggagggaatgtatttaaggaagtatttaaagatttcaaaggaaatagagcattgtttttctaaagtgagtgggtgtttattacattgttattctttatatcttgtattaatatacaagatataattctttgtttctatttaatatttaggagtcttttaaaaaaagaaataaaatgttaccagtatttaatgtcctcctgtttatttcatcacaaatatattcttcctttgtttttctaagagctaaacacattcctacatttaaattttattatgtgcagttctctaacatagctgagtattatgttgcagacataacaaagtccaaggaatactatagttatccattagtattttaagtgattactactcataagtaatttgaaactcaatctcagtggtttgtccaatagtgtcatatttaactactgaaaagataatcaactgggtgcagtagctcatgcctgtaatcccagaggctgaggtgggacgattgagtgattctaggagtttgagaccagcctagacaacatagaccctgtctttatgaaaaattaaaaaaaaaaattagctagacatggtggtgcacacctggagtcccagctacttggaaggctgaagcaggaggattgatcacttcagcctaggaggtcaaggctgcagtaagctgtgatcacatcactacactctagtctgggcagcagagtgagacactttctcaaaaaaaaaaaaaaaaaaaaaaaaaaagggtaatcacagtagctacctcctaagtcagatagaggtaaacatttcattggtttacatattgtgtgaatgtacttgatttttaaagaaatcagtcccctattttgagacatttaagttgtttctaacttataaaataggacagtgatggcttctatcaatttgtgtaaaaggccaatataaaaattgcgtcatgctataatattttttatgctataatattttttatgccattagcctttttgtcccacttacacactatttcatgttagtatgtatagatataccttgttgattgttttcaaaacctacctccacattttccattgtacaaatttggacatttatttacaaataatattgctatgaatattcttatgtttatgaatttgtgggattatttctatggatatagaagtgggaattgctagttcaaagagtgaatgtttcacagtttagtatgttttgccaaattgccctctgataatagagggccttttctaactcttaagactgggttacattcctttgctctaagatcctatagtgctctatatttttataaccttcataacagttttctattgtcagtcttcactaatttatctattacctgcattggctggcatagtgtctgtcactaagttacagtagatattcactaaacataagttaagtcctgcctgcagtttttgtgtgttgaagatgggaagttagggtggaagttgggtcttctgatattttttttttgtacagagtttgtcctctttttctcagactctctactttgaagaaaaaaattactgtggtttgttgaattttggtgtgtcttcacatattttcttctgccaactgggtttgtttgctgctgagaaagttgtgcctaacatactactgatgtttccttcctgccctccaccctacctgatgaggggccttgctttactttcatctcaggtttagagtgctcttttccagaagggcagccccttctgactccagcctctttctttaatctggtccagactgttctgtgtgttgataatacttcttttaagttaatagaagaggtgaggcctttttctacttttagcatagatgatgatttattttatttttttaaatttctttttgtctattttgcttattttaagagaagttctacaaaccttaagtaacaccagtgattttttttcagtaaaacttaattcctgtaagtatatctatttgcaaaacatttttattcagtgtcatctttttttcttttggtttagataacctcaaaatctcagactttggcttggcaacagtatttcggtataataatcgtgagcgtttgttgaacaagatgtgtggtactttaccatatgttgctccagaacttctgaagagaagagaatttcatgcagaaccagttgatgtttggtcctgtggaatagtacttactgcaatgctcgctggaggtaagagctatttaatcatggtaaaactcctataaaaagtcagattagttatactgaaataaatgaaataaaccaaggaattcatgtttatataatagtttttgttttcttttttaagagacagggtctcactcttggccagactggagtacagtgagctgttatagctcactgcagcctcaaacttctaggctcaagcaatcctctggcctcactcttccaagtagctaggaccagtggtgcctgccacaagacatctggctaagttttaaaaattcattgtagagatgggatcttgctgtgttgtccaggctggtcttaaacacctggtctcaagcaagccttctgtcttggtctccaaactgttaggattaaagtaaagacatgagccatggtacccagcttttatagtagtattttaatagtgtcttgatcggtttggtaactgctgtaacaaagtatcatagactgcatagcttataaacagcaaatttatttctcacagttctggaggctgaaaatatgagattaggggtgccaacctggtcatgttttagtgagggccctcttcctgatttgcagatggctgtcttgctgtgctctctcatggtggacagccaagagagcagaagcaagctctattgtggtttttttttttttttttagaccagagtcttgctctgtcacccacgctggagtacagtgatgtgatctcagctcactgcaacctctgcctcccaggttctagcaattctgtcccaggctcccaagtagctgggattacaggcatgcatcatcacacccggctaatttttgtattttgagtagagacagggtttcaccatgttggccagactggtctcaaactcctgacctcaagtgatcccccaacctcagcctcccaaagtgctgttttttgggttttttgttaaatgaccagatgttgtgagatattgtgtctgttttttgtttttttgtggttttttttgagacagggtctcactctattgcccaggctggagtgcagtggcacaattcaaggctcactgcagccttgagctcccaggctcaagcgatcctcctgcctcagtctcctcagtatctgggtctacaggcgtgcaccaccacacctggctaatttgttgtgggttttttttcacagacggtctctccatgttacgtaggctggtcttaaactcctgggctcaagtaatctgcctacctaagcctcccaaagtgctgggattatataattagtgccctataaagatacaatattgtccgggcacacaagcccttattagacattaataagctcttaataagagcactaataccattttttgagtggtcccatcaccaggacctaattacgtctcaaaggccccacctccgaatgccattgcattatgagttaggatatcaacatgacttttgagggggatacaaatatttagcacattgcaaatagtaacttatttataatcccaaagattttttaagctaaggcatgcatagttattaaatatcacaacacttatctctcctgtgtatcatgtaaacatttgtgaaaacaagactagggcaagaaatgattcatctgttttttggtttttttttttttgagacaaagtcttgctctgtcgcccaggctgcagtgcagcagtgtgatcttggctcactgcagtcttgacctcttgggttcaagtgatcctctcactttagcctcctgaggagccaggactacagatgcacaccatcacgcccagctaattttatttattttttgtagagatggggtctcactatgttgcccaggctggtcttgaactcctgggctcaagcagtccttctgcctcagcctcccaaagtgctgtgattacaggcctgagctgccatgcctatcctgattcatctatctttgaagtgcctctaaagtttccaagttgggattcttagtgtgaaaaccatattgaattaattcaaaggaaacttttcatggatttatattattatttttccttgaaatctttataataagaacatttaaaaaaactgggacttgctttgtttttagaattgccatgggaccaacccagtgacagctgtcaggagtattctgactggaaagaaaaaaaaacatacctcaacccttggaaaaaaatcgattctgctcctctaggtaactgaattatcttgagtgaaagagtaccgatttcttggatatgaagtcttgtgctatttgaattttttcttacttttttttttgttttaaacttacaaataattcatgttcgttgtagataaaatagtaactataagtaaaaaattaaggaaaaaataactctttagtcccagaactctgcaatagatttttaaaaatattttggggagtgtatattcagagcaacttgaatctgctcttagatggctttttacttaaagttttcatatgtgctatactttgttgcaaatacactcgtttgttgcttaattatagggatgcactctaacaaatgtttcattaggtggtttcatcattgtgtgaacatcatagagtatatttacataaatctagatagtatagcttactataaatctaggctatttggtataccctattgatctcaggctgcaaacctgtacagcatgttactatactgagcactgtaaggaattgtaacataatggtatttgtgtatctaagtatagaaaaagtatagtaaaaatacagtattataatctaatgggactgtctgttatacgtgtggtccattcctgactgaaacatcattaatgtggcccataagtatgtaaaatgaatatatgtatattatttatatgtgtttttatacaaaatgagatcacactaataatattttgtaactgtttttggttttagtgcgcagcgaacattcttccatgactataattgtaggtctacatcgttggtttaaaggctgtgataatattctgccatgtggatatgccttactttactcttttaatcactttgttggagatttttctaaattttcacagatacaaaagagatataagtatctgtgtaacttaatcatgacacatacccttaaattgttcattgaaatccccagaagcaaaattgcaggatcaaggatgtagtttttattattatggcttattttgtcaaattgcttcccgaaagttcgaaccatttcatcacagtctcatcaatttacattaaggaaaaaaactttaaataatagtttttcatttttattttaaatttaatactaatgaagttgtataccctttatgtatgtattagttttttgtctattttgctcatttttgtcaaggatattgtttttcttaccactttgaagcttttttttttccttgataacacattgacctttgcacttgttacaaatacttttcacaatttatcatttattttcattttgttttgctatattgacattcaaatctattatcttgtcctttgtggtccctgactataatttctttggaaaggtcttctacctctactatttaaaagttccctatgttttcatttagtgtttttatggcttcatttttccatttaaatctttggtccattaggaaataatcttcacataggaagatacgtgaattttttctcaagaaaattaagataccttaggatggttagttagattactgtctcttaaaaagttattggtaagtaaatgttcattataaaactgtgtgaataaggaggtcacgtgagaacatgacattgaagtaatgaaattcggtattgaaaatggataagaggggtttctgtatctttttgttaatctcgtcacatgaggagaaacatttccatctggctcttgttctcagttgcaaacaattgagaatcagatcagggaagactactccaagatacagcagcagagaaaaactgcatgaaattaaagcagtaatttagtagctttaattctttctcttccccaggaataatatttagacataagtaggctaacagaaaatgtgtttcttacctcaagccataggcttctctaacatgattctttcgtgaatgttgtcgtaatgtttgtttttagctctgctgcataaaatcttagttgagaatccatcagcaagaattaccattccagacatcaaaaaagatagatggtacaacaaacccctcaagaaaggtaatatccttaaactacaagtttgtttgtttttctgtggaagaaaaggtaattgcaaagttattatcacaagtcaacaacacatgatagctatgatctctgtcctcatggagattataatgtccagtagaaaaaaatacagaaataattttgtttattaataattataaaggggaaagtcagggtactatagctaagtgtttgaccaagtctaagggacagggaagacttttcttcctgaagaaattacattaaatctaagatttgaagattaaagggaagctaggcaggcaaagtaagtggcagatttgattctgaacaggggaagcagtatttgaaaaatcttagattttagaaagtctgatgcttttgagaaacttgaaagatcagtatggcacaagccgtgtctgttgtgttcatcattgtatcatcagtgctttagcacagtatatggtgcaccataggcactcattaaatatttgttgagtgagtgaacagggaagtgggagaggaagacaggtttgagatgaggccagagaggtcgctagtggccaatttgtggaagaagaccttgtaagccatgttaaggattttgggctttaacttaagaccactggggagacctctgagagattttaagcaagactatgacatagtcatatcttcggtttaaaaatatttctctgacttccttattttttttccattgttttttatgaatagggaaagattcagggtgctgtaggtttttctgctagttgtctagaagtgggaggctggtggcttggaataggttagggcaatggtattggagaaatgagatgattccaaagaaatttaagaactagtattgataggactgttaggctgtgaatggaaggagagaggacaatgactagagatgatgaatgaaaaacattcagagagttattaatgtttaactctgtcctcatggatagaaaagagttaatgtttaaacattcactcttctttaatacctctctgcatgtttcttcctccttgtcctaacttaaagtccaattctcccctgaggacactgcttcctctgaagcggtaggtgttttctttcccataccctcatgtcctttgatctggacatggtacaggtgtcctccttattcttcattgtcactttctcccatcttcctttatgtctctcccctctaacttttgaaccccaaattaaaatttctgccgtactatcacagtctgcaaaatgactcttgatgttattttcgtcatgattcttggtgatttaaatatttatttggatcatcctcctgatatcctgacttcactgtttcttgaccctctctcctatagtgatgttgtctttgaacacgctgcactgatcaccagtataattttttctgacttcctcccttaatattctaacttaaacagtcctttgtatctggacttgcaattaattaattctatctcttcagtctcttacctgctccctctctaggtccttgatttcatctttacctatcttaaatctttaggttagtcattataaatgactgctttgcgttcatcatcttcaatttccttgtccccttctctcttcatcatacttagtgggtaaaacccagtaagtagtttctgggtttaatctagtagttttctacgtactgcacacttgtacctgcacaacagattgcagcaggagaaaaatacccaaaaatgttcactttaaattcaggattactaatctcaagtgggcccttaatgcttcctggcatttggccttcgtttccccacatctttctctgtcctgttctcctaaatcacgtttttataatacttttctcttttttttttttttttttttgagacagggtctaggctggagtgcagtggcgccatctccactcacttcaacctctgcctctcaggttcaagcgattcgattctcgtgccttagccacccgagtagctgggattacaggtgtgaaccaccacacctggctaatttttatatttttagtagaggttttgccatgctggccaggctggtctcaaactcctagcctcaagtgatccccctgcctcagcctcccaaagtgctgggtttataggtgtgagctactgtgtctggtcccttaacttttattatcttctctccatcctcactctcagttgttcactttgcttcctgtgtcactgggaaatgaaagccacaagagaacttaggcaagctcccaccaccatctcctccatactaactgcctctatgctcatgtattctctttcatcctgtattgctgtagataaattgctctggatgtaagccaggtctttctcttacccactcaatgactttgtctagcaatttttctccctctcctacattattaatttttccttctctaccggatctttctcatcagcatatctacatgctttttctcccattttaaaatcaaatcataatggtaataaaatttctcttaactccacttttccctaccattccatcttcttcacaattgaatattcctaaaattgcttctcatctctaacacctcaaaactagttttcaatttcatctattttgttgccaagagtcacagtgatttttggaacgtgttgccaagttcaatgtaatagtccactgtggtcaaccgaggtctgaaaagattaaatggaaagtaccagaagtaaacaattcatcaattcatgggttttggccgggcgcggtggctcacgcctgtaatcccagcactttgggaggccaaggcgggcggatcacgaggtcaggagatcgagaccatcctggctaacacggtgtcaccccgtctctactaaaaatacaaaaaattagccgggcgaggtggcggtcgcctgtagtcccagctactcgggaggctgaggcaagagaatggcgtgaaccccggggggcggagcttgcagtgagccgagatcgcaccactgcactccagcctgggcaacagcgagactccgtctcaaaaaaaaaaaaaaagaaattcatgggttttatttatttatttaattcgagacgggatctcgctctgtcgcccagactggagtgcagtggcgtggtctccacttactgaaacctctacctcctgagcttaaatgatcctcccatctcagcttcccgagtagctgggactacaggtgtgagccactatgcccggctaatttttgtatttttggtagagatgaggtttcgccatgttgcctatgcttttctaccaaaaatacaaaaattagccaggtgtggtggttcacgcctgtaatcccagctgttctcaaactgctgggcttaagcaatccacccaccccggcctcccaaagtactgggattataggcatgagccacaatgccctgccataggttttaaattgtgtgctgttctgagtagcataataaaatcttgtgctgtcctacttcatctcacttgggatgtgaatcactcctttttccagtgtattcacgttccatgtgctacctgcttgtaactcccttagtagctgttttggttattagatcgaaagaacatatatagggtttggtaccatttgtactttcaggcatccacttgaacatatccctctgtggataaggggggtactactgtagtcagttctcagacctcttgttttatctcatcaatattttatacagttgatcatgccctcctcctttaaacactttcttcatttggcttccaggcgttacactcttctgattttcgtccttctcactggtcgctcttttcagtctcttgatggttttttttcatctgctcagcctcctactattggagttctccagggctgaatctatggatctcctttgttttcttctccacactcactccattagtgatattacttggtttcatggctctaaataaaactatatgttgatagtcacatttatatcaacctagacctttcctctgaattccaaacttacatgtcttaactgccttctgaaatttcacttgaatgttaagaggcatctcacacttgatgaattccaaactgagttactgatcttttcctttcaaacccattccttttcaaagtctttcccatgttggttaatggcaactgcattattcttattatgcagatcagaaactttggaatcatccttcatttttctcattctcttttacttcacatccagtacaccagctaattctgttaacctctatctttaaaaaaatcttagaatctgattaccttttttttttttacctctactgttaccctatcattccaaattaccatgatatctttccaaaatgttctgatttaaaagtgaattagaatatatcactattctacccaaatcctccaatgctttagttctcacgtgtagtgtaagctaaaatcagttcatgacctgtgagttcttacacaattttgttccttacattacctctccaacctcagttctgctttgctcccccttggtcatattgttgttcttcttattgttctccaagtgctctaggcacacttctacctcactgtttttgtagtgactgttcctatgtctgaaaatgctttttcccatgggacttatttgcatgtcttattctcttactttctttggatattgacttcagtgtcatctttccaataagcctttcctggccatgctatttaaaatggtatcctcttccctctaacacatttcttaaatttttaaaatttttactctcttgtggacatacgcaatccaacacgtttcttcattttattttccttcagtgtacttaccaccatttagcttactgatttttaactgtatttgtatttattttatgttattttgtctctcctcagtagaatgtaggatttaaaaggtcaagagttttttttctattttgctcactgctgaatacctgatacctagaataatgcctggcacagagtagacctaataaaatatctgaatgaatggattaataaataaaaagcaggtttaaaaaaaaacttgagcatgtttaaaaagaaacaaacttaagcatgtttaagtggtttgggtacggatcctgtagagaggaagaggctgacagtctaagagaaaggaaataaataacagaggatcaagatccctaaggaggtagaagggtatgggctccagagcacaagtagagagatgaacatttgatgggagaatggaagggatgaaaagatgtataataatacaaataacttagctttggtagggataagttgatgtagtttctgtctaatggctttattttttctctgaaatgggaggtggtagtataggtactggatggtagtcttgggaattacagaaaagtgtagttttgaaatgatccttgtggagaaaaggaaaggaaactagagaaacaaatattatctggcaatattgaggtttagctagggattgtaaccataaatttacagtggcgtcattttccatataatattcttctttataaagcttttccaaggaatcaaagaatgttggctatagcagattcataatgtttattgctattatcataaattattttttattttaaaaagttctagtcctttagccaggtctgttgtcttcatagaacattgttctgttacccataaaagatgccattaagactgtggcctgggccgggcgcagtggctcacgcctgtaatcccagcactttgggaggccgaggcgggtggatcacgaggtcaggagatcaacaccatcctggctaacatggtgaaaccccatctctcctaaaaatacaaaaaaaaaaaaaaaaaaaattagctgggcgtggtggcgggtgcctgtagtcccagctactcagggggctgaggcaggagaatggcgtgaaccctggagacagagcttgtagtgagccaagatcgcgccactgcactccagcctgggtgacagagcgagactccgtctcaaaaaaagaaaaaaaaaaagattgtggtctgagcatactccacactttgaacatgtctacagatcatacttaggtattgtaaaatacctaatttgacaaatgagttttagtaattttataacttggccatattttttataaaatcatataggaagactttgttttatatcttacaaaaattttgtgttaaataaatagatttagacatagttttacttcttcaagttgccagttgggttaatttaaaaacatacttgcatagaagacttgaaagcatttgtatttgttttcttttttaggggcaaaaaggccccgagtcacttcaggtggtgtgtcagagtctcccagtggattttctaagcacattcaatccaatttggacttctctccagtaaacagtgcttctaggtaagactgataaagattgagtagtttttgattgtagtattccccatgaagaataatacatgtatgtgttttttcataataatcgacattaacataatactgtaagcatgagaacttgtgtgtgatataagaaaggcctgatagattttattttattaaatgtatgtttctttctgtcttaatgcctcagtgaagaaaatgtgaagtactccagttctcagccagaaccccgcacaggtctttccttatgggataccagcccctcatacattgataaattggtacaagggatcagcttttcccagcccacatgtcctgatcatatgcttttgaatagtcagttacttggcaccccaggatcctcacaggtgagggaatttaattttttaaaagtaatggcagctctttattttttattgtcttaaagtccttttttaatgtgtaaatcttagatatataacttttaaatcacatgtattcttttttggtcaaggaagaaagagaggagggaggccttcatgcaaaataattttaagtcagactaaatagctatgatattactgtctttagtcctaatggatttattcatttgtcttctgtttgacatgtagaacccctggcagcggttggtcaaaagaatgacacgattctttaccaaattggatgcagacaaatcttatcaatgcctgaaagagacttgtgagaagttgggctatcaatggaagaaaagttgtatgaatcaggtgtgtttcattgattttcattataccttttcctgaagaagaatttaaatatttgagtaaaagctatcattagtatattttttaaatataggctgtggctcacacctgtaatcccagctttttgggaggctggggtgggcggatcacctgaggtcaggggttcgagaccagcctggccaacatggtaagaccctgtctctactaaaagcacaaaaattagccggcctggtggtgcatggctgtaatcccagcttctcgggaggctgaggcacgagaattgcttgaacctggaagacggaagttgcagtgagccgagatcctgccagtgcactcctgcgtggccaacagagtgagactgtctcaaagaaaaccaaacaaacataaaaatacaaagtaattagttaatttgaaaaagaaactatttaagtaaaatgttctttactttaagaaataatacttttttttattttgttttattttttaatttttaatttttagccactgtgcctggcctaagaaataatatttcttaaaagacctttttattgttattaaaaatagtagggagctggaatcattatctttgtaaaaactatgtatacttaaactgtagacaataacagttgactgcctactatgaaagacgaatacattagcaatcccacactttctcccatctcccttgattgcacccgtcaatttttattgtttatattattagagcatagttataacattggtattctaaactgtctttaaggcttttcaaaaaaaatgttaatgtcaatgaaagacaaatagggtagctgttttttactcaaggagactaaagaggcctgataactaagtgcaagtgcaatgcatgatctttcactagatcatgtatttgaaaaaaactataacggacattattggaacaattggggaaatttgaatatggactgtatattaattaggtaatgtttttgtatcagcgtcagatttcttgggtgtgataatactgtggtttgtaggagaatgcccttgttcaaaggagaacaagtgtcaaagcaaagttgaagtgaagtgatattttcattcagcttaaaatttaaaaaaataaagggcaaacaactacataaaggccaataaacacacacatatctggtagataaggccaatgaagagtatatggttatttattatactcttttttcagtttttctgtagattcgagttttcaaaattaaaaattgggggaactgttactgtgtagaaatctgaggtcagcctgatagtcttctcactcacataggtgattcactttctttcaggtagactcagagataaaatttgcataacataagaatcatcactttaaccattttaaaatgtaaaatgcagtgctttttagtatattcacaaggttgtgcaaccatcgcccctaattccagaacattgcatcaccacggggaaaaaaaaacaaaacacctctgtaccacctagaatcactctttattcctttcttgctccattcccagacaacctcgaatctactttctgtctttagggattgcctttttggacattttatataaatggaatcatataacatgtagtcctttgggtctgtctgctttcatttagcacgttttcaaggttcatagcatctatcagtactttattcctttttatggctgaataatattctgttgtgtgtatgtattacatttcgtttatccattcatccactcatggacatttgggttgtttctactttttcatcattatgaataatactgctgtgaacaatcttgtaccagtttttgtgtgaccatatgttttcaatttcttagatatatatggaggaatagaattgttggagcatatggtaactcttcatttaactttttgagaaactgtgaaatgatttttccaaagcacctgtaccattttacgttcccatcagtaatgtaagagggttccaatttctctacaaccttgccaacacttactgcctcccctttttgctatggccatcctagtgtgtatgaagtcttatctcattttgcttttgattttcatctctctaaagactaatgatcttgagcatattcttatatgcttattggccatttctttataacagtatccggatattttgtccatgctttaactggcttgtttttattgttgagttgttagagttcttttacattctggacactagaaccttgtcaggtacctgatttgcaaatattttatcccattctgtgggagaaaattcccccattcttttgttttcttgttagtgtcgtttgatgtactcaagttttagattttgatgaattccagtggatctataatttctcttttgttgcctatgcttttagtgtcaaatttaagaaactgttgcctgatgtaagattgtaaagatttatactttatgctttcttttaggagtcccagcctcctaagtagcggggactacagtcttaaagtttagctcttatatttaggtctttgtccattttgagttaatatttgtatatagtatgatgtagggtgcaaattcaaatgtttgtatgtgaatattcagattccagcaccatttgttgaagatatgttttactattagatggtcttggcacctttgttgaaaataaataggtcatagatgtatgggtttatttctggaatctcaattctttttttttccttttttttttcttcccctgtggactcaattcttttatttcatggatctatatgtctgtgctatgccgttaccacactatgttgattactgtagctttatagtgaattttgacattagaaaatatgagttgtccaagtttgttctttttttcaaggtattttggttatttgtggccccttgtttttctgtcttttaggattatcttatttctgcaagaaaaaaatttggaattttaaaagagattacattggggagtatttccattttagtatatattgagtattctttattcaaggtgcttgggaccaaaagttttgtggattttacatttgtttggattttggaatatttgcatatgcatattgagataacttacagatgggactcaagttgaaacatgaataattttatttatgcttcatatatacctgatacagatagcctgaaggtaattttatacaatgttttaaataattttgtgcatgaaacaaagtttgtacattgaactatcagaaagcaaacctgtcaggtatgaaattttcagtttgtcacatgatgtcagcacctgaaaagttttggagtttggaacattttggatttcagatttgagattaaggatgctaaacctctaatagtaactcttctaatccaataacatggggccttttttttcccatttttttagggtctttaatttctttcaagaatattttgtagttttcagtgttcaagtcttgcacttcctaggttaaatgtaatcctgtttattctttttttttttatcctgatgctgatgtaaatggaattttttaaaattttattttcaaattgttcattgctatatgcaaatgaattttgtatattgatcttgtatcctgaaaatttgctgaattcattaactccagtagtttttttgacaaattctttaggttttttaatatattaagattacattatttggcagggcgtggtggctcacgcctgtaatcccagcactttgggaggccgttgcgggtggatcatgaggtcaagcgtttgagacctgcctggcccacatagtgaaaccccgtctctactaaaaatacaaaaaattagctgggcgtggttgcgggcaccggtaatcccagctactcgggaggctgaggccggagaatcacttgaacctgggaggcggaggttgcagtgagccgagatgacgccactgcactccagcctgggcgacagatcaagactccgtctcaaaaaaaaaaaaattacattgtttatcaatagagatacaggaaattgttttacttttttttttttttttaacccagatgccttttaattctttttgtttagttgtcctggctaggacttccaacattatgttgaacagaaatagagtctttgtcttgttcttgatcttagggttaagtttcgagtctttcagcattaagtatgatgttagctgtggggtttttgtttttatggtgaaagagtattggattttgtcaaatgttttctccgtctattgagataatcatgtggattttttttccctttattaatatagcttgacctcctgtgcccaagtgatcctctcatctcagcctcctaagtagctgggactacaggtgtacactatcatacccagctaactttttaaaaatgtttttgtagagatgcagtctctgtgtttaccaggctggccttgaccttctgggctcaagtgatcctcctgagtagtgggtactacaggtgtgcaccaccatgcccagctaaattgacagttttcatcagtctgtttattttgtctaatgttagtatatccacatcagctcaccagctatcttgtgtattttcctttttttagatggagtctcactatgttgcctaggctagactgtagtggctacttaaaggcacgatcatagtgcaatgcagcctcaaattcctgggctcaagtgaccctcctgccttggcctcccaagtaggtgggactgcaggcatgtaccaccatacccagctaccagctctcttttggttattgtttccatggtctattttttttttccttttccttttaacctatttgtgtctttgaatctaaagtgccttagccaggtgtcatggctgacacctgtaattccagcactttaggaggctgaggtgggtagatcacttgaggccaggagtttgagaccagcctggccaacatggtgaaaccccatctctactaaaaatattttaaaaattagttgggcgttgtggtgtgcacctgtaatgccagctattggggaggctttaggtgggaggatagtctgagccattggagatcaaggctgcagtgagtcgtgatctgattgcatgactgctctccagcctgggtgacagagcaagactgtctcaaaaaaaaaaaaaaatcgcttcttagccttttggctaagatcaagtgtagtatctattcctatcagtttaagtgccttaatttctcttccactttttggacaggtagttttgctggatatagaattcttattagcttttgtctttcagcactttgattatgccactactgccttctagcctttgtggtttctgatgagaaatcagctgttaatcttactgaggatctcttttatgtgagacgttgctgctctcttgctgcttttatgtttctctgttgaccacagtttgactatggtgtatcttggtgtggatttcttttttcattctgttcggagttcgttgagcttcttggatatgtaaattaatgtttttaatcacacttgggaagtttttggccacaatttcttcagatttttttttttatatctaactctcctctccctcttggactcattatgtttattgttggtatacttgatgtgccacagttcttagactctgttcatttttctttattcttctttctttatgtttctcagggacagttttggttgctgtttttcctttataagggccatactttgtttccttacatgctttgtaattttttgttgaaaactggacatattgtggcaatatgtggcaactctagaaagtcagattttcccctcttgccagtgtttgttaccgcttgatgtagttgtttgttttttttagtggtgtttgtttttttttttttttgagacggagctttgctcttgttgcccaggctggagtgcagtggcgtgatcttggctcactgcagcctccacctcctggcttcaagtgagtctcctgcctcagccttccaagtatctgggactacaggcacctgccactgtgcctggctttttgtatttttattagagatggggtttcatcatgttggccaggctggtctcgaactcctgacctcaggtggctgggattacaggtgtgaggcaccatgcccggccctagtgatttttcttatataattttttaaagttggtattgtttgtcatgcatggctgtacaatttctgtcccattagttttagtggtcagctaatgattggacagagatttccttaaattctgtataccaaaaacaaaaaatctgcagagtgttctgtatttgtgttggggcacacctgcaatactcaaccaagaagtttacaacgttgcttcagccttcgctatctgcttgtgcaaaatgcaaagttagggcacatgtagagcttaggggccttctcagctctttcctaagcatatgtactgccctggtcatgggtgtgtctttttagattcccaggtatatgttggaccttttcagagtcctattccccagaaacatctcactccctaacctcttcttccaaacttcttgggtagtctgtttgcaccagttgctttcattgcttcaggcaacagagactaaagcattttcctgtaagtgttttcagcaaacgctactcaggagtagctttagcacaaggtgagttagagttacaaaggtgaaataaagacaagcctctttttttttttttttttttgagatggagtctcgcactgttgcccagtctggagtgcaatggtgtgatctcagcccactgcaacctctgcatcccgggttcaagcgattctcctgcctcagcctcccaagtagctgggattacaggcgcctgccaccacaccctactaatttttgtatttttagtacagacagggtttcaccatgttggtcaggctggtcttgaactcctgacctcaggtgatccacccacctcggcctccccaagtgttgggattacaggcatgagccactgtgcctggccaggacaagccttttgatcaggtcattttagagggtcagatcggcttaagatagtttgtaaatgaggtttattctgctcccacctggacctatgccttaaatatgaactgttattttcaaggctgctactgagtgaggagcaggggataaacagggtaagttaaaatgccagaaagctcactgttcttactgcgtttcacttgttttgaataagttgctgcaagcttttagctagtttacaatgttctgaaaaagttgattctgacaggctttggcaggtttttaaaattgcttttgtggagtaatggacttctggagttcttttctctgccattttcactgacatcactccttgattcactctctctcagttcttgaagtattttctttgtctttgaagtttaagagcttaattcagatgtgttgagttgaatatcttgtattaattttcccagaacatagtgggttatttcagtgctgcacagtcgtggtatggttgtgtgttttcatagtttcttgaagtaagaattattacaaaaacttttgtaatttgggctgtgttttttgggcaaatctgctgatctcgctcgggcttaactcatccagctgtagtcatttgatgtctttactgtggctggtggtctaaaacatccttactcccatatttggagtcttggcactgtctgttagctgagtcttttctttctgcatcattcagctaggctgagcgtctttccatgccataggaacgttctaaaagactgaaagtggaagttgaaggcctctcaagacctttgccatcttctaattgccgctctagcttttcagccacaagtcaggcctttttctttctcacattttaataatcttgtttttcctcccattatgttttcatctttgattgtttcttctttcagtggtattttggtaaaagacagtaagttttgttgctatgagttcatatacactcaatccctaggagctgcacccctgttgatagattgggttggggacacacatacccactgggagaagagagactctggaatgagtgagattatcagcatacttaatattactcctgttatggaggtagccagcaaattttttttaattgatacaataattgtaatgtattcatggggtatgtagtgatgttttgattcatataatgtataatgatcagatcaggataattagcatattcataatttcaaacattgtgggaatgggaatgttcagtgatgggaatgttcagtatccttctagcaatttgaaactctattattgttaagtatagtcatcctacagtggtctagaacttactcctatctagctgtaattttgtattctttcatgaatctctatctttcccttccctctccccttcctggactctagtatcctctgttctgccttctacttctatgaaattaacagtttttttgtttccacatatgagtgagaacatgtgatgtttaattttctgttcctggcttatttcactttacataatgtcctccagttccacccatgttgctgcaaatgacaggatttcattcctttatatggctgagtagtatttcattgtgtatatatatcatattatcctcatctgtttgcttggctttttgttttgtttttttgagacagggtctcgctctgtcgcccatgctagagtgcagtggcgcaatcatagctcactgcagcttcaacctcctgggctcaagtgacccttctgcctcagccccctgagtagctgggcctgtaggcatgcaccaccatgcccgctaattttttgggaattttagtagagatgaggtatcgatatgttgcccagcctggtctgaagcgatccttctgctttggcctcccaaagtgctggattacaggcgtgagccacagtgcctggcctacactcatctgttgttggatacctaggttgattccatatcttggctattgtgaataatgctgtagggttgcaaatttctcttccatataatttcctttcctttggatcagtagtgggattgctggaacatataggtagttttatttgtagttttttgagaaacttctattctgttcttcatagtgggtttactagtttattatctactcacccatgtggcttaaccttatttttgttgccttaggttactatatcaacaactgataggagaaacaataaactcattttcaaagtgaatttgttagaaatggatgataaaatattggttgacttccggctttctaaggtatttttatgttttattgtattctttctatggaaatatttctatatgaatttttttaatggcattatgtttgtatatatgtggcatttgtaaataggttacttgcttttttcgtttaatattatgagcatgtgttttcgttatctatttttcccgaacattgtttttttcaaatgacattttccttattataaaagtttttgccaggcgtggtggctcatgcctgtaatcccagcactttgggagtccgagacgggtggatctcgaggtcaggagtttgagaccagcctggccaacatagtgaaaccccatctttactaaaaatacaaaaaattagccaggcgtggtggcgggtgcctgtaatcccagctacttgggaggctgaagcaggagaatcatttgaacctgggaggcggaggttgcagtgagccgagatgacgccactgcactccagtctgggtgacaatacaagagactctgtctcaaaaaaaagaaatttctgcttttgtgaaaaatgtagataagcaaaaaatgagaaaataaaaataattctaaattttcagtgatcacattaatatttcgaagcattttaatatttttcttaatttatgtcttttaataaaaattatgatttgttacaaatatttcattataatttaatgaacctttaccagttataataattctgtgattgctattttatgcatagatttttttgttcatatttctgatgatttctttagaaatcattgattctaagatgatagtattacagcccttgatatataaaaccaaaataacatttttctctattttctgagagattgtatgtggctctaaagagggttggaggggtagctgctgtgttagagcatttgccgcagtactctttgtattagagatttgctgcaatactgtttttcagatgcttgctacagaattaaattaagatcgtagtataatgaaattcttctcataactaaatctattgattttggtcagtagtgttatgacaacaagacttcagtttagttgtatagtttattgttagtttccaaaccctcactgcctatggaatgtaatgacttaggtccagatataccaacacctgaaacagataggatgccatgtttatctgctctctgagctcagtgcagtaggaacagtgatgggcatgaaaccacatcagaattatttgtgtaacaattttctcttccaggatatttggtcttcataaacagaccgaaaagaaaatggtagctagacatacctaaagatgtttgtctcttgttaccactacaaagagattgattttaggacagaattttgtttttgtttttgttttgacataattttttaatactatttctaatatagggtgatggattggagttcaagagacacttcctgaagattaaagggaagctgattgatattgtgagcagccagaagatttggcttcctgccacatgatcggaccatcggctctggggaatcctggtgaatatagtgctgctatgttgacattattcttcctagagaagattatcctgtcctgcaaactgcaaatagtagttcctgaagtgttcacttccctgtttatccaaacatcttccaatttattttgtttgttcggcatacaaataatacctatatcttaattgtaagcaaaactttggggaaaggatgaatagaattcatttgattatttcttcatgtgtgtttagtatctgaatttgaaactcatctggtggaaaccaagtttcaggggacatgagttttccagcttttatacacacgtatctcatttttatcaaaacattttgtttaattcaaaaagtacatattccatgttgatttaattctaagatgaaccaataaagacataattcttgtgacttttggacagtagatttatcagtctgtgaagcgaagccagcttcaaaacatatccccaagatttgtacttatattttcaaaagggcctggccagttatataaacctgtttttgaattataatgattaattaaaattgcaagtaggtgttttttccagtgtagttagtaaaatacttgtattttacagtgttgcataaactctagtgcttaactaactttactctaaaaattactgttgaacatcttaaatatttttctatattttctactttcatagccatattttaaccttttcaacttactggtgaccaagcttttaggtgataaagaataaaagagggaagggaagagtaaggaagctataagaaaaatagatctgattctttgttcctttacctgttagacttacaaaaagtttgtttttctaataaaatttgtatcaactttggggcatattaggttgaggccttggctcctgcctgtagtcccagctacttaggaggctgagagaggaggatcgcgtgaacctggaagtttgaggctgtagtgagctatgattgcaccagtgcactccagcttggatgacagagtaagaccctacctctaataaaaatttttaaaattgtaaaacattataaaattaatcagttattttaatctgaagccaagaacatgtagaatgttatgattagagtttatcacatattaatgtatactggcaaattgtgttactggagtatacccataggaggaataaattcaaacctgttttatttatttgaacctatttacggtatgcttaagaattgaatcagtataaattctcaaatatgggagaaattttgttcttgagaattatctgagtcattaatatttttcaaaaacagctctcactgacttgaacctcttctgtaagctctaaccttttacctgctttacatttccacttgaatgtctagtaggcatctcttgaccaaaaacagcttttgattcctgttctccaacctgttcctctcctagttttctccatctcagaaatgttacttcctctgcaaagtctttccctgacttatctaaaataataacctcctctgtttgctgtgggaatttgtatagaatggtgggaaaatttcaagtttcatatttggattagctctgacatttatttatctgaacactggtaattgcctcagtaaagacactgataataagtaccttttagagttattttaatctttaatgctttaatgtgtaggaagagtatagtgtcctgttttgcacagaaaggcattctgtaaataataagttgccttaattttcctgtaatgttcattatattgttgtgggaaggtatttactcctattattaaaaataaaaatgtgtaaaatttactacctgaagataacagttcaaattttgatggaaaaatcaacctatgcttgtgtgtgtgtgtgtgtgtgtgtgtgtgtgtaatgtgtacagtgtgtgtggttgttgagataagcataattatataaaaatatgtgtgtgtgtgtttaatgtgtacagtgtgtgtggttgttgagataagcataattatataaaaatacataaaatatgtacacttcaatgtgcagttgtaaagttaacattcacttaaccacaactcaattgtagaaagatcatttacagacccttaagaacttcctatatgcagtctcccaatcacaacccacttctttcccccagaaataatcacaaaatagactttggtgataatcttttccttcgtgtgttttagagtgttctcagctatttatgcaaataatatcatttagtttatgtatttttaattaatatggtttttattaacgaactttatatacattttgctgtatttttcatgtgttgattttttatagccatgcttttgtgcatattgaattcattaattttaatttttatataggatgtatttatgaacatcccactaactattctgctgctaattgatatttggattgtgtacagttcgatgctattataaaattcttctaaggacattcttgtacatgttcatttgttttgctaggtcctagagtctaaggtatatatccagaagaggaatagctggatattaggatagaataat

SEQ ID NO: 87 - DNA, 32742 bp, Homo sapiens
  source 1..32742: mol_type = other DNA
gctccagcggtcggcatggcagctgctacctcgctgggacaggctctgggcccacgcgtgccgcgcagtccctacagaactgcagttgtcttgtcttctcggagtgctttcggctacttttcccttattactttagctcgatacacgttgggctgcctttcacattcggatattacgctgttcgagtgctgacgggaaaggcagccctttgacacgcacgcgaaatgtcgcctgacgagggcaaaggtgacagttactaccggaagtaccctatctcagataccctttagattttcccccattgaagaaaaacgaggcgggaaaaacgctgttagggtttaactcaggccctggctccttctcgaacgaattagcggaacacccgcaggagccttgtttggcttccacttttcggcccgcccagttctctgagcgtgcggcggacgacgccggtgattggttgagcgaatggaaacggctcggcgcggtggttggccagtgggaaattctgtacgttgtgattggtccacaggaacgactcggcgcgcgcgcgggagcgagctttgaaagttgagcacggcggcggcgagccggtgccctgggatcatggtggcgttgcggggccttggtagcggcctgcagccctggtgtccgctggatcttagactcggtgagcagatgcagccgggaggcccgggggccagggcgagggtcctatgcgtccccgacgatgcctaagcccgggccggggtgccggtgggggcggggtgggggcgcccggctgtcggcggtgcctggggtccccagggccgtgccacgccaggattgcggctagccaggtttcccgtgggggctcaagccggccaggccacccttagaataagcgaatgttggccagtctcttctagcgcctgtgcatctgttttctcggccttccccttcttcctgtgcgtgtcttcgtgcacctatctattcttacctattaagatggttttaaattgcaaatctctttcttccgccagacttatttcttgaacttcatgttcataggttccactggatgtctcacatgcagacatcatcaaacgtcacatgagtgaaaatgggattcccaaagcctgctaatggcaccatccaagccaccaacccaggagtcatggcatttctgcttcccctttcatgcccactaccactgtcctgcctctgaggtgtctcagggcagccccgctccattcctgatgctgctgccttcatcatagcctcgagcaattgcaggagtattttagctgctttctgatgttaactgtgccagcccatcccccacacttttgcagaacgacttttgaaaacacagctttgaatgtgtcaagcctgtacacctttaatgtttcccctttgtttcctaaataaatgaccacatccttggcatgctttataagagctgccattctctccagtttgattttccaagagcataacctttggagtcggacacacttggattgttcccttggctctaccccatagcatccatgtattaccgtgcaggttgtttatccttgctaaacccctgttttctgatctgtcaaatggggagtacaatatctacctcacaggggtttttgtaaagataaatttgtacttgccacataataactgctgaacagatactaatacccacaagcaaacactgtaacaattttgttcatttagaaacactttaatttctttccctttgtgtgctttgttacactgtgcttgctgggaggcacttttctgcatttatttgcctggcaaaactcttacattcaggtccaattgaagaatcatcttattcctctccctcctcccccagtactattccctattaagctctgtagcattttacattttacatatctattattttaacactcatccatagcaaaaataataaataccatctattgactgttttttatgtggctagcacattgttagggcctttatacacattatgtttcacaaaaatcctgtatttccaatgatgaaggagagactaattatgtgtaagtgatcaagtcaggatatttgcctcgttctgactcaaaattcagtggcctctcttctatcataggctgctttttttggtatcctaagtgtgaaatgttgagatctttgtggacaagaaccctctagtattcatctttatatccctagaagtataagtggcttccctagtattttctcaaagtgtttgttgagtgaataggtgatgtatttcttcctcttcttccatcctaagtgaagtagcagagcagaagttacctgcattcgacagctgagaaaataggtagtgagagatttgaatagtgtaaagatactgagggaaaaagactaactcagtgtctcctatactctcactcaacaatcaacactgaagacttctgtgaccaaatggtagataacagggccagttactgccatccaaattagatttgatggtatttacagtagggaactgtcataagcaaaaccaaaagaaggagtgagataacttttgctgtggtctataatgacctttaaaacattactggaaatttggaaagaaacaattgtatttttcagatcttctttcaggcagcatattccatgtctttggaaggaatgctgtgcatagccacttagggtacagagaccccctccttcagggtcaagttcaagtgacaaaagatgatgaccagattgtattctaaggatggaactagttgagtgtaaggcctttcattttcatttgccgagtgcagtgtaatgctcccatctctgttttttccttatttataccttgcccaacttctctaaatcagtggtgaacaaatacttttaatattaatttgaaggaacacctgattaataatttgagatgtccacatttccatctagtcctaattttagtttgggaaagtgacaatgacaacactgaagaaatatagtgtattagaaaagaatgggaaggggggatggagggataggggagggataccattaggagaaatacctaatgtagatgacgggttgatgggtacagcaaaccaccatggtacgtgtatacctatgtaacaaacctgcatgttgtgcacatgtacccaaaaactttaagttaaaaaaaaaagtttatccaaaaaaaaaagaaaaagaaaagaatgggaagatttagagttaagagagattggtggaatccagccagcgtgctgtcttaatacccctcctctcaatgtacattctttcaatcagtgtgttttaaagtcaccaagtattcctgggagtctgaatctgggttgcctcttctattttaaacttcctggagaaattatatatgttttttaaatgctacatgattgtccaagggcccaataaagtgctctatattttatttccacttattaacttggttatgatattttcacaaaggaacctcgtgggcaatctgattaacctctgtttcttctctagattgaacatgtgggaaagcctgatcactgaatgttttgaagtgtcctttcccaaaactcttgtatctgaaaagtatttcctcctttatatttttagaagatgattagcttaatagtcagtgtcagttgtgatttaagattctcttaaccttttctggttttcttttattatgctacacctatgttattaaaacaagttaaatgtgaatcgtgactagtaaacttttctcctcttgaacacacctggaatctaaaggtgactagtttttttacttgttacagagtacttacacatttcattgcattttcccctagaatgggttgacacagtgtgggaactggatttcacagagactgagcctttggatcccagcatagaagcagagatcatagagactggattggctgcattcacaaaactctatgaaagccttttaccctttgctactggagaacatggatctatggaggtaaaaatataaaaacaaactagccaaagtttggtgttagaagtagaagatgaaagtcattattataatctgaagcttagctttcttggtgtacagttcacagggagtacaatatgagtaacataaagaatgtggttaatttattggaatatcctaagagctttcctccaaaagcttcaaggtacttgtctgattttttttttttaagacacgactgttttttacaatagcaaattaaaggaaaagtataaggccgggtgtggtgtcttacgtctgtaatcccagcactttgagaggctgaggctggccagttgcttgagctcaggagtttgagactagcctgggcaacatggcaaaaccccatctcagaaggaaaaaaaaaaaggaaaaatataaaggcaaaaacaagaaaactagaccaaggaaaatgcaaataacaattcagacatgccttaaccttaactttaagaaaatctgcgaccaggcatggtggctcatgcctgtaatcccagtactttgggaggccgaggtgggtggatcacgaagtcaggagttcaagaccagcctgaccaagatggtgaaaccccatctctactaaaaatacaaaaattagccggttgtggtggcgggcttctgtaatcccagctactcgagaggctggggcagataattgcttgaacccaggaggcggaggttacagtgagccgagatcacgccactgcactccagcctgggcgacagagcaagactctgtctcacaaaaaaagaaaatctgatattattaaactgaggaatgactagttgaattaacaggtttgtccaaacagttcctgtaaatattgagttctatccaatgcatagaaatataaattattattaatatttaggttgttagttttcaaaaaaaaccaaagggttgggaaacagaacaaaagctaattggatattaacatctctgaaacatttaaatgaacaaaaaaaaattcacttccaagtttcacatcacaaaattaaatcatctaattaaacattccttcagcataacactaagcactgccttaagtacctgagttgacagagtggggattacgatacaatctccctaggttgaggtcctccccagggacctcagggaggaagagtggacatttgaacactagccaaagtaggtctagcagccacatgcagttgcagggggtggagagttcagtgccactgtgcatttgggcgcctggaaatattctacgaaccacactgtgaaaaatgctccaagagaggtgcggatttgttgcatagggtgtgaaaaagggagcatggtagggttgggaaagttccagaaagaaagtggccagcagcgaatcttcacagatgactagcagaagcttgggttgtaaggcagtcctagtgaaggagccacccaatgggaacacgcaggaagtgtcaagaggcatacagaaaaagtgtggtggaacgggatggtaaggtagagtaagggtaggtcacgggtagctttacgtgaggttcagcagtggagtttgaacatgtttggtagagtgtgtatgaggttttgttctaagcgtcctgcatgtattaactcatttaatcctcaagcagcctgtgtgaaagaggttacagtgggcaatagataggtaacatgaatagatctgttttaagcagacgttcttgacagtaggtggactgaagtgggaaaaattgtgtgcagggagagcccttgggagactgtattggtgatccaggtgttatgagtaataatggcatgatccggagttacaattttgggaactggaaaggaagactaaaaactagggacatttttggaattagaattaatagggccttgtgaactaggaagcccttttgagatatcttaaaaacatggtgtgaagtgctaaactgactgggcatagggaattagaaaaagaaagaagtcagtgatccccagggtttcaaaactaggaagatgatgatattgttaaccaaggtggggaataagggaaaaagagcaaggtcaaatggagaaacagttctgtttagacttctgaacttgagattctgtcaggagatccttgggaagtttaacaggtagtagaaatgtgagaccaggagagagaagagagttctttaaattgaggtatgggttgaagcacagtgatgcatgagatcaccgagggtgagaagcagccaggacagaaatggagagctgattggacggggtctgcagaggagcagtcacatgtagggagtgcagggtcactgacgcccagactagacagcagccatgggatcacatggggccaaggtgaccccatatgcagagccctggtgagcagatggtttagggtgatcgatcaccctcgtgtgtgaagtggaggtgcaggtggcattaggaatgaggatgtgacactgtaaagttaggagatgatttcttccccccccccccttttttttttttgagaccagggtcttgctctgtcacccaggctggaatgcagtggcacagtcaaagcttactgcagcctcaacttattgggctcacatgagcctcccacctcaccctcctgagtagctgggactacaggtgtgtgccaccacgcccagctaattttttattttttgtggagacaaggtcttgctttgttgccctggctgttctcaaactcctgggctcaagcagtcctcctgccctggcctctcaaagtgctgggattacaggcatgagccattgtgcccagtggagatgatttctcccgtaagttttttagttaaggaaaggagagtgctctgctcacttgaattttgtgggcctttttttgttacgatactcaaggataaaccatatttagttcctgctatgtttaggttattaaaataacccatttcttcttcatgtgtttagtaggagaagacatggaatgaagatagaattaatacaattgtggtttcttttctagggtttatctcctttacctgggccatttccgagatctctttcatttcctgctcccattgcctgcaatctgcagaacatttaaataaagggctctgatttcctcagttagtaattattggtaaaggaatttgagttccttttaatataaatagagggataactttcctgaataatcactaatatatggtgtcccaaaagtcttagtgtagttttaagctataatttctgaagtatatatgctacaaacttaacaaaaaattcttttgaaagtttaattatttaaatatgttatatacatatttatcttggtaattttgaataatatacctttaattttgatattttgtttcagtccctttgaagatggtaaacatttagcagtaggagccaggctactctattcctctttttgtaaggcaccaagaacttacaaaaatcaaataataggaaatgtttccatttctctaatgactggcttttgtgatttgcggtctccccacagagtatctggaccttcttcattgagaacaatgtttcccatagtacactggtggcattgttctatcattttgttcaaatagttcataagaagaatgtcagtgtacagtatcgagaatatggccttcatgccgctgggctttactttttgctactagaagtaccaggtatgtagacctgatatgataggataaatcttctgtcatttttttctttctacagttttcaattcttatactttgtttcttgtttcttcacttataaatggggcagtgctaacccatggcagagagttgttgcgaggagcaagtctctaaagtacatggcatgttataggtcttggaaaaccttcccccttttttttttcatccgaagttatgctatctataaactaataaaaatagtctgagaaggagtgcaagagttccacgcccaccctccaccacggccgtctaaaattctgatattgccctttcttctcatgattccttgtctagactgagaaatactgctgtggggagtcattgctttttacctctccgatgttggtattgaaaaatagattaaaaccattctaatcaagaaagcaggaaagcagctagtaatacttgaaggagagcactgaccaggagtctgttttcgagcactgttttacttgattgtcagagcactgaggaggctgttcctcctatgacagtgaaatccattctcttccctactccaaacacagggtgagagagagtggaacatagagattgagtcagataacctgaagttcatatggaaaagagaatggcaagatcagtcaccttgctgcttatctttgtttaattacaaatgtttagcaaaggatttattccatgtgatctgggaatgggcaaaaaggtcttatatttaaagccctgaacattgatttgtgttgttgttaatgctcccatcatgactttggaaatgagtaagttcctaaaggattttgttgctaagcagtgtctcggttgtaactaggccctctctcaaaaaagtagtggttttagaaacccagtttcactctcctcttgccagatgcagtttcttctgattaaggttgagatttatgccagagcaaagaggtggctgttactaattgcgtgggccacttgcagctttccagcaagccgtattcctgccagttaccttctgtttttaaatgtttcgggtttatgattgggatgctgtcgatacttaacattcgatcacagtatattctttttcaggatcgttttggttgttctgcctcccttgcatttccatgtgaattttaggatctgtacgtgaatttctgcaacaataaaaaagccagctgcggttttgacagggattgcattgaaactgtagatgagtttgtgaagtattgccaatttaacaacattaggtcttctaatccctagccgcaggatgtctttccatttattgtagatcttctttaatttgtttcaataatgctctataatttttggtgcgcaactcttgcatctcccctttaaaatttattcttaagtgttattttcaatgctagtgtaaatgaaattgttttcttaattttattttggtttattagtactgtatagaagcaaaattgattttgattattgatcttctatcctagaaccttgccaaactcatttgttggttccaacagggttttctttgtgtaagatcatgtcatctgtgaatagacacaggtttacttctttctttctagtctgggttctttctatttatttttcttacctatttgccctggctagaacctccagtacagtgttgaatagaaggggagcgtggggatccttgtctattcctgatcttaaggggaaagcatccagtcttgcctttaggtatgatgttacctgtgggtttctcaggatggcccttattaagttattattcctagtttactgagtgcttcattatgaaaggctgttggattttgtcattcgcttttctgcacttgtgaagtgctcatgtggtttttgtttcttattctaatatagtatattacattggttgattttcacatattaaaccaattttgtatgaccttggtcatggtgtataatcctttttatatgttgtcagagtgtttgctaatattttgttgaaggttttttgtctatattcataagggatattctttttttgagatatttttgtctggtttgagtatctgggtatcttggtaataccattttcatagaataagttacatagtattcccttctcttctgtattttggaagattttgggttttcttttttcttcagatgtttggtagaacccactagtgaagtcatctgggcctggagttttttgaaagaagtttatgtttgtagaatttctagtgatctcctctcatgcctgatgttggtgatttgtattttgttttttcttgatcaatctagatcgagatttattcattttactgttcattttggagggcccccttttgatgtcattaattaaattctgttgtttgtccctttcttgtttcattgatttctggtcttatgtctacgatttcctttcttcttactttgggtttaatttgctcttattctgactttttaaggtagatgcttagatctttgttctcacatgcatttctttgtttctaatacaagtatttaatactataaatgtccctccaggtacagcttcatctgcatcccacaaatttcgatgatatgtttttactgttgtgcaggccaaagtgattttcaaatttttcttgtcattacttacatctctgagttgtttagtaaattgagtttattttccaaatatttgaactttcctgaaatcttactgtaattgagttttaattggtgggatcagagaacatacttcatatgattatgatacttttaaattatttagttgtgcctttttttttaatggacttagagtctaatttggtgaatcttccatttgcactttaacagaatgtgtaccttgcctttgttggatctagtattctgtaaatgtcagttaggtcaagttggttacaaatgttattcaagacttacatatgcttcctgatgttctgtttatttgttctatctgttgttgagagaggaatgttggaatctctaagaataattatcagtttatctatttctcctctcagttcttttaacttaagatattgtgaaagtctgacggatacagatgtatttatgattgtcatgtcttcctgatggattggtccttttagtattatgttatgtccttgtttgtctggttatattccttgtcttgaagtctactttgtctaatactaagatagccactatagttatcttaagatttgtccttggttggtacatcatttctcatgcttttatttgtaacctatccatatgtttatatttaaaggttttcttgtagactgcctgtcacgtggtcatggcttttctttttcttttttttttttttaagagagacgaggccacacacggtggctcacacctgtagtcccagcactttgggaggctgaggcgggcggatcacttgaagtcaggcatttaagaccagcctggccaacatggtgaaaccccgtctctactaaaaatacaaaaattagccggatatggtaacacgtctgtaatcccagttactcgggaggctgaggcaggagaatcgcttgaacccaggcagtagaggttgcagtgagttgagatcgtgccactgcactccagcctgggtgacagtgagactctgtctcagaaaaaaaaaagagaggtccagggtctcagtctgtcacccaggctggagtgcagtggcaatcatagctcactttaaccttgaactcctgggctcctcagcctccagaatagctggaactacaagtgtgagtcaccatgacaagctaattattattactttattttatttttgtagagacagggtctcgctatgttgttgcccaggctggtcgcaatctcttggcctcaagtgatcctcctgcttcagcctcccaaagggctgggattgtaagcatgagccctcacacccagcccatttggtcatgcttctttctgacaatgtttgcttttgtatcagaatgtttaaattgtttagctgattacatttagagtaattatcaatgtagctgggtttctgccatttttctatttattttctatttctttaaacctgttttttgctcaattttttcctcttcctgccttgttttggattttagtatcccttgtctcttttggtgtattagctatactcttttgcatgtatgtgtatgttttatgtgcttgctttgtgtatgcagtaggcacttctcacagtttatcttcagataatattctcccaatttatatatgatgtaagaacaaccttaaaacagtgtattttcctaggttgggtgaggtggctcatgcctgtaatcccagcactttgggaggctgctgccggcaggtcacttgacgtcaggagttctagaccagcctggccaacatggtgaaacccatctctaccaaaaaagaaaacaaaaaatgaaaattagcccaatgtggtaacgcatgctactcaggaggctgaggcaggagaaccacttgaacccaggaggtagaggttgcagtgagccgagatccacgccactgtacttcagcctgggcaacagatccagactccagtggaacacacacacacacacacacacacacacacacacaaaacaacaaaaagtatattttcctttctcctctcctcttgtgtgttattttttctacatgttataaagcctacatttcattaatgcttatttatcttttatagaattttttagaaacaagataaacagcttttatatttgaaagattaatctcctataattttccttctgcctgaagaactttttatttttaaacatttagtgcaggtctgcaagccataaaccctctcaggttttgattgtgtgaaatatctttatttcaccttcaagaatctttttgctgaatataaaattctgagttaacttttttttgctttttggtgggattatctatgctttgttgtgattgcctctgtgcttattgcgattgggttcattgagcttcttggatctgtggacttatagtttcaacaaacttggaaattttttagtgactttttctccaaatgttgtcttccttccccttttttgggacttcagtcactcctgtgttagactgcacgatgttctcccatgggtcactgagtctttattagctttttggtttctacgctcctgctgtatcttcaagttcacttatctttgtttcagtaataaccaagccactattaagcccatctagtgaatgtttctttttcagatcaaggaagttctgtttgcttctttaaaatttttttttttcatttctctcctcatgataatgttttacttttaattcttgagctgctttaaggttgttgtcagctggttccattatctctgtcatttcctgggctgtttttattgactgatttttcttatggggcacattttcctgctttttagcactccctgtaatttttttactggatgctggacattttgtgttgttttttttccccctgtattttttgtaaagacagggttttgctgtgttgctcagactggtctcaaactcctggactcaagtgatctgcccacctcagcctcccaaagtgttggaattacaggcatgagccactgcccttagccaggatgttgggcatttggaatgttgttgagtgtctggattttgttgttttcctttaaatactattgaagtatgttttgataggcagctattggtggattaacttgatccttttgaggcttgttttaaagctttattagagctgatgtaaagtagcctttatgctatatcgggtttagccctactgttaaggtgtgtttgttctgaggtctctactgaatgctctaggtgtttaacaagatcactccactctggctggccacaactcaaatgtatctgagccttgtgtgagttgtgaaaataattcatcttcttgctccttggaaatacttctttgctctctgtcttagaattttaccctgtgcatgtgtagcttatgttcagccctgggccgatttctagaactctttttctgtgtaggttcttctgttctataaattccatctaccctgtctttctgactctgctttttcaacatagtaagaccattataatttgtgtggatttaccatttctctgccgttgtccagaaattccctctggatacaatactggggcaacttgagggtttacctctgtttcccttttttcagggattgcccttcttatgctgcctggtgcccagtgtcttaaattgttactttataaatttttgcccagttttctagtcgttaacaagtgtaaagccagttcctctgtcctggccagatttggaaatcttgttacttacctctgatgcagcgctgtctcctctactaaggctgacgttgcaaatggtactcttgctacaggttcattgttattcacagtcatgaaaagcctgtgttttgctttgtaacttttcatctgatgttatagatatatttcaagacaattaaatctaacttgcttactctttattcctcatgaataggcagtgtagccaatcaagtattccacccagtgatgtttgacaaatgcattcagactctaaagaagagctggccccaggaatctaacttgaatcggaaaagaaagaaagaacagcctaagagctctcaggctaaccccgggaggcatagaaaaaggggaaagccacccaggagagaagatattgaggtaagaagtaagttgagtataaaacatatataccaacacacgatttgctttatttaaggattgactttatactaaacatggtttcaggcatcatgattataggcaaatggtcctaaaccatcataagctatccaatactgctttgtgtcttcggcttcatataatttttctttctttcttactttcttccttttttctttttctttttctttttgagacagagtcttgctgtgtcgcccaggttggagtgcagtggtgcagtctcagctcactgcaacctccacctcatgggttcaagtgattctcctgctgcagccttccgagtagctggggctacaggcatgcgccaccacactcagccaatttttgcatttttttgtagagatggggtttcaccatgttggccaggctggtctcgaactcctggcctcaggtgatccactcaccttggcctcccgctggggttacaggcatgagccacaacacccagcctaattccatattcttatgtgacacggtagaatgacagaatttcatagacagcaaaaattctgaaaaaaaggattcctcattgacacaaaactagaaactactgtagcggtcatctagtccagtgatttactgttgtggccaaggagacctagaacagtcatgcgacctggtcaaagtcatatcacctcaacatcagctcctgcctggagtttatctgggcttggtttgggtaaattgaaaaccatgggacaaagtgtttggcatttattacagtcacctgtacatttcttcataatctagatggatgaaattatagaagaacaagaagatgagaatatttgtttttctgcccgggacctttctcaaattcgaaatgccatctttcaccttttaaagaattttttaaggcttctgccaaagttttccttgaaagaaaagccacaatgtgtacagaattgtatagaggtaagtgaaaattccaggaaccttagggcaacttcaaaggattagactatggctaatacctgatcagtagaaaaaatcaggccttttcttcatatctgttttctaggtctttgtttcattaactaattttgagccagttcttcatgaatgtcatgttacacaagccaggtgagccattaaatcttccagtgctacaatttaagtatagtgtaccaatttttgctccagcagaaatggaaataccattttatcccaattggcacacaggtagaatttattcatttaaacatggcttgtaggactaagaaatattccaagtaaaatcatatccattaactaatatttcgtcttttttttttagagctcttaaccaagcaaaatacataccagaactggcttattatggattgtatttgctgtgctctcccattcatggagaaggagataaggtaaaggagatgagaacctaatttggttactagttgaatcgaaggcacatgaaccatatgatggaaatatgttaaaagcatttgatataatgccatttcaatttactagctcattttcatgaccttatattatttgcataataaaaagtatcactatttctatttgctctctgttctttattgccaactttatatctgaatacttggtggctgcagcaaattattgttaggctccagttagaaaaaatggttctgctgtgaatgaaataggaggaacagataaactgctgaacagttacttctataggaacagatgagctgctgaacacttacttctataggaatatttcccaaatcattctaaaaagtagaatagtcagagaattttcaagtttcccttggcaattcatgtgcgcttcagtatttctattggtagttgtattatttgtgttgatatgctatggaaattttgtaggttgtcacccgtggtcagcatggatacctgggttttgcctccaggttacctgaacgccactactactagaaactttgcagttagagttagttgcgcatgatgctgttactaaacttagatgtcttaaatgaaacaataagattttgcaaaaaaatgtgttggaccaaggtcatgtggcttttggtatctgcgacgcgttaccttgcagaggcagtaacctggttacgaagatatttttggggatgcttggggggttccgcacatctgtgtttgctttctgacttcaccacttactagctgtgggtccttgaatgagccattcaccctggctaaagcgttagatttcacttatggacaaaaaggaccaaagtctaccttctttatcgatttgtcacaggattaaatgaagttgagcaggccgcctaccgagcacaatgcctgttgtttagaaacattcggtattttataagtttagtatctttatcacttctgtgtgcttgaaatatgaatgtgataacatttacagtaatgtttttaattcgcatgcccttttaaatattttaaacaataacataggtgggaaaattcatccctttaggtctactgtgtctctaaagatggtttttttttttttttttttttttttgagacgcagtctcgctctgacaccaggctggagtgcagtggcatgatctcggctcactgcaacctcagcctcccaggttcaagtgattctcctgcctcagcaccccctagtggctgggactacaggtgcgcgccaccatgcccagctaatttttgtatttttagagatggggtttcaccatgttggccaggatggtcttgatctcttgacctcgtgatccaccctccttggtttcccaaagtgctggaattacaggcgtgagccactgcgcccagtcggtatttttttttaattgtgaaagtactgacttgatgtcaggcaatgttggtttttagccttatttttaattatttgatcttggacagctcacctttggagctttttttaattatctgtgaagtggaaattatacatgtcctgcttacattatggaattgttgtaaggtttaaaattaaatgtatattttatatatatatagtaaaatctagctatgtagatgaaagtgcttaatgcaatacctaccacttacttggttttcagtaaatgttttatttattggatgaataaattaattagtgactatgttatatgagataatatgttggaaagtgctttgtaaactggaggcaaaaagcaggtgtaaagtatcgttctttccccttttgaataagggaacattagtagcattctttgccctatgtaaatgacagttaattccctatttgtcctaaattctgggttatgatatgcaaagggtggggagagaaactaggtattgtttttatcagacatatcatctgtcagccattctttcacactgtttacattgtgcatttattgtatcctgctcattgtttaagaaatatatccctagtgttcagccagcaattatgccagcctgacctaccttcagatggcttgaaatggtttactacagtctgcatcactatgtctgagacccttgtgttctccatccgatcttaaattgaattttcttttctcttctaggtcatcagttgtgttttccatcaaatgctcagtgtaatattaatgttagaagttggtgaaggatcccatcgtgccccccttgctgttacctcccaagtcatcaactgtagaaaccaggcggtccagtttatcaggtgaagcacacaaatcgtgaattttcaccctgtcagtctccctcagtactctgggccctgcactaagatttctgatacatgtagacttaaaatttctggcctgatggtggttttgggggtgaaaaccaagcacttcgtagctaatgtgctttatgtgtctgggtctctgttggtaggctcccagctggggcactgttaaagagataggaatctgcagaacacgggccagcgccagcctccagcttgtttgcgctcaatatgtgggtcagcctcagagagaggatggtggcctctcctcctttcccttgtctgcttcattgcagccagttcacctctttcccttttctgttgctctctactttgcagctctttgcttttgttctttgccactttcttcttgtttctttgcacttttctattcctttccctctgtagaaatgacttgaaggaaaggattgagttgctttttacctccgtagcaataagtgttagactacttttcctctcatgggtcactcagcttcacttaaaaactctcatgccttagtttcactggcaaggacatgtttgctgcgttgttggcttttccttccctccttcactgatttttggcgtgcagtgtggaggtggtgccgagacatggtgtgcatgtgcaagtgtgtgcatgccttgggtgtgcacagtgtgcagggtagttggagacatggggtgtgtatgacgtcatcttgtgactgagcaaatgtctctcactaaggactttttaaaacattaagtaactaaaatgttttaagtgaaaacacgatcgtttcgttttttccatgagagtttctcatatgccagtcgcaatagtcttcatgtaatgttacagataaacatcactaaaaatggatcaagtctgggcattgtagaaatttcttcttgaggcggggcgcggtggcacatgcctgtaatcccagcactttgggaggccgaggcgggcggatcacctgaggtcaggagttgaagacgagcctggccaacatggtgaaaccctgtctctactaaaaaatacagaaactaggcgtggtggcgggcacctgtaatcccagctactcgggaggctgaggcaggagaaactcttgaacccggtgggggaagttgcagtgagccgagatcacaccattgcgctccagcctgagcgacaagagcaaaactccatctacaaaaaaaaaaaaaagaaatttcttattgggttaaagtttggagaagtaatgttactaatgcatttcactgagctaccatgaggtggtactgtgtcttagtcaatttttatatttatccccaaaggatatattttacatcttcatatgaaatttagtaagtagtcaaaagaattgtatgaagattacatttttgttcttacctgatgacttagctactctgcagcagctctcaaaactgcacgggaactacttcacagttttctacgatgacattttatgtcttcactcttcattctactgaaaccactcttatagcgtgaggtagagtgttttaataactaggatttctaaatataggagtagtggtttttggggacagtcgctgactgtattgtgaacagtagatgtgtttttcttttacaaagcgcccttgtggatgaattaaaggagagtatattcccagtcgtccgtatcttactgcagcacatctgtgccaaggtactgtttgccttagtaatattaataacatggaagtatatcgtgtgtgaagataaatgtgtgtgtgtgtgtgtgagtgtgggtatttgttcttgggaatgagtgtgcattgttacttaaagtggttttatttaatgttcactagatggtcccctagacaaaagtgttctataaaaaacaaaaaaacaaaaaaactttgttttggaaaaatgttgaacatacacacagaaacagggaaaataggctggtgaaccaccacatacccatcaccgagttccacagttttgtgtcacttaaacccctaccccacatcccccaacatgtgtatactggattgtgttttgaagcaaattccatcatatcctttcacggtaattccttaatattatcaaacatccagtgttcaaatttccatgatgatctctacatttttataaccatttagacaaatgattcttaatttgaaccttatgaaacctggggatctaaaaactctctgaaattgtatactaaatttgtatgtgcatttttctggagagatggtttatagatttcctttagattagttttgaagtgttctaaaacctaaaatttattagtcatttacgtaacatttaaaggtcattgaactagttgtactcactgactttcaacttatattacagaatatgtttcagccatcctgcgggtggatattggttggtcaacttctctttttgcttttcaggtggtagataaatcagagtatcgtacttttgcagcccagtccctagtccagctgctcagtaaacttccttgtggggaatacgctatgttcattgcctggctttacaaatactcccgaagttccaaggtaggagatagctctgcataaaaccttgggtcctttttaaactctttttaaaagggtctctttttctaggtctgaatgaggagggttctttggttcttactcctatctgatggcaattcttatgatcttgctttaccagatcccacaccgggtttttactcttgatgttgtcttagctctgttagaactgcctgaaagagaggtggataacaccctctccttggagcatcagaagttcttaaagcataagttcctggtgcaggaaattatgtttgatcgttgcttagacaaggcgcctactgtccgcagcaaggcactgtccagctttgcacactgtctggagttgactgttaccagtgcgtcggagagtatcctggagctcctgattaacagtgagtatggcgactattgggacagtaaaccggtcttgtgctcattgagaaatagactgcaagggaatcgttcttttctgtggcaaaagtaataggtatggcatgatctatttttactctcaaaaccatttttagtatattttcttgccaaataactttttaaataggcaagcctgatacatttgcaaggccttttaaaagtatttcagatgttcatatctgagaggtgacattggtggctacctttactgttgctttgcattggtgggcattggtcgtattaggatgaatctccgtttcaatgcatacccaaggagaacgttatcagttgtcagcaatttagaatctgtctgccttgtctttgagcctaattatcttgattttgattcctccgtggataattactcagtttatgatactgacttcttccttcttatctttcttcttgtttttaggtcctacgttttctgtaatagagagtcaccctggtaccttactgagaaattcatcaggtaatggatcaatacattttcaaatattgaatgattatcttttaaaaatttgtggaatatttaaaatgtttttcttacctccttatttacctgctttaacattgtacttttttcatgagagaggttgaaattcatttcagtaataatgttgtaacttaaatgagtaacatgccctgctaatgttattaaaagtataacacatttttagcttaatgactgtaattttttttttaaagctttttcctaccaaaggcagacatctaaccgttccgaaccctcaggggagatcaacatagacagcagtggtgaaacagttggatctggaggtatgtcagattttatcactgtcagataggtaatactgctggatttcagacaaccgtaagtagagtctaaaaccttggatttttttttttttttctgatttattcacccctaagagttgaaacagctggctgggcgtggtgactcatgcctgtaatcccataatcccagcactttgggaggctgaggcctgcagatcacttgagcccaggagttcaagaccagcctgggcaacacatcaagaccccatctcttaaaaaatatatataaaaatcagctgggcgtggtggtgtgcccctgtggtcccagctactcaggaggctgaggtgggaggatggcttgagcccaggagttccaggctacagtgagctctgatcataccactgtactccagcctgggcgacagtctgtttaaaaaattaaaaaatgaaaataacactgcagggcagtctgcttttttgtaccagcttagttactaaatagctgcatgatctaggggtatacctgtcgttttccggttgtaacaccctcccatctttcccagacgactgttgggaaagtctgtagaaacaacatttaagaaagtgatttaaagagagagagacacagataagagagagaaagagcatgtacgtagaggattaattacataattgggtttattaatttattcaataaaccttgatctggtccttcccgatgcgttccaggcattggagatgcacaagtctgtgagacagagctccatctcttaaggatcagtggagagacaggtgcttgtgcacacaagtgttctcatatatacaattgtgcacacatgtatgcggaacactgagataggtgccgagatgcacagaaagcgccctgaggatgattacattactgcttttattattcagcctagaaggtcagcgtgaaattgggttcaggaggctagatattagcatgtattactccaattcagagcgataactacatttataataaacaggttttctaaatgtggtaggaaaatgtactctggaaaaatgctgaatgtttgtgttggctccagacttcgtctaaacaggttacggatttacggtggcacagactttttcaagcaatatcaagttgaggtgatttaatgatgcttaaaaattatgaaagttcggggacgcaaagagcccatgtttccagtgcattgttcataagctgaaaggacatatattgttggcattaattgtacattaaaaattttgtatagtcacttagatgcactttgctctctttgctttttcttattaaggcagagttcacacaccataaagttcaccatggaaagtgtataatgtagttgttttagtatagtcacaagattgtacagactaattccagaacattccatcagctgaaaaataaaccccatagccattagcagtcactccccatgcccctttcctcctaacactggcaaccagtaattttctttccttataaaattgcctattctgggccaggcgtggtggctcacaccggtaatcctggcacattgggaggccgagacgggaggaggatcacgaggtcaggagatcgagaccatcctggccaacatggtgaaaccccgtctctactaaaatacaaaaaattagctgggcgtggtggcacacacctgtagtcccagctatgaggaggcagaggcaggagaatcgcttgaacccaggaggtggaggttgcagtgagccgagattgcgccaccgcactccagcctgttgacagagcgagactctgtccaaaaaaaaaaaaaaaaaattgcctattctggacattccgcataaatgcagtcatgtactgtgttgtcttttgtgtctgacttctttcacctatagcgtgttttcaaggctcattcatgttatagcatctatcagtacttcattcctttttgtgctgagtaatagtcagttataaggatacaccacattttgtttatgcattcatcagttgatgaacatttgggttgttttcactttttggctattgtgactaatgctgctgtaagtattcttgtatgagtttttgtatagatgtgtggtttcattccctctgagtgtatacctaggaggagaactgctgggtcgtatggtaactctatattcaacattttgaggaaccaccacactttttcaaagtggccacaccattttacaatcctgctagcaacgtatgataatcctatttctctgcattcctaccaacacttgccatgtctgtcttttttattttagccatctttgtgggtatgaggtggtatctgcttgtggttttgatttacatttccctaatggctaatgatgttgagtaaattttcataggcttattggccatatacatacgttttctttggagaaatgtctattcaagctctttgcccattttttaattgggttatcttttatttttgagttgaaagagttatttttatatatataccttatcagatatatgatttttaaagacttgtcccagtctgtgggttgtcttttcaaatggtattctatgaggcacaaaacattttaattttgatgaagtccaatttatctttttctttttttactcatgcttttggtatcacatagctaagaaatcgttgtgtaatccaaagtcacaaagatttactcctgtgttttcttctaagggttttatagttttagctctcacatttaggtctttgatcaattttcagttaatttttgaatatggtgtgatatagggggtccaccttcactcctttgcatgtgactatccagttgacatagcactgtttctttcagcctgttccttcacctgtgagtgtcttggcacccttgtaaaaaaatcacttgactgacttgtataagctcatgagcttatttgtgtgctctatattctatattaatggaattttatttcattaatctatatatctgtctttatgtaccacattgtgttgattgccgttgcgttctagcgtaggagaggggaaataattttttcttcagtcctcatgagttcttcctcgggatggatccccataacaagacaaacaagtttattaacatgtctagtgcgtgttatgcgggagagatctcaatgcaaagtaactgagggcttagaactccacttacgtaacacaaaacaccatatccaaaaaatgctggcagtacagtacactggagactctctgttgtccccttttgatggggtggctgacggggagctactcttgctgcccagcatcgtgagagtgtatcattctgcatgtcactagctaggaagtgagcagaattcaaaactcaaagtatggtttgaatgtgcattgctgtcacattattgcaaaatcagaaaatcctaagtcagggactgcctgtatgtgggaggaaaacaatggagtgagttttgtgaattgctctgggctgataagggtccagagaccccgtgtgtaaaggagaatttatatactgcccatataaataaagaaaagggaaaggatagacagagctttttctctgtttgctgctgcttgttaattgtctgctttaactgtcttcccagaaataatttttatgtcagagtcatattttggtgttaacatagtatcctgtgatagtcaattttaaatcaggaagtatgagttctcctcctgtccctttgttcttttttaaaattagtttggctattctgggtcccttgtatttccatatgaattttaagattaattgccaatttctgcaagaaaaaaaaagccatcttggattttgatagggattgatctgtacatcagtttggggagtgttgccatgttcgtttgttaattcctctaatccatgaacaccagatgtctttttatttctttcggtctttaatttgtatcagtgatgttttgtagttttcagtgaaccattgttgctctttaaattttgtcctgagtgtttttattcttttcaatagtattgcaaattaaattgctctcttaatttcatttctgaattgttcattgctagtttttacaaattatttttgataattgatcttctgtcctgcaaccttgccaaactcattacgagctctaatgattgttttgtggattccttaggattttcttgatataagaacaagtcatctgtaaatagaggtagttctacttcttcctctccaatctggatatctttcatttctttttcttacctatttgttgacagaaagagtcaagctctgtaaaatatttgaagacatttattctgagccaaatgtgagtgaccatggcccgtgacacagccctcaggaggtcctgagaacatgtgcccaaggtggttgggtgcagcttggttttatacactttagggaggcatcagacatcaatcagatacgtttaatagatacattggtttggtcccaaaaggcagggacaaggtggggagggttccagcttataggtagattttaaatttttcttgttgaaaattggctgagtttgtctaaagaactgggttcaataggaaggaatgtctgggttaagataaagggtggtggagactaaagttcattactgcagaggaagccttcagatagtaggcttcagagagaatagattgtaaacgtttcttatcagacttaaagactgtgttgatgttaatgctggagggtataatgaggcatgtctgacccccacatcccgtcatggtctgaaccagtcttcaggttaaattttagagtgccctggctgaggaggaagtccattcagatggttggagagccttagaattttatttttggtttacagtctgtggaatgatgttgaaaagaagtcaaagagtagacttctttgtcttttttctttacttagggggaaagcttttggtcttcaccgctgagtacgacgttagctgtgaggtttttagtatgactttcatcaatatgaggaagtttccttccatttcaagcttgctgagtttttatcatggaaaggtgttggaatttgcaaatgctttctctgcatctattttgagatgattgtgtggttttctttgttctgttaccatgctgtaatttacattgattgatttttcacaggttgacatttcattcctgggataaatcccaagcatggttgtatcttgctggatttggtttgctggtattttgttgagaattttggtgtcatattcataaggaatattggtctgttgtattaagccattcttgcattgctataaagaaatacgtggccaggcgtggtggctcatgcttgtaatcccagcactttgggaggccaaggcggatggattacttgaggtcaggagttcgagaccagtctggccaacatggtgaaaccccatctctaccaaaaatacaaaaattagctgggcatggtggcaggtgcctgtaatctcagctacttaggaggctgaggcaggagaatcacttgaacctgggaggtagaggttgcagtgagccaatatcatgcgactgcactccatcctgggcagcagagtgagactctgtctcaaaaaaaaaaaaaaaaaaaaagatgtgagactgggtaatttatcagaaaagagatttaattggttcatggttctgcaggctgtacagaaagtatagcactggcatctgtttctggggaggctttaggaagcttagaatcatagcagaaagccaaaagggaacaggcgtttcacatggtgggagcaggagaaagagtcagggggaaggtgccacacacttttaaatgaccagatctcacaagaactcactcagtattgctgtcctgaagacagcaccaagctgcgagggatctgccacagtgatccaaacacccctaccaggccccgcctccagcactgggtgttacagttcaacatgaggtttgggtggggacaaatactcaaactatatccgttgttttcttgagatgttttggttttgctatcagggtagtactcacctaagatgagctggaaagtgtattcttttctattttttgaaagagttcatgaaggattgttgttcatttttgctttaacatttgttagaattctccactaagtgtctggtccttaggaaggggtgtgtgtgtatgtgtgtgtgtaaagtatttttgattactaatttagtttctttttctttcttttcttttctttttttttttttttttgagatggagtttcgctgttgttgtccaggctggagtgcaatggcacagtcttggctcactgcaacctctgcctcccagctcaagcaaatctcctgcctcagcctcctgagtatctgggactacaagcacccgcccccacacccggcaaatttttttgtattttttgtagagatagggtttcaccatgttggtcaggctggtcttgaactcctgacctcaggtgatccacccacctcggcctcccaaagagctggcattacaggcgtgagccaccgcgcctggccactaatttagtttctttactcgttacaggtatattcagattttctatttctgtttgagtcagtttctgtagtttgtgtctttctaaaacttgtcgttctaaaaatttgtttcttttatgtaggctacttaatttgttggcataaaattgttcatagtattcctttgtaatcctttttatttatgtaaggctaatagtagtaatgtccctcctttcttgattttagcaatttcaattttctttcttattttcttcgccagtctagctaaaggtgtattagttttgttgatcttatcaaggaacctacttttagtttcattgatttttctctattgttttccatcttttattttttaagctgccttcttatatataagcagttcccaaagtgtgttttgggaaccctcaggggtccttgaagtaaaaatgagtgcagtgttcatttgccttccacactctgatttcctcacgaatgtatattggagttttccagtggtcccatgacttatcaaattgcaacagattgcaggtagaaacagagatgagaatcctgtttaatataagccagatgagagataagctggcttatattaagccagacattttaaagtttgcaaaactctaaaacaatgccattctttttttttaaaatcgggtcttggtgtgttgcccaggctggactcgaactcctgggctcagttgatcctctgatctcagtctccccagtagctgggattataggcacattccaccacatccagccttttcactatttttagtttatttgttttggaaaatatagttattttttatgaaaaagtactaacagtaacatatcttgctcttttaaaatgaattaataaatatttttacaattctcagtttaaatttctgattctaagtattaaaagatataatctctttagggtcctcagtaatttttaagaatataaagaagcctcaaggctgggcgtggtagctcactcctataatttcactgctttgggaggctgagttgggaggatcacttgaggctaggagttcgagaccagcctgagcaacacagcaaggtcctgtctctacagaaaaataaaaaaaaattagcatggtggctcatgcctgtattcctagctacttgggaggctgaggagagaggattacttgagcccaggaatttgagattgcggtgagctatgattgtaccactgtacaccaccctgggtgacagaatgagacccctgtctcttataaaaaaatgtcttcaagtcaaacattttaaagctgctgttatatattacctcatcaaatctttaaaataatcctatgggttagatactcctatttgtagctaaacaaaatggaagagataaataattcattcacaattttagaggtaggggctgagatttaaaaccaaatttttaatattccaaagtttatatgcattacagtgaatacctaattattcacattttcttctttttccacactctcatttcttaggatttaaaacaagctaatgagtctttaagatgagtgtattttctgggtattgtgtggtgaaatgttagctgctgtgtgacttttctccagctgtgatgaccctttggtattccctctacagaaagatgtgtcatggcaatgctgagaaggaggatcagggatgagaagaccaacgttaggaagtctgcactgcaggtgggagttttctctgcacatttttttttttaagcactaaaaacttggaaatgcaaaggaatattttttaaactcttaggccatattcattacttaatttgcttttcgcctaactgttagttgaccctgatcctgttgtatatgaatcatagacgaactggaagattttttatttttaagctttcctacagggtttctgatttttttaagaaccacaaatttatatcctgaatttgtttagaatagggattcttaacctagggaccatgggtggattttaataggttcataaaatagtttgtaaatatttgtttatataaaatttgtttttctctgagagaggccttagcaaattggattctgaaaaatgggatgttgtgaggaggaaggttggatccatgaccccaaaatgttaagaaccacaaacttaaaggaagtgttcctttgttaacagtttatctttgtgagttgatgctatgcagttaacagttcatgttgcgtctatgccttctaggtattagtgagtattttgaaacactgtgatgtctcaggcatgaaggaagacctgtggattctgcaggaccagtgtcgggaccctgcagtgtctgtccggaagcaggccctccagtctcttactgaactccttatggtgagaggcaggacattatatatgtaatgcatggtattttacattaaaagtaattccacacaataattacctgctgctaaacgttaagttgacctttaaaaactctactaagtccactgtagaactgtacaatgtaagggaggaggtatttttgaattatgtgtgatagactgtgcttcctattaaacataattaggaactaatgctagagaatgccaattgttagccctttcttcactttattgttattattattatttttgagacagagtcctgctctgtttctcaggcttagagtgcagtggcacaatctcagctcactgcaacttctgcctctcaggttcaagcaactctcctgcctcagcctcctgtgtagctgggactacaggcaggtgctgccatgcctggctaatttttgtatttttagtagagacagggtttcactatgttggccaggctggtcttgaactcctgacctcaggtgacccgcctgccttggcctcccaaagtgctgggattacaggcatgagtgactgcacccggcccttttcttcactttaaatctcacacagaaaaataaaatttaaaattgatttggttaagctagaggcctagattaaatttagtcaattagggcatagatagatgatattgccaaaaaagcagactcacaagtactatatttaatttacttttgtttactagttagcattttagtcaaagaattttagaagtatgtttatttctttatttcataatagaaggcattaagcaatgcatattttgactttttctgtcagcatctgttctaattgctctttgggatatttattatttgctcttgatttttaatgaccaaaaaagtactgatttactagtagctactagtaaaatagtgactttaatgtatgagtttaaaattttggtttgcagtgatttacattaagctggctttgcttttgtatattttttgaatttttttcttttttcactctatggtctatttgcagttgaaggtgtgattatttttaacatctcaaaatgttgatcacaacttccctgacttgtatttagaccttctcatgtcataatctttcactcctaaggctcagcctagatgcgtgcagatccagaaagcctggttgcggggggtggtcccggtggtgatggactgcgagagcactgtgcaggagaaggccctggagttcctggaccagctgctgctgcagaacatccggcatcacagtcattttcactctggggacgacagccaggtcctcgcctgggcgcttcttactctcctcaccaccgaaagccaggaactgaggtaggttaactgtatgacctgtgttccctatagaagaaggccgtaggactttgtattaataaatttctcctattggtcctcgaaaaatcagctttccagattacttagtgtatgtgaagattaagtattggtctctctttccctgactgacttccaatctcttagatatttttatcgcctgtatgtttgtgacacctgtttggtcacttcctttgcatctgtctgacgctttccagtttcagattttggtgtcttcatatgtagtagacaacactgatggagatacatattaatatcacctttccccaatactggttatcacgaaggatgacttcctagctcctgcaagttaaactgtttttaacacctcattggattaattgacttaactaacactgcaggctttttcccctttgataacacttattgaacatacactgtacagtgaatattgtagttaggagttaggatctgtgatggaggaatcatcatgcggtagaaagaaaatagatttagtatcaaaaaataccattctgcagccttggcaaaaatcactttctctgagccttagtttcctgatttgtaagagcagccgttgtactctaggatctcttcatggttttctcagtacaggttgagcatccgtaatccaaaaatctaaaatccaaacatgctctggaagctgaaactttctgaatgtcagcatgatgccacaagtggaaaatctcacacctgaccgcatgagacgggtcacagtgagaatgcaggctcacagcatacagtctgttcagcatccgcaggcgaaaaataaaatcaccttccggctgtgcatacaaggtgtatatgagactttggttccatccccaagatatctcattaagtatatgcagatattccag

SEQ ID NO: 88 - DNA, 32746 bp, Homo sapiens
  source 1..32746: mol_type = other DNA
ttcccgggcaggccccgccccctgtttccgctggcggcggcggcggcggcggtgccggagcgcgagcagagcggagacccccaggtcctgcgggcgcggtgagtgcggcccgggcggcgggcggcgaggcgggtctcgagagcgtgcggagtcgcgcggccttgagccggcgccgggcgggctgggcacccccaggccgagacccgagaagggggagcggccgggggcgcccacgggaggcagtgtgggcagggcggcggtgggacgagaggacgaggaacagagtaggcgccgtgcgggaagcgggccgggaaggggagggtgggtgcggggcccgggcaccgagcgaagtggggtcctccaggggatggctccgaggaagaccgtttcagaaagggagtaacccggggccggcaagggtttccgactgtgtgaccccgtgcaccgcttgggacagtccatacaaggaccccagagagggccagggggccttcgggcagggctgggatatggcctgcagccccccggcacccgcgaccgctccctgggccactgctggaagatcagcactccgagtgacaggactctggcacatcccgaagttggagatctagcccatctgtgcattcaagtttgggacttcaaaaaactttcttgtggtttttaaaaaaagatccaaacaagaaaccggcttgttgttgtaagagcaatatttgtacttgtacatcttggaactggagtcttggatctcctccctctttgaaaaatatacgagtcactgcttcatcttcccccaaatgcctgttttgtctggggaagcttgggctagtatgggatcccctgagctacctttttctcgcatcaccaaaacggggggtaagaaggcaggggcttacctgccttacctggtaactcttagttcagagacccagtctctcattatgtgcgcgtgcccttctgacctgcagctgtccttttccctggggtgactcaggtatttcctcctccaggaagctttcctggactagtggagaaaactgaagactcatgcgaggatccctatatatacctgccagctcccttctctttactgaaaatagccacagagaatgttgaatatatgctttgctatagagatacgcagccagcttgccatcataagtaatggggaggggaggagagggattatggataatttcaaacaatagcctggacaaatcatttatatttagctaaggaatgcagccagagaggcagacaattacaccggcttcctaccctcggcttggtcctggcatggctgatgcagctgggctgtgggttggagggagaggattggggtagataaaacttgaagtgtaattcagttctactctcactcactgaagacgccctgtgtgcaagtccctgaacaggtgagagtaggatttttttttttttggtctggtttaatcagattttaatattctggcagagctttttaaacctatgaacagatatttaatattaataacaataactagtgttgataaagtaatttatagttggccaagttttttctatgcacgttacattagctgtatataattttatttaattcatacgtaatcttgtgaaatttgttacttttttttttttttttgagacagagtctcactctgttgcccaggctggagtgcagtggcaggatctcagctcactgcaacccccgcgtcccaggttcaagccattctcctgcctcagcctcccgagtagctgggattacaggcgcgtgccgccacgccttctaatttttgtatttttagtagagatgaggttttgccatgttgaccaggctggtcttgaactcctgacctcaagtgatccacctgccttggcctcccacagtgctgggattataggcgtgagccaccgcattggctgaagtttgttacttttaattgccttcttataggttaagaaaatgatactcagagagaataagtatcttatctaaggtcacaacactcattaagtgaaagaagcaaaacttgaaccctggcttctgaccttcctgccttgtgccatctattctgccatctgcctctctgcccttcttctattttatttatttatttttttctgagacagacttttgcttttgttgcccaggctggagtgcgatggcactatctcggctcactgcaacctctgcctactgggttcaagtgattctcctgcctcaacctcccaagtaactgggattacaggtgcccgccaccacacctggctaatttttgtatttttagtagagatggagtttcgccatgttggccagactggtctcaaactcctgacctcaggtgatccgcctgccttggcctcccaaagtgctgggattacaggcatgaaccaccgtacttagccccttcttctattttttttttttttttttagagacagggtcttgctttgttgcctgggctggagcacagggacacaagcagctcactgcagcctccaactcctgggctcaagtgatcctcccaccttagcctcccgagtagctgggactataggtacaggccccatgctcagataattaaaaaaattttttttttttttttggtagagacagggttgtgctatgttgcccaggctggtctctggtcttgaactcctggcctcaagcaattctcctaccttggcctcccaaagtgttgggattacaggcgtgagccaccacgcccagcccctttcctctatgttgagccttgtcttcacctggcaccacctatttgtgcaaccttgggcaatttacctcctctttccaactctctgttttggtggtatattggattagaaatattctagagtctcttccagcatcagataattaacagtgtaagatattggcagccactcaatcaattaggaagtgtgctttatataaaaaattctaaaattgtggttaaaaaaacactgaatgtaaaatcttttttttgttgttgttgtttttgagatggagtctcactctgtcgcccaggctggagtgcagtggcataatcacagctcactgcaacctccgcctcccgggttcaagcaattctctgcctcagcctccccagtagctgggactacaggcgcccgccatcaccctcggctaaattttgtattttttttagtagagacggggtttcaccatgttggccaggctggtcttgaactcctgacctcatgatccaccctcctcggccccaaaaagtgctgggattacaagcatgagccaccgcgcctggcaaatgtaaaatcttaagtgtacattttaaccattcttaaatgtacagttcagtagcattaagtctatttacattgttgtgcgacagctccagaaattaccttgtaaaactgaagctttaatattcttgaaacaactgtttccccctcctcccagcctctggcagccactattctgtctgtttagtgtgctttattaagctcctgctgtgtgcttagtaaatgctgaccttgaggaattaatcgggagagttgtggagaagcagcccagcttaggtgggaagcccttgaacctggggtggctggagggagtgcccccttttcgcaggcctgtaaccccagggccagccagcactgttaagtgaatgagtgagtgggttgggacttgggcggatgccttcacctcctttagtctcagctccttgcttgcaaaatgaggataacaataccaagtactcagggtgttgggaaggagccatgagctgatgtatgtgaggcacgtagctcagggcctcatatacagcaggtgtgcagtaaacggtggctgttatttataacctcgtggaggagactggactaagatgcttggaacaagagaggacaagacttcttttctctgccgtgagggcccagcctgcagtggttgtcatcctcactgactaagagggagtggatctaatcccggtgcattcgcctggcattcagcatcctgcctgtctagccttatcgccactctcctccctcctggaacccttggttctagccagacttatctcccaagcatgctttgcgcgttccttcttggccccttagttcatcctcttccaccttcctggttggttcttccatccctctcctctttcaagacctttctcatgtctgagctcctctcaagaccctggcatcccatcccaaatgaacctctttttcctgggaaccccggtggcattttctgtcttcattttgctcctggcctttatatacttccttgggtggttctctagtgaactccacaaacagtgtatgtgtcacatgtataagagtctgtgctgggctggatgcggtgcctcacatctgtaatcccagtattttgggaagctgatgtgggaggatcacttgagcccagggatttgagaccaccctgggcaacatagtgaggcctctgtatctaaaaaattgtgtgtgtgtgtgtgtgtgtgtgtgtctgtgtgtgtatatatatgccaggtgtggtggtacacacctgtggacctatggtcccagctggaggtggaaggatcgcttgagttcaggagttcgaggcttcagtgagccatgattgtgtcactgcactccaggctgagtaacagagcgagaattctgtctcttaaaaaaaaaagtctgtgctaagttctgatgctgcaaaaataaaaaagataaacgtccttatcttcatggggcttataagccagtaaagagttgagaaatgggctcgaaagatgacagttcaaaggacaaggcgaatggcttctgagagcagaatgttatgtgggttgaaacagttcagtcaccttgattgaggagcaccattgcatgcagcaagtggtggtggacatgaaccccggaggggagcttgcatttcaacagaaggaggaaggatcagcctggggctaggcactgagaaagttgaatggtgcttgtgaatggtgcaggtgggccaggtgtggcatgtgtgcagggaagccatggaggagaggttgggcaggtagacaacagctgtattgtgtgtggccttcaaatcaccagccaagaactttatctgtccattcattcttccaagagaacttgagtgcccaccgtgtgccagcattaaactggtgctgtggagatagccatcaaccttgggaggccctgggaagtttgcaggttttgagcaagggtaagagaagcagggctgggcttaaggagggtgaatctgaggtctgtgaagaggggacgtcatggtagggagagtggctgggcacttgtgagggatggtgaggaggcaatgaacctgagacattttggaagtaggatcaggatcatttgtaacttgattggatggggaggtgaggaaaggatgaagttgaagggggattgaagctgattctgtgctgggtgattgtgaaaatgcaatgccatttgctgtttccggtaggcattgtttcgtcaactagattgcaagccccttcagggcatggattctaattccctctgatgttctccttgaccctgaaatcactgctgtgaggcacagaacagagtaggcacagtggacccctcacgatctcaagaaatgaagcttgcactttctggcatcccaaatttgtatccacagcaatatttgttcatgggcctggctttctccggagtcatgtttctgcagagtcaaatgtttcctgtatatatcctcacaccccaagttaactgccctttcagtttctgctgcagttttatttctcacttgatggccattttccaccaagtttttattgctccataagagtaactttgaatgtggtagagatgaaaacaacaaggtggccctttcctttatattgacctcatagcgtacgcgatgcaaacacatctcagtgagtttacacacttttacatatcttgaaactttgggtcacttgtgagtggccaaaattgtaatattaaatccttggatgacaaaggtctaccccagggatgacaaatacatggtgaggattctgttacttctgtaactgcccgtggcagacatcactaatcaatcgcagctgtcttttctgctgggccagggcttgggttctgctcataatgccttgggtacccaccgccaactgagtggcattagcacactgccttcctgtttgccatttctggctttctccatttgttgagtgagcagtttcttggtaggggactgctgccccaaagagtggtccttgatggacagaattcaccctggagtggcttcttaccaaagtgatgacctaattttttgccttcctgcaggaatatcctggaaccttcttttgtttgtcagcagccaaggtgtttccaggaagttcagagagaacaggtcagtgttggtccgggtccattgtggggtagggcctctgaacgtctgtgtgttataacctctgtctgaagtcaaggtctttcttgccctttaactgtgggttgggcaggatagaagaggatgctgacattttctagttgtcgtgccctgactcctggctttgattttctaagctccttaaattgggctttgggggccaggcaagaatgatctcctccccactgtttctgattggtggctgatggtactcttagattctttcttggccaccccatttgtgtggaggaagcctagggagaggcctgtaacttcctgcttcctgtctcctcccagcaggcttgggagccagggtggaggggcctcccacaacaggccagaagagaagatgcaggagtcctggccagtccttagtgtctccattttgctctgcccaccgccctccaccaggacccctacggggccctcttccctgatcctccaggctcctgggggtcttgctgatggtttgttcattgttcctagcacttgtgcatcgaggcctccgctgtgccagactacagaccaggcagccagacagtgggggtggacggtgctgattcaggttcccttggggtgctgtttactgacctgggcctttttatgtttaatttatgtgtgttttctcctgcggcttctccctgctgggtgatttgtaaaatcttaccttccctgaacccaatggtgtagtcggtggagcagggagagggggtggaatggtgctggctggtggctcatcttgccaaagattctcttgtctgtgagttccagcagggattatttggtgtcccaagagtggccaggaacctcttattgtcctgccatgccttgcacgttatacttaggatgccagtattcatatttgtcatcatgatcagactcagttttagaccctttacaaatgtccacaaccaatttaacttaatcagatgaagttataatttaaatctcatttaactttcacaaaggccccgtggggtagctgtcatgtcctcctcctttaccagcggcagcaggtaaggcccacatagtgttagccggagcaggggctccagcccagatgctatgaccctgcagcgcctgccttttctaatgcagacctgcggctgttcttaactgactctgggaatccgctccaggtccctccctgagcctgcttgtggcaggaatgcctgagctcccattttaagtcctcctcccgcctccctggggcccggatgggtgtctgctttcattcttgcagctctgggatttgaggcaccgcgtatcactggatggtgcagtgccgctaggcacatgggcttgggtggaggaaaatcagtctggtgaagatcaggcagtaaccgtccaggtgcagtggctcacgcctggaatccctgtgctttgggaggctgaggcaggagttcaagactagactgggcaatatagtgaaactttgtccctattaaaaaaaaaaaaagaccgggcggcagagagggaaggacttaaggacaagggaatgaccgtcctgctgtgcggcatgtcccccacatcccgtggggcctgttcctggtgggccctgccagacagaacttggtgaagggctccccaggaggcctgtatggccttggggagacacagatagcccctgacgtcaccagccgtgtctatctagatgaccgtctttcctctgtgcatctgcgttgaaacccaagtgagggagatgtgagtggaggcctcagcagacaggacgttgatcctctctgatggctgtggctccagggggctttggttttgcatttctcgtcatgctctggagccatgctctgggatgttgaccagctctggggtgggaggttcttgtcctggctcctgctcctacctgtaactgctgtgcgaacttgggcaagtcgattggcttcttcaggccattttcctcacctacaaagcggcaggttgggtgacccactgccaaggttctttctggctctgctggaggtggtttctgaggtgggatgagttggtatgcctgggttttggcttccagtcctgggcctgccttctgcctctgactagtgccttcccggcctctgacctggaggtggatggaggaggaaagagtgaagttaatgagtaaactggagatgctgacttctgataggagcggactgggggtggaagttgtttgcggagatggtcccctgccccgtgagtggcgagtggcggggtcctactgcctgacttctgtcctgtgtagacggctctgctgttgatttggtttaaactctcttcttcgtgcccgtgcctgaggcagtgaggagtaagcctccattgctggactccagccctgcatgttaatcatttcaacttcaatcatagccacagcataacgaaatgagaatatctgcctggagcaggttagcttccaaactctctccttgctctcaaaccaaaagtgtaaccagaattttagcctgaaccaggagggtgctcttcagaatgggaaggagatagaagaacccctttgctggcatctggagttgggagcacgatcctatctgcatttcaacccgatactttggagccaaatgtagatttttttttttttttggcctattgtttagtattatctgtgctttgatttaccacaccccttccgccctctgttttctctcaggctccctcacagtggatggctggaaattgatgatactttgaatattcactcactttctgagagtcttgtgaccatttctactctcaatggtcatcatttttagaacatctgatcttgtgttaggaacaggaaaagatctggtagagagcagtccagggggtccgaagagtcaggaagctcagtaagtgccccctgaaatcctcccacctgctggagaggctttgctgttattgcaggaaggctggagggtcttgtggcctttggggtacaggatcttggtgaggccttggccttggccttagtagcttaggattgctgctaactctcacagcacgtttgtgcgaaatttgaaaaatggcccttcttcaggttacaagcaaaaattaaagtgaatatattattgtacagctggaacaaggtccaactgtgtctgaggcaacccccttgagccctcgtgggcagtgaccctggctgtgcgcacacttggaggcacgccgcctccaatcatggggtgcacatgttgctggaaacacacacagtctggtccctccccttgcaatgtggggaatgtgtcaggttcagagtcagggagagggcctctgaggacagtgaacaggtgagggaagtgagctggggtgggagggattctcagagcaagattgaaacagggtgcagccatgcacatgtgtgggtgttagtgactatgtgcacacttgccttacatgtgtgttgggtgtgcttgcatgggtttgtgtgggagggcactctgcattgttttggcactcagtggaggggcccacgtgtgcactctcaatagatcagtataggccagacacagtggctgtcatctgtaggcccagcactttcggaggccaaggcgggagcattgcttgagaccagcctggacaacatagtgagacctcgtctctaataagaatagaaaaaaaaattagtcaggtgtggtaatcagtgtgtgcctgtagtcccagctactcaggaggctgaggcaggaggattgcttaagcccagaaagttgaggctgtagtgagccatgatcgtaccactgcactccgggctgggtgacagagtgagaccctgtctcaagaagaaaagggtccgggcatggtgactcacacctgtaatgccagcgctttggaaagccaaggcaggcaaatcatgaggtcgagagttcgagatcagcttggccaacatggtgaaaccccatctctactaaaaatacaaaaattagccgggcttggtggtgcgcacctgtaataccagatactcgggaggctgaggcaggagaattgcttgaatctgggaggcggaggttgcagtgagccaatattggccactgcactccagcctgggcaacagagccaagactccatcttggaaaaaaaaaaatgtcagtatatacctgtgatgtgagtgccttccccttagatggcagggtaaaacctggacacggtacctgggaaccctgctgacggcctctcccctggccacctgccagtgtggagactgaggcttaggggcccaaagctctccgacaagccctgagggtggcagtgccagggacagtaggagaagatcctgcctcagcaagtccccagccccgtctcagggccaggctctacaggagggctcagaggggcagggtgcccagctgagtttgaatgaactgtgtctttccgggtgtgtgaacatgcaggatgacatgttttgttttagagaaaatgaggtagaggtctgggcttgcaattttccacttgtcttaatcctgggagattctaaacagctttgtttaaaaactggacatgcagattgcaaagacctgagtgaggaagagccattgggtcccccaggaaaacaattaggtttgaagccagagtttggatttgttcgaccattttgagtgctgtctgcagcatgtgggacctggaggcgcttacagcatcacccatggtgtgagtcactccaaattagcagccatttcaaattggcttccactgacttgctgctggggatgggtggggctgggggggaagctccaggcctggctgtcacccatcatccaggctgtggccggcagagaggggagggggctggaacaacctgtcttggctcagcctgcccccactgttggccagagaagctggagctggtggtctgtgaaggtctcctggacggagcagttcgtgcccgcagtgcagggagaacactggagaccatgcaattcagggcagggttggtggaactttttcttggcatccatttgagaaactcagaggggatcaggctgggccttgagggagggctgggatttagggagggaagagaagggtctctgaggggttgtaatgctggctgggagcttggttggggtggggacaggtgtggcctgcaggagagggtgagctgttctgtctggggcacctgacatactgcttggagcagctcaggcgcgggaggctggtggtgggagccagtgttggtctttgaacagtggaatgacaggatgaaaagggacactataggctgggtgtgatggctcacgcctgtaatcccagcactttgggaggccgatgcaggcggatcacgaggtcaggagatcgagatcatcctggctaacacggtgaaaccccatctgtactaaaaatgcaaaaaattagccgggcgtggtggcgggcgcctgtagtcccagccactcgggaggctgaggcaggagaatggcatgaacctgggaggtggagcttgcagtgagctgagatcgcgccactgcactccagcctgggtgacagagcgagactccatctcaaaaaagaaaaaaaaaaagaaaagggacattataggaaaaattagattgtagcagaattcaaggtgaattttttttttttttttgagacaagtcttgttctgtcccccaggctggagtgcagtggcgtgatcttggctcactgcaacctcccactccctagttcaagcgattctcctgcctcagcctcccgagtagctgggattacaggcatgtgccaccacgcctggctaatttttgtatttttagtagagacggggttttaccgtgttggccagggtggtctcgatctcctgacctcgtgatccgccctccttggcctcccaaagtgctgggattacaggtgtgagccactgcgcctggtctcaaggtgaatttttttttaaaaagcatccttttggctgggtgtggtagcttatgcctgtactcccagcactctggggggccgaggtgggaggatcagttgagctcaggagtttgagaccagcctgggcaacatagcaagatcctgactctacaaaaaattaaaaaacgtagccaggcatgcatacctgtagtcccagccactcgggaggctgaggtgggagggttgcctgatcccaggagtttgaggctacagtgagctgtgatcacgccgctgtactccagcctgggcaacagagtgagatcctgtctcaaaataaataaataaataaataaaataaaagcatccttttttttgttgcaaaataataaaaactcattataatatccaaacattacataaattatagaagaggaaaatctcccctaatcctacccatcagagataatcactgttaatactttggtttgtattatttccagatatttctggatagactagcatccagccgtccacctatttatcttctcaatttccataaatagaattgaattcaacttactgttttgcccgttctttaggcatcttttcacatcagtacattcagaacaaccttattcttttccgtagttggcgcagacttgctgaatggattttgttccattcatcactgaggtctatgctgcatagaccaccccaaaatatagtggattaacacaaacaccattttctttgcttccagttctacgggttagccttttgggctggtctctgcagtcttgcctgggcttattaatgcggtagcagtcagctggtagctctgcaggccctggacagctcaaggaagcttcatcatatatccggtggttggtgctggctgtcagctgggctcccctgctacgtggtttctcactgtcaaggaaactagcctttcaggtgaaaacagtctacaagacctcttaatatctaggccctgaagcctcacacacgcattgtctgttgattgctggtaacagcaagtcatgggaccagcagaactccaggggcgggcagactccacctcttggtgggaaggctggccacggcacaaggagggtatgtgtgttccaggtggggaggacgcggacgtgcgatccctccctgtgcccagaagcatgaggaatagaccccacaggtaatgaggaataatgaggaatagaccgcagagataatgaggaatagaccccaccgatctttggaagatagtgcagaccccttctcctcccagatcactgttcatccccagatgggtcatccagggaaactggcaaacactcgatcttcatgttgggtgtcctttgaagtggagtcagtgtgttgtgtgtgtgcacgcggctagcgctggcagaggcttggactttgtagtagacagtgtctcctgccctatggctctgagagctgtagaagtcaaaccttcctgccctctgcaagctgccaagagcttgtcttcttggtactccctgctgattttcatggcatctctgaaaaatgtgtcagtgagcgacaggtctttaacaaagctagtccggccttccaggcccaggcgtctgctgggattttattcattcatttgccaaccactacgctccaggcttcctccgcatccgctcataacctcggatatgaaataagagggcccaggcctatgtgattcacagacttcacttttccttctcaagcaactcacaatggactcgacaccgtgacttcccgcaaggtgttcgtttttatatttagttttctcatcacctgccttagtggctgttcccttcctgtgaaatgtcaccaatggcagggaggcaggaggaggcaggggaagagccagtgatgggtcattaatgcatccccaaaccccagcttagaggatgctacagtggagctgctggtggaagagttctccccagcaccaatcattcatcaaacttacctctccctggagatccgaggctggacctgatgaaatgcactttctcgtgcagcagtgttcttttgcctgtcaactgctgggtggtttttgcattcatcaaataagaacaaaggcagagtgggcttaacgcgtttgaaatccccttggtgttttattgtctccctgctccccctcagcagcttttagtaaagaaatgttttgtagctgaaaaaggttcactgtgaaagcattctgcacctccacaactccgcctctggcctggcctcttcaactgtgctgtgggagaggagttgctgaagactgtgttggaggagggagtatggcctagcactgcagcacccttgggagctcccagtgcctctgggtgacttgggggtgccagcattgtgctcctgttgcagggttaatgagctgatcagctcacaggttttatattaatcagtgctcagtgttgacaaaaacatgcaatgctgactgtgcaaacctttgagaaatctggcatcacggacaagaaaagaaacctcagcaactgcttttggccatagaattggaaaaaactggatagagctcctcagcctgctccaactgagggctcgctagcttgaggcctgtagcaggtaaattccccagaagcggagacctgccaggccctccctgactccttagttctctgctcaggtccccactccacccctccgttacttgttctccatggctgtgaggatggattcaagtcatactgtcagtgaatcagtaagtcgttactgtgtgctttgattcctcaagggtctgaggcatcttttggcccaggtgctccgtgtgataagagagctttagccaagtgtaaagttaggtcagtccccagctctttctgctcatggctacaaatgtctatttctgttttacccagttccctcatagttcccgagggcccagtcctgcagcacctataacacccaggagtgggctctgaaggcagcaagacaagtaggaagggataagattgctacagatacagccagagccccctgagaggagatgcctgccttgactcagcagggagctctcactgctgtatggacacacctaatttgacataaaaaatgacgctacccactttcatcatccaccttacccactgcttatccaaatgggtctcagttgtttggcacattggatgtccccgtaaggacaaggatggtccttccctgaggatgctcagtggactccctgggcgctgaggattgttcttcaggagcacagtagcaacatctttggaaccagtgtgtggctttcccagagaggccgcagtcaactggctgagagggaggttagaaatgagtaggcaggcctccctgccaccacgcccagggctgggggagctggcgagtgcttccagcctgctcttggcctggacactgcaggctgggcctcttcctgcgaggagctcacgttctgatgttcagattgaacctggaacacggaaagcattcagagtcctggcgttgtcctgaatcatacacattgtcttctctgggaaagcttttggggccgctggcctttgggatgctgacacgaattgtgggacacacttaggccaagaagggaagccacagaattgcccccagttctgggagatgggatggcagtctggtttcctgggcccaccttccagctggctttggttgtgctgtgcccatcagccgaagtagatggacttgaccctgtctttgggggccaggcgtggggggcagtagggatcttgagtgtgagccccccatcctgattctggggcaagggagaaggtgaatttgaccacaggaagaaaagtggagaggtagggtctggtctccagctcacccataaaagctggtgagtctccgagtgtcctcaggtctgtggggagggcatcagctgcagttcctgattctgctacagaacgtggatgggggctgcggactacctcatgccacctccaaccagccacaagtttctgttgcagggaacagagggcagatcgaatggatcccccattagaagagtgcctgacacagagtaggccttaacagatatttgttgatgggagataggaaggggatagtgagttacagctatggaaagaaactcaactaggccaatcacagtttgagggattgagggaaagaccccatcctaccttaaaatgcctcttcactagcttggccagctggtggaacccctgccgttagatgtttgttcttttggaggctctttggttttcaggagtcttctcttgatttgctttgttttattgttaatttgtacttatttatttatttttaaagacagggtctcgctctgtcatgcacgctgaagtgcagtagcgcaataatagctcactgcagcctccaactcctgggctcaagcaatcctcctgcctcagcctcctgagtagttgggaccacagatgtgcaacaccatgattgactaattattatttatttgtagagatggggtcgcactatgttgcccaggctggtcttgaactcctggccttaaggggttcttttgcttctgcctcccaaagtgttgggattataggcatgagtgagccaccacgcccagcccaggagtcttctcttaaaatgccacagcctcttggagaggcttcctgtttctagccgtggcaggagatcagcatggccttttggagatgaaatctaagaggtagggtcaagccacccctagattcctgctttctttgcgcaccttcccaacattgcctctattagagaaattcccaaaccttttctttctgtggaaactgcagcagagcagaagactccagggacctccccatgcctctccaagaaaattattgccaagcagtcctcataggcattcataggatgatggcgtggctttaaagaaacacctaagggaatatctgtttttttgggtggttgttttaaatcaattatcttgttgttgttgttgttgtttttttttttttttgagacggagttttgctcttgttgtccaggctgcagtgcagtggtgcagtctcggctcaccacaacctccgctcctgggttcaagcgattctcctgcctcagcctcccgagtagctgggattacaggtggctgccactactcctggctaattttgtatttttagcagagatgaggtttctccatgttggtcaggctggtctcgaactcctgacctcaggtgatcctccagcctcagcctcccaaagtactgcgattacaggcgtgagccaacacgcccggcaaaaatcaataatcttttttttttttttttttttttgtttttaaatttatttttttattgataattcttgggtgtttctcacagagggggatttggcagggtcatgggacaatagtggagggaaggtcagcagataaacaagtgaacaaaggtctctggttttcctaggcagaggaccctgcggccttccgcagtgtttgtgtccctgattacttgagattagggattggtgatgactcttaacgagcatgctgccttcaagcatctgtttaacaaagcacatcttgcaccgcccttaatccattcaaccctgagtggacacagtacatgtttcagagagcacagggttgggggtaaggtcacagatcaacaggatcccaaggcagaggaatttttcttagtgcagaacaaaatgaaaagtctcccatgtctacttctttctacacagacacggcaaccatccgatttctcaatcttttccccacctttcccgcctttctattccacaaaaccgccattgtcatcctggcccgttctcaatgagctgttgggtacacctcccagacggggtggtggccgggcagaggggctcctcacttcccagtaggggcggccgggcagaggcgcccctcacctcccggacggggcggctggccgggcgggggactgacccccccccacctccctcccggacggggcggctggccgggcagaggggctcctcacttcccagtaggggcggccgggcagaggcgcccctcacctcccagacggggcggctggccgggcggagggctgaccccccccacctccctcccggacggggcggctggccaggcagaggggctcctcacttcccagatggggcggcggggcagaggcgctccccacatctcagacgatgggcggccgggcagagacgctcctcacttcctagatgtgatggcggctgggaagaggcgctcctcacttcctagatgggatggcggccgggcggagacgctcctcactttccagactgggcagccaggcagaggggctcctcacatcccagacgatgggcggccaggcagagacactcctcacttcccagacggggtggcggccgggcagaggctgcaatctcggcactttgggaggccaaggcaggcggctgctccttgccctcgggccccgcggggcctgtccgctcctccagccgctgcctcccgggcggcgctcccggcgcggcggcaaagactgagacagctccgctgcccgctgaactccatcctcccggcggtcgggcggcggcggctgccgcttgtgtagttttaaatgttcaaaatcaataatctttaatacagtcttgattcaagtcaggaactaaaacatagatactgccacatcctaaacccagtgctgtagggactggtctgtgcaccctggtgtttctgagaccttgcagccacctctacctcccgattccccacgactccagggtctgcactgcctgctagagaactgacttactggcatgggacttctgcggcctcactggcattcttagaggcagggacatttctaacatctctcctaagtatctcttgtgcattgtctctttattccttctgaagagcagaggccttggttttccattcactggtgctttccctgttttctcattgcctggcacctggtggacacagaaatattttttgaatgaatgaatgaatgaatattgcacttgtgatctaagagatgtggccctaatctcatccatttccccaggacacttagacacttgcttgctttaaaaccacccatcttcatattgcaggggtttcaaacatttcaggagaggcagtgaggatctttctttctttctttttttttttattttgagacggaatctcgctctgtcgcccggagtgcaatggcatgatctcggctcactgcaagctccgcctcccgggttcacgccattctcctgcctcagcctcccgagtagctgggactacaggtgcccgccaccacgcccggctaattttgtttttttgtatttttagtagagacggggtttcaccatgttagccaggatggtctcgatcttctcacctcgtgatctgcctgccttggcctcccaaagtgctgggattacagaggatctttcttaagtcaggagctccttgttaaagtgtctatggctctgggaggggagttatgctgcctttcccaaaagaggtggcgaggacgttgagggaagaggaggccattgctcagaatttcatgctgaggatactgaggctggctttccttgggtgtctgggcagttgagcagaggaggctggagccaggctttctggattgtgacccagattctgtcgtttctctccccctcccatgcctgcttccgtcttcgtcagctcgacccagggtcacctcagagctcccagcagagtctgtgggcagctttggaggaaaacatgcgcccaaaatggccaaatccatgaggacttgagagaggcacgtgtgtggctattttgggtttggtgggctgagctcagatctctctggcattcccagccactggcttctgagaattgagcagaatggaaggatgttaaaaagcgaggctccaggagcagcccaagaatttgctcattctttacctctgggaggaggtgctcaccccggaacccacaaggaggaatggggctgagggaagggactatggcagggagggggcaggggaagagagggaaagttcaagacgatttcctcttcctcttctgtgacttcctggaggaggggtggcaagtacagtgctggcccagggccaatctgataaggtagcaggacttagagcccagaggaatggctccccccgcaatccatgcctctgggggagttgcctggtaacagccattggctggggtggtgcatcagcctctctgcctctctgaatgtctctttcaatttctctatccttctcccacatcaggctagggacagctctgatctcaaatgactggggagtcttcatctctttctcccttccccagagtcaggcagagaagcccctttcactcagtgcacatgagggagacatgtgagcacctcctccgtggaagttcaggagctcagtgatgccggggtctgtctttgcccctgaggagctagtgtggacgtgtggagacacgcatgtgtagatgtgcaccgatgcaggacgtcggccagagtgcagagtgcagagtgcagccggatgtgacaggcagagcgggtcagtgggaagagctgcccagtaggagtcagggcccccagctggcctggggcaagtcatgtcatttcttggtgcctcagatttttccatctgtcaagtgaggggtttatgatgcctgaagtcctttctggcttaagagttacctgattccaggagttgcagggagaagagccttaaagatgggtagaatgttttcattgcctctgtctttgttccaaattgggtctacccttggacccatctcagctgggttgttcccatgaagagggggcaggctgagggctcaggtgttacactcggatcccagacctcgcttctgttctctggaccctcctgttaggaaaactgccaaatttgcctttaggttcagaaaatcagttgcacctgtctagaacaaggtggttcatccttggcctgcaagggagggctgagtgactgcctgagacccacagagcctgctggggactgacatctgctcccatccagcctcgttctttgcttagagtcactttgtccgtattgtttctgtaatgccaaattacttgtagctctttcttcctttcccagtcatgaggtttcatttttcattgttctcagtgtgatctaccttgcttgaaatgcttcccggatatggcattgtttttttttttctctctctctcttttttttttttgggatggagtctcactctgttgcccagcctggagtgcagtggagtgatcccgcctctctgcaaccgcagcctcctgggttcaagtgattcttgctcctcaacctcctgagtagccatgtgactatgggtgtgcatcaccacgcccggctaatttttgtgtttttagtaaagatggggtttcaccatgttggccaggctggtctcgaactcctgacctcaggtgatccacctgccttggctctccaaagtgctgggtttacaggtgtgagccatggtgcctggcctattttatctcttaactgcattgttttagcaaatttgaaaatttgctcagctgttgtttaagtatttttccatctccacttccctctcctttctttctggtaccccaattatatggatatttgactgtttgatattgtcctgtaggttgctgatgttattttttcagtattttttccttctgtgcttcattttgaatagtttctattgctatgtcttcaagcgcacggatcttctgcagtgggtaatctcatgttcaataattccctctggtgtatttttcatttctgacattgtatttcccatttctagacattccatttgagtgtttgttgtatctttgtctcatcatgttgatgttttcctctgcattcttgagctttggagcgtacttacaatacttgtttatttcatctttatctactagtttcatcatctctgttatttttgggtttgttctgttgactgatttttctgtttatgatttttctcctccatatttttctgcttctttgaatgtctactgatttttaattggatgccagatcctgtaaatttaatgttgatgggtattgggttttgttatatttccttgagtggtattgggctttattctggcattcatttaaattgcttgggctcagtttcatacatttgaggtttgctgttaagctttgttggggtagacccagaccagcctttagtctagggctcacttagcctcactgctaaggcaacacccttcagaggattctaccgaataccctgtgtttttgaggtctgtccactctttttttttttttttttttgggacggagtcttgctctgtcgcccaggctggagtgcagtggcacaatctcagctcactgcaagctctgcctcccgggttcatgccattctcctgcctcagcctcccgagttgctgggactacaggtgcctgccaccatgcctggctaattttttgtatttttagtagagacggggtttcaccatgttagccgggatggtctcgatctcctgacctcatggtgatccgcccgcctcggcctcccaaagtgctgggattacaggcttgagccaccgcgcccggccaaggtctgtccactcttgctggtgggaatgtgaactctgtctggccctgtgtgtgctccacagattgttgggcctgttgctttccagtggttcttttctcagtcttgtggatttcaccccactggtgtgcagatcagccagagagtctgggtactcttctcgaagtctcttcgcactctctgctctcctctcctctctggtattctgccctaagaatcttagctgcatgaactctaattcctgtctcctcaacttggtgagacctctggactccatttggattcctgttgtctgaactgctgcgtggaagctgcctccaggaagtaagctggacaatcagaggacttgcctgttttgttccattcgtctgtcagggattgcagtcctgtgttgcctgttgcccgatgtctgaagtagtttcgtgtgttctgtccaatttttcagttgttttaggtgggacggtaagtccagaccttgtggctttaccagggctgtccccgggagtcctgcattatttgaagactcaccccaggcatcacctcatttcctggtgtcatccttctgcactggggtgggtgcctctaggaaacactcctacaagaacccataagcagcatgttcttttccccttacttaatttatctagctttgttgttatctctctaagttggctgtgtctttgagtacaaagatgatatggtgtttttctcattatcccttgtacctagctcagtgctaggtggccaatgtttgttgattgaacaagtaaatgagaataaatggaagacaatataagtgaaccatgcttcatggttactaagaagaacagtaccatcccgggtgtggagcttgggctcccaggagctcagatcacacctgtagcattgggtttacttaattctggttggggcattggcaagtctgaagtcatctggaggagggtgactgggagaacggaaactacactccataggaattggatgaaggatttgggaatgttcattctgttgggaaattgtcttttatggagtactattggaggggggcataataacagttttccaacatgtgtaggattgaggactgaacttaggactcttggtgaaggattctaggccattagatttgggtctaggtccaggaagaactttctgaaaattgaaccatccagcagagaaatgggtaccttgaagatagtgagctccctgttgctgctgggatttaagccaaacccacgtctgttgcttagggatgctgtgtttggagttgtaaagttaaccaagatgttgcatgagatatctcttagatgccactctacacaattttggatcttactcctcctctgagccccatgattcatcctctggcagcctcccatccccagcctacacacacatccagaaaacacacctggaatgtgctccttactactgttttatgaaacaagcaccccttgtttcctgcctaaagtggattcttctcgggcctcacggactggctgctaccacccctgggcggtgtctgtgctcatctccatccttctgacttcggcctgactggcaccccattgatctgggtcagccccttctgtcagcaccttgtcccattgtctcctgtgtctggagacacagtgcctttgagacagaggatggctctgattagcccgttgttttccctgctccctggtggctgggaggctcccagcgaagcctggcggccttgctgcagccattccactgctcaggaatatggctctgaatggatactgtcacccttgatctgttcatccgctcctttctctgggtctcatgtctcttcccctagggtctttcttttcctcggactggaagctcctgaggaggtgtcaccccactgggtcaaggatggtttgctgcacattgtagaggctcagttagtagtggtgctggcagaactcttgagagaatcttgcacgcacctgctctttccccctgcctttttttctttttctttttttttgagttgggacctcattctgttgctcaggctggactactgtagtgtgatcatgactcactgcaacttctgactcctgggttcaagcgatccttctgcctcaccctcctaagtagctgggactgcaagctcatgccatcatgccctgccaacatttttaaaatttttttgtagaggcggagtcttgctattttgcccaggctggtctcgaactcctggcctgaagtgatccttttgccttggctcccaaagtgctggggttacaggtataagctgcttaccctggccaaggaggaattttttttttttttttttagacagagtcttgctctgtcacctaggctggagtgcagtggcgcgatctcagctcactacaagctccgcctcccaccaggttcatgccattctcctgcctcagcctcctgagtagctgggactacaggcgcccgccaccacgcccggctaattttttgtatttttagtagagatggggtttcaccatgttagccaggatggtctcgatctcctgacctcgtgatccgaccgcctcggccttccaaagtgctgggattacaggcgtgagccactgcgcctggccccagggaggaatgtttttttgagagctattgcacagcatggtgactacagtaaataataacatgttgcatatttcaaaattggatctggaacagaggtcacttaacccatatttgtggactgaatgagtgagccccagagagggacatcccagtgtccaggtggccaggacagtgttccacccaacctgcccatcttttgaatgaggaagatgaactcacgaggtgaagccatgtgctccaggccacttgctgttaggtgggagagcctgtctagaaacctacatgttctgcctcctagtttccagctggctcccttgggggatgtcaagacagtaataaaaacatgatataatcccagtcagcgttgaccaagtacattctgtcgtgatgtgcagagttttgtcctacttcttaaaatgcactcactgaaaagagatttcctgagcctgttctctattccccttggctgccgtcaccagttcctgcctcagaacacacttgccctcaatgtgactatgatgaaaatatattcactatttttgtcagcctcgtccgcggtagctgttgtctgcatgctgttttaggtcaactaatattttactgaggattcttatgttggttatctttccattcctcacgtgcttatctgtatgggatttgctcacttatgctttagctgaacactcattgaacacttctggtgtgcaggcaggctctaggaaccagggactcagtggtgaatcggactggacgtgcccacctggggacctcaaaggtccctaaactgggactgcaagttggcctgggggatgctgctgggagaaatcattttggggtctttgtctctgtagggctccccaccatgccatgcacgaacatgtattcctagacactgctcctgttgtctcttggctgtgactttgggaagtggctgggatgaggcagccaccagcctcaaaggactagcacctggagagtgggaaagtgggcttagggcttgtgtttctggtcccagcctctgcttggttcacactaagtgtcctcagcctcatcccacagatatttgaagggctcctctggccaagcactgctcccggctctggggctgcaggagtgaggaaaaatccctgccctcaagagctcatatgttggtggaggagacagacaatgaaaattggtgtatatcaggaggtggcaaatgctatggaggacagtaaagcagggcgggacgggaggatgaggcggggtcagggagccgtgaaggcgttactgaggagctggcatttcaggagagactggaagacagggagggagtgaacctgtgaacatcttggggtggtgcctcctggggcagcgggagtaggaggtgggagcacatgaggcctgttcaaggctggtacagctggaggggagtgagcaaggggaaggtcatgggatttggattatctaggccatcttaggggctttagctcttatggcagaagagatgggagccatggagggctttgagcaaaggagtgggagagctggcatacatttcaaaaggattgctgtggctgctcggtagaaaatcggtaagtgacagtagcagtactaataactgttttttttttttaattgttgttgttgttttgaggtagggtctcactctgtcacccaggctggagtccggtggcatgatcatggctcactgaagcctcaacctcctgggttcaagagatcctcccacctcagcctcctgagtagctgggactgtaagcatgtaccaccacgcctggttaatttttgcattttttgtagaaatgggggtcttgctatgttgcccaggttggtttcgaactcctgggctcaagcattcctcctgcctcagcctcccaaagtgctgggattacaggcgtgagccactgcgcctggcctctaatcactgttagctaccaagtgcttatcgtgtgcctggctcggtgcagactctttgtggcacctcatttaatccgcccagcaactttactccaatttacttagcaagaagttcagagaaagtaaacattttgtccgaggatacagagctaaaaggtggtggagccagctgtcagcttaggtcaggcaggttccaaaggttgtgccctggactcttgtccatatttccagagcaaaagggccggtcatttaggacaacagtggacaggcgtgtgggggtgatgggcagggggaccctgttcctgttgtttggctgctctcaggcgttcagctggtcaccctgggagaggggtgagggcaggccctctgctttaactcacttgtgtggtaggaggaaaagcaaattgtttccagatgaggggaggctgcctggggagtggaatttgtgccccgtctgcgcacagcagcctctctgggcctacaggaccctgtgtctttgtgttcagacaagccctgctgtgtagaggcctgagctttctgccgccgacttgggctcagtgccccgaggcaggcagatggaggagtgcggcagatgtgccgtcctctcccaggggagggaagctccttctgtttccgagtgaagtctgggccaacatgccccgtattttacctatccctttccttctaagtagttcagatcactttcagaacgtcacttccataatccttatatttattgctccctgaggaagtaaggaagatatttttccttgtcttaaaaaaaaaaaaaaaagctacaggctggaaaaattggggtcagagagtaaggctggggtggagcaagggagggaacccaggagcctaggcctctgtgcagcttgccttgagaggggcagggagggaagaggcgagctgagcgggaaacaggggcttctggatttgggggtgcttccttttctgttaaccatgtgctttggtgtctgaatcccggtggggtgagggtccctgccctacctagtagctgtctcaaggagtgtacatgcccctgggggcctagggcctgctttgtgtgcacgcgcgtgcacacacacactcacacacacgcacacacgcgcacgcacacacgctcatacacactcacgcacacatgcgcacacacgcacacgcgcacacacactttcatacacacgctcacacacgttcacacacacacgctcacacacacatgcacacatggtcacgggcactcatgttctcaggtgtgcttggtcccatccacactcatcaccgcctcccttaccctcacgtgctcattcgtatgtgcagcgcacactcagtcttgcacacacacactcatatacccccttacccctcacccactccatcctcaccccatgtgcacctacacatagcatgcacactcgctcttgtgcgcgcacgcacacacacacatgcctgcccatgctgtggctctcacacacacgtgcgtgattggttagttcgcctgtgcatatacccacctatgcccacagggaggtgtttgggggacacatgtcagagacgggcaccaacagctggcagctgacttggcatgggagtttctgacagtggtggagtcccacaataatggcttttagcttaccacatcctgtgcctcagtttacccctcttgtataatagagagagcttggagagactgaggacacaggagacacaggtggttgagtgttctgagatctgcagactgggaggcattatgcctgtaaaatgtaaagttaacaaaggcagaaactggtggtgggaagtggaggaggtccttaaaaagaaagatgggactgggcctggtggctcacgcctgtaatcccagcgcttggggaggctgagacagaaggatcacttgagcccagaaatttgagttcaccctcagcaacataatgagaaccctgtctctgcaaaaaataaaaaaattggccacacggggtggcatgtgcctgtagtcacagctgcttgggaggttgaggtggggggatcacctgagcccaggagttcgagtctgcagtgagccgtgacggtgccactgcactccagcctgggcaacagagtgagaccctgtctcgacaaaacaaaacaaaacaaaacagtaaaagaggtgcccctccctaggcttcctggctatatagcgccaggctgcagctggcttctcaagctcaggctgactgtcttcaccgaccttgaatatgtaccatcagcaaaaccaagaccttggctgcagagctcttggggccctggggatggagggtgcattggtcagtagggtggaaaaggaccattttgggaaggaaaggctccctcctggctgctcagatcccagcgggtttccagccacagaagcaaagcaaacaggcccctgactttgtttctatttcagaaaccttgccgccaccaccaccactgctgccaccgcagagcacgaaatcatcacggggctgtggaaatccaattagacttgagccgccggcggccccctccgtggggagtgggggagggaggctctatctagaaagctgcctccataaatttgagttagagtggtggaggggccagactgttactcatccttgactgtttcttctgacctcgaaatccagcgagtgaaaatctgcgtgaaaacctgaggtctgccaggcggcactgcagggggcgggagtggcctggaggctgagatgagatccccagcctgtttggctgcctgatgggttgactcagggccttcgttcccagtctttgggcctgggatctttctgagccttaaatctctgggtttcacaggctggggtgaggagagagggaccaaggacagcagacccccagtccagcccccctatccctgtgcccttcatctggggccatgcatgcctcttgttaggtctggctttccctttctgtttggggcactggcttcgtggtggcctcttccctgtgggactgccaagctgctgcaaggacctttaggtcacgcccagagacagccttttgcttcagtgtcctcattcttcaggctcagatgggctgtattttatttatttgtaaattaccttgttccagaaaaggtgatcaaaacaaatccagatacctggtgatatcgctagtgctacctgggcatgaattcattttttcctggcttgagtttcaaatgtcaactgggactcttgtctctgtccaggcccccaagcctttgcacatattcctgctccctggaccaacctcgtgctatttatactttcaactctattcctaaacccagtaagaaactccccaaaacctccatacctgatcctcacatttctggatactccttgtgtactcagtttagatgtcacctccctccactaactaagcgttcccctctgggtggagtgcctttcttgtgtaaccccatagcacctgtgctcacccctgtgctgaaggtattgaaaggaataagacacagtctctcctccagagtctgtggcgtagacagtgagtcatcggatgctacaatgtgctgtgataaatgtatcacagggacagtgcaatggaccacatagtaggtactctgtgaatatttgttggtcttgcaaatctgaaaaaactattcattctgcattcacacttccttgatattttggcttggtataggatctcagctaggttccagccccccgtcctgtgcaaagcattgcttaattttcttttaaattccagggttactctcaagaagtctaatgccattccagttttattcctttgaaggtagcatggcttttctctctggagtctctggtgtcccgtggaaaagtctctctgtctctagtgttctgctgtgtcacacatgacgtgatttagtgtggctcgactttcatccactgtggatcctttcgatcttgaaacacccactgtttagttcagggaaattttcttgagttacttcactgatggtctccttcccccgttttctcctttcttttggaactcatagaatttagatattaaatctcctggattggtcttacaattttattttctttcctatccccctcctttcctttcctggagatttcttccactttatcttccggccttctatcggggtttttattttagttagcagatttttaatttcaagaaattttgttttcgaagtatttgtcttttatagcacccttttggttttggtttcatgggtacaatatcattatcttatttgtctaaggatattaatgatagtttcattttgggaggaaggattcttttttttttttgagacagagtctcgctcttgcccaggctgcagtgcagtggcgcgatctccgctcactgcaagctccgcctctcgggtttacaccattctcctgtctcagcctcccgagtagctgggactacaggcactcgccaccacgcccggctaattttttgcatttttagtagagacgggggtttcaccgtgttagccaggatggtctcgatctcctgacctcgtgatccgcccgccttggcctcccagagtgctgggattacaggtgtgagccaccgctcctggccaggaggaaggattctttactgtttcatatagtctgtgtgtgtgtgtgtgtgtgtgtgtgtgtgtgagagagagtgtgtgtgtgtgtgtgtgtttgtgtgtgtattttctgtctttcctgtgaacattttcttcagaagtctagtgatccttggaagtctttacattttgagtgaggcattaaaaggtgattggaacttgtgtgtgtatgtcgcttgtggattctgggccttgtgtagggtgacctagttggcctgttttgttaggaacctagtaagttagtgccaggcatggtggctcatgcctgtaatcccagcactttgggaggccgaggagggtggatcacctgaggtcaggagtttgagaccagcctgggcaacatagtgaaacccgtctctactaaaaatacaaaaaattagccgggcatcgtggcaggcgcctgtaatcccagctactcaggaggctgaggcaggagaattgcttgaacctgggaggcggatgttgcagtcagccgagatcgcaccactgcactccagcctgggcaacaagagcaaaactctgtctcaaaaaaaaaaaaaaaaagactttttagggcataaaactacaattttaaagagaccagaggagttgatgatagcaacacaatcttagagactgtaggtaaaaggacagatgttaattggcttgtgaaagctgaatcctaaagcatcagcaaccctatgagcaccccagaacccccaaaaggcttagcaatctgcagcaccaggaggggctgaaaacaggaggtcaggttaaatgtctgcttaagaatcagtcccactccccagatctctgcccccgcttcccttagccaggtaagtgtccctcc

SEQ ID NO: 89 - DNA, 21263 bp, Homo sapiens
  source 1..21263: mol_type = other DNA
cagcgcgtgcgccgccgcaagcatggctggtgatgattggacgactggtaacagggggcggagggctccgaagtctggttttgggcgggaattgaaaccgccgctgaagccaacaagaatttgagaactgtaaataccaagccttgaaagggaccatggtgcggcctgtgaggtgggtagttcctgacattcgtcgggggtgggaggaaaactaagggaaaagacatgagactaaggggaaaggatcgagtaagaccggagggcagcgatggtggggttaggatggacggttatcaagaacccagtctccagtgagagccacccgttgctcagaagtatcctagcatcgtagctttttccttctctttgcctcccttcacaaccgtcgccgtttcttttaccaagaccttgttagcgtttgaacagcgctttacatttcaccgagcgcccaattatgtgttattttatttgtttatcactgtagttatttgatatagaaagagtaagcattcctgttgtattgatttaacatttctacgtatagagggtaagttatctgagtcatacagcccagtaagtggcagggcaatactcaaacctaagtcatctcactcaagatcctctgtgctttccatcgtggtattagaaacgattcttctatttacacagttgagtgccatggaagcctatagttagccattcatttaataaagttattgaatatattcacttctttagtgtacgaggtgctggaggttacattccagtgggaggtgaggttagggggccgaaaataagcctcgaaatatgagagtgcgaaagaggaaagcactactttaaatatagtagttaatatgtgactctgaggcgataatgcatgcactgagtcatgaatcagggtagagggaataggagccaaggccccatacttgaccatattttagggacagtctaatgctataggattaacaagcagtggggagaatcgtagggggattaggccagagaaataggcaggtgccagaacagatagggtcttgtaagtcttagaaaggagtttaggttttattttaagtcaatgggaagtcagtggagggttttaagtaggggagaggaatctaagtttgcttttataaaggtcactggctgttggtggagaataaatgatggatagggtgaccagaacgggagcaggaaaatcaggtattatatcattggagagcggtttgggatagggtattattagtgggcatggaatggaacagatgaatttgggatgtatttcggaggcactgtggacagaacttgctgatgaagtagatgtacaggtaagggaaagaaagaatcagagatgactccacaatagttttggtctgagctacaggatggatgatctttgtattaagatagggaagactaggaaaaggaaggttaggaggtgtgagggatcaagatttctgtttcgaacatgctgaatttgaaatgggttttaagcatccaggcagtggagtcataatccctttgtaaggaacagcagttgttaaagtatggtctacagacctctgtgggtccctggaaacttctctagaggtctatgaggtcaaaactcctttcataacaatactaagatatgatttgcctttttcgctgctttgtcatttgcactgcagtgaccccgataaaactgctggcacctcagaacaattaaggcagtggcactaaattgtactactagtctttgcaatgtttactgccatactcttaaaagtaaaaaaaaaaaaaaaaatcatttcagttaagaatatgcttgatgaagtagtggaaattattatattcatcatagcttaacccttaagtatactaattaaaaataggctattgattttattttactattattcaagttcagaatttataaaggggttttcacattttattcagctctaacttctttaactctgaagagtaagagagtaatatgagtgcactttttaatagtttgcgtgaggaaacaggaagtacacataaagcacttctgtatactgatgcgtgatagttatctcaaggaaaagcacttgtgagattgtctgagttgtgagctgagcttactacctctttttcatagaacattctttttacttgaaagaacaaccagctgacaaattaggttattcacatttagccatttgacaaaaatatagaaataaaaactagaaaaacattttatttagtgcctagaggagggaggaaaaaattatttttttcactttgaatatcattttcttctaatgccctctgaagtagtacaagttgagcatcccaaatttgaaatgctccaaaatttgaaacttttgcagtacctacatggcactcaaaggaaatgttcattggagcacttcagattttagattttcagatttgggatgctcagctggtaagtatataatgcagatattccaaaatctgaaaaaatccaaaattcaaaacatttctggttccaagcatttcagataagggatactcatctcaggtggtaggaacaaggtcactcaccatttttaagtgtccgttgcataaaaatgttatttggtatggtggagagattgaaaagaaagtagcttttagtgtcaagaaatttataatctagtaaggaagatagaatgcacacacaaaacagaagaacacgtacaacgggaacttacaaatgcccaacagcaattaaacagtatagcaattataaatgttaattatgtagattattctttgtaagttacctgaatttttttcctttatcatataattgaaaagccaacaatacccaggtatatcaggtatagttgtaactattttagctaatgataaatccccgcggtaaaatgcaaatcatgttttagagttaaatattcttacttgaacccaaacacattttcatttattgaaacacatttcatttaacacatttttatttatttcgtttattcattatttattaataaatgaataatattaaataaataaataatattcattaatagccttaagtaatagtggtgagaaattgacatttgtgttaatgaaaaaattctgttttggtcatagacataagaaaccagtcaattactcacagtttgaccactctgacagtgatggtaagtaaagcttcttatttttgttctaaagatttggaaactcatttcctcggaatttatatgacatatatagctcaaacactgactaaattgcccaaatgcatatgaggtaggtctggaaagatagttttctaatcatttgggataattatgctgataattatactgataaaaattatgttagtaggtgataaatgaacaggccaggtgaaaagtctctttagatctaaactactctaaagtccatagttgcaacatagaggtttgtctcctattccatccctgaagaaggaaaacactgtctttttgagatacaaagatgttacagcatattatataaaatccctattaattgtactataaaacaagaccttgaagaaaggttaggcttatgttatgccttttaagcattagtcatatgtttacttgactctgctatgattgaaaagtttgaggaacattgcattagattatgttatatgttgaagtggatttaatatttctttcttagaccactagagttttctgtaagtcaaatatttagtaagtcttcggtttgaaggaatctgtttttgccttgagcacagccttaactgtatctaccacttgggaaaaagagtgtagagtataacatctagctttttttttttttttgtcatcagtctgtcatcagatacttataaattgccaggtgtgtagtagtaggtggggggagtcctaagttatcttatttttacatggggaagcatataagagacaacaagtattagtgcttgctgagtatgtgatgaagactgcatagaccctgaaagtatgcatatatgtgttgtatacatgtggaaaagccacagcagtagttttacgttgacagtcaagagtagaactacaacagttcagaggattggtaagacagaaaaacctgtgagaaacagtaatggactggaaaagaacatccttttgcaagaaaataagaagttactttggtaggatcttaggaagatcattatggtaatggaaagagaaaatactactattgtaaaaatcctcaaataggagctactttctcttccccccataatgcttatttcctctagcatggttaatgtactaggaataggtaatgggcttttttttctcttttttttgagacggagtctcactcttgcacctaggctagagtgcaacagcgcgatcttggctcactgcaacctctgcctcccaggttcaagcgattctcccacctcacctcctgagtagctgggattataggtgtccgccaccatgcctggctaatttttgtattttttagtagagacagggtttcaccactttggccaggctggtcttgaactcgtgacttcaggtgatctgcccgccttggcctcccaaagtgctgggattacaagtgtgagccactgtgcctggcccaagtaatgggctttgaaaaaagatatttggctacattgtgaagttcccataaaaataatttatttccacttttcaatgtgattaaattctaccaatttttctaatggttttacaggtttttaatcattttttctttgacacttatatgctgtcttaattgcttttgcagtttttagtgaattggtttttgatagactgatatttttaaatataaagggcacaaaaacaaaagtcgaaatagataaatgagagtaaagataaacaaaatactaacaatgatttttaaattgtggaaattaaacaatttgcctagcctataaaaacttgaacacacatggtaatgattttcatttatgaagaaaataatatttttcttttggttttaattcacacatgaatagatgattttgtttctgcaactgtacctttaaacaagaaatccagaacagcaccaaaggagttaaaacaagataaaccaaaacctaacttgaacaatctccggaaagaagaaatcccagtacaagagaaaacccctaaaaaaaggtgagaggtaagacatgcagtaaatatatgacattagatgtgttaattttaaagagacacagattcgaacccttgatttaaattagaacttgggcagagtcataggtcttattttactaggtgcagtcagaaaacaggacgtactatttttttctggctttctgacttaaagaaattcacaaacattcaaggaagtatcattaaatattaagacaataatgattgtagaattcagaagttatgactggttttgacaggacccagcacttatctctgaattcctcaaatcatacgagactactttgttaaaaatgacattagatgacttaagatgattaagacacaagatgacttaatatgaggacagtttttaaaatataaaaccatgtattttcttgcagaaaaagatgtcttctccccatgttgttaagatttatccagcagtgagaagttcccatagtttctagactaaccgtggaattccattagatagtatcaagaggcagaaaggagtgaaggaagtccttagagacccaaaacttgcagtatggagaagagatgggcggaaggggaatattaacaaatggaacatggcatatataatgttttactgccacaagtttctctatgaaaagtgagttagcctggagaaacttacctcatgtcatgctcttttttgcttttcttttttttggtttttgtttgtgagtttcttgtattacattttaaatatatagaaaaaggaacccacacgtgggagaaaatatttgtaaatcagataactgataagggactgtatccagagtatacacagaactcgtaaaactcaacagtaaaaagactaacaacacaatttaaaatgtgcaaaagatttcaatagactttctccagagaagataaacaaataaccaataaacacatgaaaagatgctcaatatcattagctgtgagggcaatgcaaatcaaaatcagaatgagataatacttcacacccactagatgacttaatacaaaagacaaggaatgtggagaaatttgaaccctcatatattgctggtgggaaagtaaaatggtgcagctaaattggaaaatggtttagcagttcctcaaaatgttaaacagagttattacatgacccagcctatgtatgtatccaagagaaatgaaaacatatgcccacacaaaaacccatacatgaatgttcacagcaacattattcataatagctaaaaaaaaatggaggcaatctaaatgtctatctgctaatgaatggataagtaaaatgtggtttccacaaaatggaatatttttcagccatagaaagaaatgacaactgataactgatatatactgcaatatggatgaaccttggaaacatcattctgagtgaaagaagccagatatacaggtcacatattacatgatttcatttgcatgaaatgtccagaataggcaaatccatagaaacggaaagcagattaatggttgctaggaggggagaggggtaaacaggaagtgaatgctaatgggtatggggtttctttttggggtaataaagatgttctgaaattaggtagtgttggtggttttacagctctgtgaatgtactaaaaactgctgaattgtttactttaaaaggtaaactttatgatatgtgaattatatcttaagaaaactgttattctaaaaaaataaattctttaaggtacatctcagtgcttcttcctttatgtaacttttccttatctgtctttgacgttttcttcctcttatactccatagcacttttgagcagcttgaataggactttatagtctgccttttataggataattattagcatgtcttgtttccccaccctcctcctttaattgcagactccctgaaggtacttttagtattccagctagtgcagtgccttgtacaaagtaagtgcttggtaaaatatttgttaaagtctggattgggaggaagagatgtaaaaaaatgataataattttaatttaatgtaagagctataaaatctgctaaaggggagtgggtgaggtcaaggaagagttttaagtggaagtgatgtttgaaccaagtctgttttgggttgagtagggtgtttcccacctggacacagctggtagtaaggtgacacattacaatgaaagggaacagtcattgcaaagaggcacatggtcctcctatttcaaacctcttattctgtatgtaacatgatactgtgacattttaggagtcttatcttatcatcaaaggtctattaatgatgattgtttaaaaacatttttgcgaagttagcaactcttgaatagtaatttggagaaatctcaaactttgctctttagttgagattgatattttgaagaactcattattacttgtgtatctattttaggatggctttagatgacaagctctaccagagagacttagaagttgcactagctttatcagtgaaggaacttccaacagtcaccactaatgtgcagaactctcaagataaaagtaactttattttctgtatatttagctttaaaaccttcttaatgcttttgtgattatttgtttgggtgggccttcacagaggaaacaggtaaaatgtgaatactttgcactataaatagacccatttgcagagaatacgattggatttagttcttaattcagctgcctaaatctcatacaaacagacatacatctctgcttaacacccagaataagcttgagggcacggactgtgagcctcagtgttcgaattatatgttgttgtacagtgaacatttaatttcttcatcaaatgatttgatctgtacagtcctaacaatccatctccattttttccagatcagttaaacataccctaattatggtaatttttattacttacaaaggtcaaaggtattaatttggttagcaagttcagtagacttaagagaatggcttttggatttctctgttgattttctcctttgatttttctggcaatatattaatattctagagaggcagaaatcattattcctgaaaaagatactctactgctaaaatgctttttggcttaaagtttttatgttgggggatattttagcttattatcttatttaggggtatacatggagcttttttctttgtttcttaaatcagtactgcctccttatttatttatttatttgagacagggtctctctctgtcatccaggcaggaatacagtggcatgatcatggctcaatacaaccttgacctcctaggctcaagcagtcctcctgcctcagcctcctgagtagccgggactacaggcatgtgccgccatgcctggctaattttttattttgtagagaggggtctcactatgttgcgcatgctgccctcaaactcccagcctcaagcaatcctcctgcctcagcctcccaaagtgctgggattacaggcgagagccaccttatctggctgcctcctctttaaaaagaaatgaaagtttgattaggaagacttttagtaaccaagaatcaaagaaacatcaaaagagaattatcatgaattacatttaaaatggaggcactgaaattcatctctctcttttaagacattgtagaatgtataaggggagttccttagaagtattaatattataccatttcttattaaataatgcaccttatagcattggaatttaatagtaccaattattatgtcttaaagtcctcttagaatgctttgggtcattttaaggttattataacgattggagagttcttaacgttagtaaaagcatggatttgcctacacagaattgatagtttattgaccatttcctgtatattaggcacaataataagcaattcctatgtgagatccacatttggtcttctgtaataccactgggtaagacactatttttatctccacattatagatgaggaaattcagtcttaggataagcaacttgcccatggtcatatagccagtttacatggtagagcctgaatttaaacatgttagatttcagagcccagacttctaaccatatgttaacctctctgaataaaattattgtgccagttggagtttgggatcatttatttatatctaaatgctattacattttagtactaattttcctatatctagacattgattaagatatatctgaattttctttcttattccttatatttaggcattgaaaaacatggcagtagtaaaatagaaacaatgaataagtctcctcatatctctaattgcagtgtagccagtgattatttaggtaagttttttatattaataatttttctcatcaacaatgctgtttctctgacttttgtttaaattgctgaaattgtggctagaagcaagttctttaaatttgtcaagactctcttgatgtcatggcctttatttctttgtgttttagtctcattctgtcgtactgcagacacacattcttccctgaagggtcataactacccgtggcttctagttggagcaactgacctttgaagaaaggggctgcatattcccaattctagtttgaaaattttgggggaaagattatctctgtttgggtcttggatttatccctaaaactagaggtgttcccagggcactgatgtaccatggttgacccagattgggctaatagtctattactggaagcatgggagggatgaacctgggcaaataaaaacaatagctgtaatagagtctggtctgcagttcttgaaatatcagttgtcacagaaagttttccattgatttttatgcctctcctgaagatttggataagattactgtggaagatgatgttggtggtgttcaagggaaaagaaaagcagcatctaaagctgcagcacagcagaggaagattcttctggaaggcagtgatggtgatagtgctaatgacactgaaccagactttgcacctggtaggttttattctacttcgaaattaattctatgggaattcagtcaaaaaagttcttggaagctattaattgtgcaaagcactgtgttaaacctttggggtgtgcaaacttcagggacacacagaacagttcaattcagtgatagcatttggggaaaaagttttttctacgagttaacctttaagctatgccttgaaaaatgagtagcgtttcaacaaactaaaggtgtaaagtagcatttctgactaacagaaaggcattacctgtggaatagacaaatgctctatttgtctctaactgaggcttgctgggatgaacatggaagaggctcgagagggaggctggtactaatcagggagggtctcagacccactggaagaagtgtaggcttttttttcctggaggtagtagaaatccatgaattattctgaggcagaagtgatatgaaatctatattttattatgatggtttttagactcatttagaaattgggcaaatggaaagtgtagtgaccttgacagaacattataacatattaattaaaaatttaaattcataaattcataaatgtaggccaaatcaagataccatattttagattttgatatactatcaacaaacaataacagatttgctcatcgtcacttattcgactaatatttgaatgctttttatgtgcattatattctagatactagggatacaatagtgaaaaaaacaaacagctcctgtccttctggaacaacggaaatacatgaaaaaagactgttttgcatttgttttactttgggagggcctgggagacaggaaaatgcaaagacactctttgagcgccaatgtgatgcttaaaggaaatactcatttgagcattttggatttctggaattggaatgcccaactggtataatgcagatgttccaaaacccaaagaaaatctgaaccctgaaacatgtctggtcccaagcacctcagataagggatactcagcctatactatatgatctagcaatccacttctgagtatgtatccaaaacgattgaaagcaggatctcagggagacatttgcatacccgtgttcatagcagcattattcataatagccaagaagtggaagcagccccaaagtgacatttcagttttccccctgcattcgcttgtcctggatgagaatagaaaggaccatgtgtgaccttcattagggaaagaaaagagaaaattgcagagaagataagtcttttctctaacagttcccaaaatccgtaactgaagtgtttgggccttccagattttcctctatgggatgcgaatgacttggaattttgggaattccaactccccatctctaattttatttaaattgctttctcaattgactgacgaagattagttggaccccatttctgaacaagcttgttacacagaaatgttgccagggcctactgtttatcctcttgagccaagaagagaatccttcagacttctaagttactgaacacatgcagtatcagaactattggatacacagaaagttttgttgtagataatatatttggaaagtttggagaaagttcctctaccccttgccttctttgagcggagagcttcttaggattgcttgaatttgcaggctgcatttctaacagccctcatgggacctgctggcctttctgggctgattctctatagcacgggaaccgttatgtgaacatgtgagttgattatctttaacattgtgtgtgggaacaatgatagaataaggacattgcaatttgaagatcataatgacattgttttttgtttttgtttcgttttgttttttgagatggaatctcgctctgtcgcccaggcgggagtgtagtggcacgatcttggctgaccatggcctccgcctcacaggttcaagcaattcttgtgtctcagcctcccaagtagctgggactacaggcatgcgccaccatgcctaactaatttctgtatttttagtagagatggagtttcagcatgttggccagggtggtcttgaactcctgacctcatgtgatccacctgctttggcctaccaaagtgttgggattacagaggtgaaccactgtgcccagcccataaatgacattgttgatttaggtaaaggtcatcaatggaaggttgataaggatctttacaatgttgaattcaggctggcatcacctgaaccacctaagagagggacaaccacacattatatgatttctgatgtgatgtaatatgaagtacaaagaatatacttatgaagtatattcttgccgtccctcctccccccaccaccaaaaaaagcgagcctgaatccactcaagccttgagagcagaattccagctcacataaaatgcaagaatatggccgggcacagtggctcacacctgtaatcccagcactttgggaggctgaggtgggtggatcagttgaagtcaggagttcgagaccagcctggccaacatggtgaaaccccttctctactaaaacacaaaaattagctgggcgtggtgttgtgtgcctgtaatcccagctacttgggaggctgaagcaggagaattgcttgaacctgggagacagaggttgcagtgagccaggattgtgccactgcactccagcctgggcgacagagtgaggctccatctcaaaaaaaaaaaaaaaaagcaagattaagttaaatgacaccatgagctagaaaacagacaaatccagaatttaggacattctacaggacaattgactcaactgcttcagcaagtcagacacaagggaggacagggagaagatactgctctatattaaaagagattaatatagactgaatagaagatgataccaagaaactagtgttggtattgctagatgtaataatggcattgttgtatgagaaaatgcttatgttttttagagatacattctgaagtatgtaggaatgtaatgatgtgatgccttgattttattttaatatactacaaaagggaatagaagaagaagagcgagatagatgaaacaaatggagcaaaatgttgataattgttgaatctgagtggtggtttattactgtctactgtggtataggtttgaaaattttatatgattgtattttacatataatatttcttatagataggtagatattagtatgtggggacaatagtggttatctctgagtggtgagattacagagtagattttctttaataaagttttgtatggtctgtattttctacaatcagcatgtactgtttatttttcattttatttgtacattttttgatttaagcattttctgcaataagcatgtccataatattaaaaatgtaaaaaagttttatattaatataggactaaccctatttacacttagttttcagagtttatctacaaggcatggttttctgatcctaaccccctcaaaaaatagaaagatcattgcttaactatcaggttaggaaatgcttttttctagagcagctgtagcactttcaaaattagatcactggcttatattttgccacgaagtgcagaaaagcatttttgagaaataaaggtttgtcccaaatgaaatcagctctaggattatctgctaagattgttgtgtatggttatctcaattctcatttggtctgttccagaatgttgaagtttatgtgattaagggaaggctcactattaccataaatgtcactgttttgaaagactagctattgtcataccctaccattcttttcaaaagtcactgagttaaaatggtaaaatctgaagtaaagattactgatgggaaatttatagtgatggtggtaatagcaaacaattttattttgctcagtatattgcagatgttattctaaatgcattatatatatattaactcatttaatccacgcaacaaccctttgatggaggtttacagttatccccattttctaggtgaggaaactgaggctcagtgaagttagtgacctgtctgaggatgcaaacccaggcacccacaatggcaaccactgcagtgttctgctactggaaacagtgcagcacaaaggtgcataagaatctgaaagctgtggataaagttaaggcaacagaatcctcactttttagagcaaagatgaactatataatcttctgttttaggtgaagattctgaggatgattctgatttttgtgagagtgaggataatgacgaagacttctctatgagaaaaagtaaagttaaagaaattaaaaagaaagaagtgaaggtaaaatccccagtagaaaagaaagagaagaaatctaaatccaaatgtaatgctttgggtaagcttggtccaaaacacttaattttataaaggaaatgtatgtggtttgtttgccgtatttttcttatttttgcctttgttctctttaacattttcctaacgtccatttcttgttaaaatatgtaaaaggaaggtggggtggggaagggagaaaagcggacaagaatgctgactccactacgtatgctagcacttactgtatatgacctcactttggtactcatggctgccgtctgtggttagctgttgtcacctgcattctacagtgaaaaactgagtgtcagagaggttaaataatttgttggaaatcttacatctaataggtgaagggctagaatttgaacccatgtttgtccattcagagtctaagctgtatcttggaccatattttctccagacaaaacaaggaagtttgcataattctaattttttgcttttgtgctttacttagtctgatttgagagctcttttgccacatgtttagggccctttttttttttttatttccccaaaacaaattccattagaaactacttttatgataaaacgtttaaaatttatggtgactcgaacatggaatacctgtttcttgtgtaaaagaagttaggatatttttgagttcatagtatatgataggttattgcaaaatataactgtcattaactgagtttgttttatttcttgataatcatttttatgtcttggtttatttaatatatatgctattgatattaaaagttccattatttagtctttccatttattcataggagctgctgtcaccttcagtagcctgttgctgagtacttactaagaattaaatgagaattaagtactgattgagttatattcttctctctcctgtattttgaattaatgaggttttttaattagagtgttttttttttaattgatgacttcatctgggttccagaaattctgagtatcagaagtcgaaagtggttctcactgggctaaaatcaagtagtcagcaaaactgtggtcctttgtggaggctctaggagacaaaccacgttcttgtcttttctagctccttgagggtgcatttcttggcttgtggccccttccaccttcagagagcaatggcagggactttctcacatcatgttactcgactctgactttcttcctgctcacgtttacttataaggaccctgtgattacattgggcccctccagataattcagtgtaatttccccatctaagattcttaattacatctgcaaagtccctttgccatgtaaggtaacatattcacatgttctggcaatgacgatgtagacatctgaggagccagtattctgcctactacaagctataataggaaaaagttattaacaccatgaatatattttgtattttctttagatgtttgtttatgcttcttcaccaagacacactaataactaaaaataaaacttcagttcccaagttggagtttaccatttaaaatcttttctctatcccttggagcaagttgcttcacaactgagatttaatatataatattagaaatgaaatttaaccattaagtgataggactaggaattaggaaaaatggattatatttttagtcctactagtaatgtattgggtaaactttgcgaattgtgtctagcacatgttataattttcccttgatagaaaaaatgttgagagctatgctgtccaatatggtaacctctagccatgtgtggctatattacatttgaattaattaaaattaagtaaaatttaaaaatcagttcctcagttttgcaagccacatttcaagtgcacagtaactgtatatggctagcggctaccatattggacagcacaaaacacaaaacatttctataatcacagaaagttccatcagacagtgctgatctagaggatgcagatgttaacattaggaagagtatacggtgaaaatgttcatgtttatatgtgttgaaatacccctaggtatctcaaaacaagcactgtctgaaagtgaacttaatgccacctctcctccctccccaccaccaaaaaaataaataaatagaaccaaaacatacttccaggcttgtgtttattctctagataaatggcaccatcaaagtgtgcccatgacaggaacctgcaagtcatggattatttcttcatctccattgctgcctcccacctatttttgccaaaacatatctaatgtgctgttttccttctattctccaccttagcaggcccccatttcctcttacctgattaccataataaccttctaagtagcctacttctcctacactaccaccagaaagatgtttttaaaatacaaatcactcctgagaaaaatatgtgcatgactgtgactagccagactcttgtacatggtctgcaaagctcttcataagtgatctacacccagtgtctatctctcacatttcctacccttgagatttctgctccagccgtacactgaaccagtcagtactactgattctggaacttggtgcatcctccatctttgcacactgtactccctctgcctggaaagcttctctcaattcacctttactcttcaatcttgatttggttcagaccatcctcactcacctccttctaactttaaaacacatacccccagattgcagtttccttttctacttggcatacctttagagtctgccatatcccttaccacactgcattttacacatctttactttcctgttcttcccactgaagtctagtgactaaaccttaaagtccttgggagcaggagccatgtttctaaccctagagcctgacacataatctcactgacacatactcacgagacactattgtgtaatggttagttacaaggatgggattttggaggaaaatctggtttctaagcttagatgcttactagctgtcagactacaggcagattgcttaacgtctctgtttccttctctgagagtggggatagtaatatctgtattggagttgttgtaaagagttagaggtaatgtgtgtgatatgcctaccacactgcctggcatattaatgctcataaaagatggctattcttaggctctcaataaatgtttgttgattaataagtttattttttatatgattatgtaactttataatttttacacatatatgctagacttactttttcttcctgcatgacaaacatttttacgtatatttttcaaataagtgacttcggtggactctgctccagctgccgtcaaatcagaatctcagtccttgccaaaaaaggtttctctgtcttcagataccactaggaaaccattagaaatacgcagtccttcagctgaaagcaagaaacctaaatgggtcccaccaggtatggcatatttatcatcaaggacaggagcttggaaaattatcactggtaaatttttttcctagttacaaacatcatgtgtgagcatttccccatattattacatattcttcaaaaccaaagttcctggttgctgcatatattcatttatttaaccattccttattattggacatccaggtttattattttttcagtgctataaataagattgcaataagtgcaaatgtccttattttagaaatctctgggcatattactgattattttcctaggataaaatttctagtaggaaaattacagtgttaaagggtgtaaacatttgagattcctgaagtatgtatttctggcagcaaatcttttgctcaggacctgctgacctccacagtctgactgaagccttgggatctatatgtggcaattctagcatttaacaaatgccctagcaaactcaacctcttgctttcacaaatttcacttctctgttttcttttgctccacagccaagtctcatggatccttcaagaattctttgaccttcacccttcttgacattactaaaaccctaatccaggcccaaattgttgctgcctttcctaaccagtcctgtctttactttctgtcatccacctgcatgaaccgtccacttcagtgaaattgaaacactttttgtctctcaaacatgttgtatgtatgcctctctcagggcctctcttaatcctcctctgcctggtgtgtctttcttcatgtgtcccctctccttgcctgagcccttccaattctactcctgtttttcttttgaggggcctctcttgattggtccacagtgctcactcccctgctgactactattcatagatttaggcgtgagctgtgaggctgcatgattacttaacttacagagtcttcatttcatcatgtgaaatattgggaacaactgtaatctttaaagtccattctggtttacaacttctaagatttttaatgaggacttaaaaactttttggagaaggaaaggagggaagattaattacttgatgtcatatcattcaaagagtaatacttagtatatttctaaaaataattaatgcttccccaatgaaggaaatttaaatggagtgatataactatagaaatttaaaagtagcataattaaaaaaatacaaggaaacagtggaatgatggataaagagttaatgtcatcaagcacaaagtgcttatcaagtcagcatgtgacagtcaggcaagtgatgtaaacgagtgaattgggcccatgcagtagacttgcgtgggtaggaattttgttggactcaggagcgcgtacccttttgaaggaagcagctgctactcagctccatcgtattgtttccatgcaagattatgggcttggtatttctagatctgattgctgttttcaagagaagccagaaatccagattttaatatgaaatctgctaatttttgtaagttgattttttttgttgttgttgttagcaccatgtgaaccaaaacaatatatctgagagctagatttggccctcagattgccagtttgttacctatcttatacaactggagaagaccaccaagaccccaaaagtaaaattagccagaggcataaatataacagtgtccccaagaactattaatacaacaagaaaatatgaagagtttcagtctcactggtaattaaggaagtgtaaattaaaataaaatactattttatacctttcaaactagaaaacaataaagcagtatagtctgagttatagggtagcaggtataattatttattttaaatttataatactgttgtgtaggcgagcaactacagtcaccatcaactgtgaacattcatgtggataattttgaaatagatggaaataattgcgacattaggataatagtataatgaaactagtataaataaataacaatatttgccatttttaaaggtatttaataattgaaaaatagactcttcaaggactacttgtaaaaattgcaggaccttaaaaatgcatttgctttttctattactttagaaattataattatatgcatttttgtatgcctttacaactagcattatttgttcccagccttcctttttcagctttcatggtgaggttttagtgtcattaccttggcttctgggatgtttggaaataggcaatactgtattaatttctgctctttagaacattctgttcttttgatctagtttattgcttgatagacactggaaagcagaataatgcttaactaccttttttttgctgcttattttataaattaatctttgttaagagatttctgacatcatcagcatcacatcatatgtttcctttcagcggcatctggaggtagcagaagtagcagcagcccactggtggtagtgtctgtgaagtctcccaatcagagtctccgccttggcttgtccagattagcacgagttaaacctttgcatccaaatgccactagcacctgagtgtggtacaggaggaatgtttggttgggagaatcacagctttacaagggtgtttatatttgatttgtgtttatatttgaggcaggtattgtaatataaaggaatccattaccatgtcctataaatgacctctagccattttatgattatgttctctgtaaaactcttcaagacttcaatgagaagtttgtttataagaattatcttctcatacctttccttgtgaagagcgtattctgtttttctatcagttcgacatgaagtccacatcacatgctgttcttttctagttacatgatgtgcctttctagctttgtctagtttatagcaccttaactttaactgttcagttttatctggcagaggaaaacattcttatttctttcagaagacatttctgaaatcttataagctacttaagctacgttgtcagttttatcgcaaagatgttttgtattttagccaaatctttttatagtacaaacttagaattattttacacactaaaatggttgcagttttatggcatatgtctccgatttagatggttattctctagaaaatagtatttaaagacattttatgaaatcttcattgtcaaaacctttaataaaagtggaaatattttgaaatgccctttttcttgataccactcatccacgtgttcctgattgtccacatttcatgataaaatgagagctccgcagagaatgttagcctttctgttgtaaatgtaatcttcaagtagtcactttttgttaagttctttagaaagtagttgtcaagtacttagtcatccctattatgatatgagatagtacagcttttcaggaagcttagatctgaatttactttgaaaaacaattgtaatgaatattttatatttacattgagaatttcaactagcttctgatcaatttttaataaaaaattttcaaatcatgttagctgttaaaaaatgtataataactcagtttttcttggtttatggaaatatctatattaatgtgaaaataattaatttagaattgtgattaaagtgagcatttgtcta

SEQ ID NO: 90 - DNA, 32746 bp, Homo sapiens
  misc_feature 5168..32746: note = n is a, c, g, or t
  source 1..32746: mol_type = other DNA
gcacacagtgcacgaagacgctgtcgggagagcccaggattcaacacgggccttgagaaatgtgagtaagggtgatgggcaaccaggtgggagggagaagccaggggagaagccagggcatgggaggcaattcagggagacaggaacacccttctctcttcacacacctcatcagttccactgtgcacacgcgtggacacacacaacacacgccccatccctcctcctagggatcagaggagacttcatacatagatgctcatgccatggtcctttcttccctctgggctcttggcagggagcagcgagaggaggggaccccttgcccaggacgggacactctgtgcctgtgtcccccactccacagatggtttctcccagacgctcttgctgaacctgtgggagccctttcagagacccacgggtggaaaccctcaccctccattaactggtcccaagccagtcctattcctggaaggggaggggagggacgcgtccgggcaggggaggaggctggaaagggagtgtgaggggagtgtggtggcctctggactggacactgccctggagagtgacccgatgcagcagctgcacaggccatcctccccacccacgcacccctgctgagaacatgtctgtgaggttcagggtgggcagagaggagaatgcccagtggtatggccgtctcatcccctgccacagccactgcccacatggcaagagtgctgaacccctccagctccagatactctcttttgttttggcaggtggctcttgtacctcctggtgccggccctgttctgcagggcaggaggctccattcccatccctcagaagttatttggggaggtgacttcccctctgttccccaagccttaccccaacaactttgaaacaaccactgtgatcacagtccccacgggatacagggtgaagctcgtcttccagcagtttgacctggagccttctgaaggctgcttctatgattatgtcaaggtaggggcaggatgggcgggcagaggggagacaaaactgggccctctgggatctgggatctgtatggcatgcacacccccagacacagcccagccccacaagagctgatggccaacggcctctctgagagcccggggatgccctggatgggcgctcactggtgtagaggccctcggtgagcactgaggggagaagcacagagaaggaaggggacaggacccactcaggaaattcaacatccactgagtcaggaaaaccttccccatctgctgtctagctgagagtctttgggaaaccactgtgcctcagcttccctgtctccaaggaaatgattgacatggctgcctgcttcaacaggaacacagggacatgaggaggagaaatgtgggctctggcagcacaggaatagccttcagcaaggacagtgtgctcagaaccctcacctctgtggcaaccaagggtaccttcccaggcctgtctttctctatccagtaaaaatgagattcagggctcaagcagagcctgcgaaggtccaacaactaccattcccaggagacccctggagattatgcgtgaattacatgacaatggcacgtcttaccggctcagaagacttggcgagtgtgcagtgttgggggagggcgtttgctggcagagtcaaggagaggttgaggaggctgtgaggaggaaggaagagggacgaggcagtgcctgctgacactgagatgggtgggcttcagggctcatgttccgccgagggcatcaggaggcactcgaggtgtgaatggtttgattaggctgaggtggaatctgaagacagaaaataaagcggagctgtctgagctctgggaatgaggggcaggtaaaggctgggtacagacaaccaggaccccaggggaacaggccataggaggtggtggggatggagaaggacctgaaacctgccagaggagcagaaaacagggaaagggtgaggtacccagtccaggacaacacgcaaagagtgagtcagtgggagactcagggaacagctgaaagtcacatggggaagtttgcagcagctgagcccagcaggtagtgaccagccagagccattgtggtgcatgatgcactctgggcgagacaaggaggaccatcactgagccaccacgtgcgccactccgcaacagatcttcttcctaccccctgtccttcttccaccagatctctgctgataagaaaagcctggggaggttctgtgggcaactgggttctccactgggcaaccccccgggaaagaaggaatttatgtcccaagggaacaagatgctgctgaccttccacacagacttctccaacgaggagaatgggaccatcatgttctacaagggcttcctggcctactaccaagctgtgggtgagtagccccccagggatcccttttctctgacctcagccatattgaatggggggccaagaaagggaatcttgaatgcaaagaagccgaaagcctggctttccttgttcctcccctcgagagagcttttcctaacgaggcctgtcaacctgggctctgtccccatggagcagtccccagagagcattggagaggcctggaggtccaggtggcctaaagatgcctttgtctttaggtctctggtgagtgacctccctaagatcagagccactactcaggtctcccagcagaagcttaaccctccttcctgaatgccttccagaccttgatgaatgtgcttcccggagcaaatcaggggaggaggatccccagccccagtgccagcacctgtgtcacaactacgttggaggctacttctgttcctgccgtccaggctatgagcttcaggaagacaggcattcctgccagggtgagccagagtggtgtagcagaggggaaggggttgagccagggcttgctgggccagctggagtcccccgtaatgccctgtggctctgctctcacagctgagtgcagcagcgagctgtacacggaggcatcaggctacatctccagcctggagtaccctcggtcctacccccctgacctgcgctgcaactacagcatccgggtggagcggggcctcaccctgcacctcaagttcctggagccttttgatattgatgaccaccagcaagtacactgcccctatgaccagctacaggtacagccgtcctacccctgaaagaccccttcctccccttctgtctgcacttggctcctcttgtcccaacttcctcctggatcccctggccagctggggcaggaacggccaacatcacccatgggctgggtaagttcccacacaactagaattgggtcatggggatcccttttcaccttcccctgaaaacacacataaggcaggatttcatcaccaccaccaccaccctggccaccaggctactacccagttggccctgtgtaaaaacgtccaagctgaaaaaaaaaaaccctcctcccctactagatctatgccaacgggaagaacattggcgagttctgtgggaagcaaaggccccccgacctcgacaccagcagcaatgctgtggatctgctgttcttcacagatgagtcgggggacagccggggctggaagctgcgctacaccaccgagagtaaggctccctgcaggcctccctcgatggccagcaatggggaaaaggggggaagaaggaaggacaagtggctctgaaataaatatgccccctggtctccccaacagtcatcaagtgcccccagcccaagaccctagacgagttcaccatcatccagaacctgcagcctcagtaccagttccgtgactacttcattgctacctgcaagcaaggctaccagctcatagaggtaagagcccagggctgaggggagagagccggcccagcaccccaggaggaattcaggtggtgggttcacagaggatttagtctcaccccagctggagtcgtagacgtttcagctggaagagtctcctggtccaccagctctcaaacttgctgcacacttaaaacagagagtttaaaatcctggaagattgcttgagcccattcattcaaggcccctgtgaatagccactgcactccagcctgagcaatatagcaagactctgtctctgaaaaataaaaataagcaaataaatactgaagatgagggcccccaacagagactctgattccattgatctagagtagagcctgaacatcaagactatttaaagctacccaggtgattctaatgcacagccaagtttaagaactattgccctagtccaataactcaagagagctgaaggaactgaaaaggcagggtggagatgtagtgactcgtcaacatcacgtagcgattgtgtacggcagggactaggacgccaatctcctgcctcctgctccggggctcttttacacatgttggtggtctccccctgcgcccaccgtcctgtcctcggctctgcagattcaggagggaatatggttttatccattgatcaatctcacaaaagctggtaaactaaaaatctctgtctctggacagagacccaagactggacatcccatcgttgttcaacaggtccacatggaacacttaatcagaatcaaagaagagacctaggatatgtccttaagtcacagttaattcatttaatgcacactttaagtgtctactgtcaggcactgtcctagatgtgggaggttcagtaaaaagaaacccacatagtcacacagcctttgtggagctcacatttgaatgttgcatcaagtcgagttcacctgatgcattgttctttactccaaggtgcttccagctccatcaggaggattgggtgggtgtcctgggtccagaagaatggagactaccaacctctttgctcctattacaaccctcccttgcctgcaccacccactgcccttacttttgcatttgttattcacatcatagaatttaaagcaagtcacacggtttctcacattacctacattttactcagacgttctagttctcatacacattctcttacaaccttttccagggctaactccatggaatgatttttggtctttttgttttgtcttgttttgtttttgagagagagtcttgctctgtcacccaggcagtggcatggtctcagctcactgtaaactccgcctcccaagttcaagtgtttctcctggattcaagnnnnnnnnnnnnnnnnnnnnnnnnnnnnnnnnnnnnnnnnnnnnnnnnnnnnnnnnnnnnnnnnnnnnnnnnnnnnnnnnnnnnnnnnnnnnnnnnnnnnnnnnnnnnnnnnnnnnnnnnnnnnnnnnnnnnnnnnnnnnnnnnnnnnnnnnnnnnnnnnnnnnnnnnnnnnnnnnnnnnnnnnnnnnnnnnnnnnnnnnnnnnnnnnnnnnnnnnnnnnnnnnnnnnnnnnnnnnnnnnnnnnnnnnnnnnnnnnnnnnnnnnnnnnnnnnnnnnnnnnnnnnnnnnnnnnnnnnnnnnnnnnnnnnnnnnnnnnnnnnnnnnnnnnnnnnnnnnnnnnnnnnnnnnnnnnnnnnnnnnnnnnnnnnnnnnnnnnnnnnnnnnnnnnnnnnnnnnnnnnnnnnnnnnnnnnnnnnnnnnnnnnnnnnnnnnnnnnnnnnnnnnnnnnnnnnnnnnnnnnnnnnnnnnnnnnnnnnnnnnnnnnnnnnnnnnnnnnnnnnnnnnnnnnnnnnnnnnnnnnnnnnnnnnnnnnnnnnnnnnnnnnnnnnnnnnnnnnnnnnnnnnnnnnnnnnnnnnnnnnnnnnnnnnnnnnnnnnnnnnnnnnnnnnnnnnnnnnnnnnnnnnnnnnnnnnnnnnnnnnnnnnnnnnnnnnnnnnnnnnnnnnnnnnnnnnnnnnnnnnnnnnnnnnnnnnnnnnnnnnnnnnnnnnnnnnnnnnnnnnnnnnnnnnnnnnnnnnnnnnnnnnnnnnnnnnnnnnnnnnnnnnnnnnnnnnnnnnnnnnnnnnnnnnnnnnnnnnnnnnnnnnnnnnnnnnnnnnnnnnnnnnnnnnnnnnnnnnnnnnnnnnnnnnnnnnnnnnnnnnnnnnnnnnnnnnnnnnnnnnnnnnnnnnnnnnnnnnnnnnnnnnnnnnnnnnnnnnnnnnnnnnnnnnnnnnnnnnnnnnnnnnnnnnnnnnnnnnnnnnnnnnnnnnnnnnnnnnnnnnnnnnnnnnnnnnnnnnnnnnnnnnnnnnnnnnnnnnnnnnnnnnnnnnnnnnnnnnnnnnnnnnnnnnnnnnnnnnnnnnnnnnnnnnnnnnnnnnnnnnnnnnnnnnnnnnnnnnnnnnnnnnnnnnnnnnnnnnnnnnnnnnnnnnnnnnnnnnnnnnnnnnnnnnnnnnnnnnnnnnnnnnnnnnnnnnnnnnnnnnnnnnnnnnnnnnnnnnnnnnnnnnnnnnnnnnnnnnnnnnnnnnnnnnnnnnnnnnnnnnnnnnnnnnnnnnnnnnnnnnnnnnnnnnnnnnnnnnnnnnnnnnnnnnnnnnnnnnnnnnnnnnnnnnnnnnnnnnnnnnnnnnnnnnnnnnnnnnnnnnnnnnnnnnnnnnnnnnnnnnnnnnnnnnnnnnnnnnnnnnnnnnnnnnnnnnnnnnnnnnnnnnnnnnnnnnnnnnnnnnnnnnnnnnnnnnnnnnnnnnnnnnnnnnnnnnnnnnnnnnnnnnnnnnnnnnnnnnnnnnnnnnnnnnnnnnnnnnnnnnnnnnnnnnnnnnnnnnnnnnnnnnnnnnnnnnnnnnnnnnnnnnnnnnnnnnnnnnnnnnnnnnnnnnnnnnnnnnnnnnnnnnnnnnnnnnnnnnnnnnnnnnnnnnnnnnnnnnnnnnnnnnnnnnnnnnnnnnnnnnnnnnnnnnnnnnnnnnnnnnnnnnnnnnnnnnnnnnnnnnnnnnnnnnnnnnnnnnnnnnnnnnnnnnnnnnnnnnnnnnnnnnnnnnnnnnnnnnnnnnnnnnnnnnnnnnnnnnnnnnnnnnnnnnnnnnnnnnnnnnnnnnnnnnnnnnnnnnnnnnnnnnnnnnnnnnnnnnnnnnnnnnnnnnnnnnnnnnnnnnnnnnnnnnnnnnnnnnnnnnnnnnnnnnnnnnnnnnnnnnnnnnnnnnnnnnnnnnnnnnnnnnnnnnnnnnnnnnnnnnnnnnnnnnnnnnnnnnnnnnnnnnnnnnnnnnnnnnnnnnnnnnnnnnnnnnnnnnnnnnnnnnnnnnnnnnnnnnnnnnnnnnnnnnnnnnnnnnnnnnnnnnnnnnnnnnnnnnnnnnnnnnnnnnnnnnnnnnnnnnnnnnnnnnnnnnnnnnnnnnnnnnnnnnnnnnnnnnnnnnnnnnnnnnnnnnnnnnnnnnnnnnnnnnnnnnnnnnnnnnnnnnnnnnnnnnnnnnnnnnnnnnnnnnnnnnnnnnnnnnnnnnnnnnnnnnnnnnnnnnnnnnnnnnnnnnnnnnnnnnnnnnnnnnnnnnnnnnnnnnnnnnnnnnnnnnnnnnnnnnnnnnnnnnnnnnnnnnnnnnnnnnnnnnnnnnnnnnnnnnnnnnnnnnnnnnnnnnnnnnnnnnnnnnnnnnnnnnnnnnnnnnnnnnnnnnnnnnnnnnnnnnnnnnnnnnnnnnnnnnnnnnnnnnnnnnnnnnnnnnnnnnnnnnnnnnnnnnnnnnnnnnnnnnnnnnnnnnnnnnnnnnnnnnnnnnnnnnnnnnnnnnnnnnnnnnnnnnnnnnnnnnnnnnnnnnnnnnnnnnnnnnnnnnnnnnnnnnnnnnnnnnnnnnnnnnnnnnnnnnnnnnnnnnnnnnnnnnnnnnnnnnnnnnnnnnnnnnnnnnnnnnnnnnnnnnnnnnnnnnnnnnnnnnnnnnnnnnnnnnnnnnnnnnnnnnnnnnnnnnnnnnnnnnnnnnnnnnnnnnnnnnnnnnnnnnnnnnnnnnnnnnnnnnnnnnnnnnnnnnnnnnnnnnnnnnnnnnnnnnnnnnnnnnnnnnnnnnnnnnnnnnnnnnnnnnnnnnnnnnnnnnnnnnnnnnnnnnnnnnnnnnnnnnnnnnnnnnnnnnnnnnnnnnnnnnnnnnnnnnnnnnnnnnnnnnnnnnnnnnnnnnnnnnnnnnnnnnnnnnnnnnnnnnnnnnnnnnnnnnnnnnnnnnnnnnnnnnnnnnnnnnnnnnnnnnnnnnnnnnnnnnnnnnnnnnnnnnnnnnnnnnnnnnnnnnnnnnnnnnnnnnnnnnnnnnnnnnnnnnnnnnnnnnnnnnnnnnnnnnnnnnnnnnnnnnnnnnnnnnnnnnnnnnnnnnnnnnnnnnnnnnnnnnnnnnnnnnnnnnnnnnnnnnnnnnnnnnnnnnnnnnnnnnnnnnnnnnnnnnnnnnnnnnnnnnnnnnnnnnnnnnnnnnnnnnnnnnnnnnnnnnnnnnnnnnnnnnnnnnnnnnnnnnnnnnnnnnnnnnnnnnnnnnnnnnnnnnnnnnnnnnnnnnnnnnnnnnnnnnnnnnnnnnnnnnnnnnnnnnnnnnnnnnnnnnnnnnnnnnnnnnnnnnnnnnnnnnnnnnnnnnnnnnnnnnnnnnnnnnnnnnnnnnnnnnnnnnnnnnnnnnnnnnnnnnnnnnnnnnnnnnnnnnnnnnnnnnnnnnnnnnnnnnnnnnnnnnnnnnnnnnnnnnnnnnnnnnnnnnnnnnnnnnnnnnnnnnnnnnnnnnnnnnnnnnnnnnnnnnnnnnnnnnnnnnnnnnnnnnnnnnnnnnnnnnnnnnnnnnnnnnnnnnnnnnnnnnnnnnnnnnnnnnnnnnnnnnnnnnnnnnnnnnnnnnnnnnnnnnnnnnnnnnnnnnnnnnnnnnnnnnnnnnnnnnnnnnnnnnnnnnnnnnnnnnnnnnnnnnnnnnnnnnnnnnnnnnnnnnnnnnnnnnnnnnnnnnnnnnnnnnnnnnnnnnnnnnnnnnnnnnnnnnnnnnnnnnnnnnnnnnnnnnnnnnnnnnnnnnnnnnnnnnnnnnnnnnnnnnnnnnnnnnnnnnnnnnnnnnnnnnnnnnnnnnnnnnnnnnnnnnnnnnnnnnnnnnnnnnnnnnnnnnnnnnnnnnnnnnnnnnnnnnnnnnnnnnnnnnnnnnnnnnnnnnnnnnnnnnnnnnnnnnnnnnnnnnnnnnnnnnnnnnnnnnnnnnnnnnnnnnnnnnnnnnnnnnnnnnnnnnnnnnnnnnnnnnnnnnnnnnnnnnnnnnnnnnnnnnnnnnnnnnnnnnnnnnnnnnnnnnnnnnnnnnnnnnnnnnnnnnnnnnnnnnnnnnnnnnnnnnnnnnnnnnnnnnnnnnnnnnnnnnnnnnnnnnnnnnnnnnnnnnnnnnnnnnnnnnnnnnnnnnnnnnnnnnnnnnnnnnnnnnnnnnnnnnnnnnnnnnnnnnnnnnnnnnnnnnnnnnnnnnnnnnnnnnnnnnnnnnnnnnnnnnnnnnnnnnnnnnnnnnnnnnnnnnnnnnnnnnnnnnnnnnnnnnnnnnnnnnnnnnnnnnnnnnnnnnnnnnnnnnnnnnnnnnnnnnnnnnnnnnnnnnnnnnnnnnnnnnnnnnnnnnnnnnnnnnnnnnnnnnnnnnnnnnnnnnnnnnnnnnnnnnnnnnnnnnnnnnnnnnnnnnnnnnnnnnnnnnnnnnnnnnnnnnnnnnnnnnnnnnnnnnnnnnnnnnnnnnnnnnnnnnnnnnnnnnnnnnnnnnnnnnnnnnnnnnnnnnnnnnnnnnnnnnnnnnnnnnnnnnnnnnnnnnnnnnnnnnnnnnnnnnnnnnnnnnnnnnnnnnnnnnnnnnnnnnnnnnnnnnnnnnnnnnnnnnnnnnnnnnnnnnnnnnnnnnnnnnnnnnnnnnnnnnnnnnnnnnnnnnnnnnnnnnnnnnnnnnnnnnnnnnnnnnnnnnnnnnnnnnnnnnnnnnnnnnnnnnnnnnnnnnnnnnnnnnnnnnnnnnnnnnnnnnnnnnnnnnnnnnnnnnnnnnnnnnnnnnnnnnnnnnnnnnnnnnnnnnnnnnnnnnnnnnnnnnnnnnnnnnnnnnnnnnnnnnnnnnnnnnnnnnnnnnnnnnnnnnnnnnnnnnnnnnnnnnnnnnnnnnnnnnnnnnnnnnnnnnnnnnnnnnnnnnnnnnnnnnnnnnnnnnnnnnnnnnnnnnnnnnnnnnnnnnnnnnnnnnnnnnnnnnnnnnnnnnnnnnnnnnnnnnnnnnnnnnnnnnnnnnnnnnnnnnnnnnnnnnnnnnnnnnnnnnnnnnnnnnnnnnnnnnnnnnnnnnnnnnnnnnnnnnnnnnnnnnnnnnnnnnnnnnnnnnnnnnnnnnnnnnnnnnnnnnnnnnnnnnnnnnnnnnnnnnnnnnnnnnnnnnnnnnnnnnnnnnnnnnnnnnnnnnnnnnnnnnnnnnnnnnnnnnnnnnnnnnnnnnnnnnnnnnnnnnnnnnnnnnnnnnnnnnnnnnnnnnnnnnnnnnnnnnnnnnnnnnnnnnnnnnnnnnnnnnnnnnnnnnnnnnnnnnnnnnnnnnnnnnnnnnnnnnnnnnnnnnnnnnnnnnnnnnnnnnnnnnnnnnnnnnnnnnnnnnnnnnnnnnnnnnnnnnnnnnnnnnnnnnnnnnnnnnnnnnnnnnnnnnnnnnnnnnnnnnnnnnnnnnnnnnnnnnnnnnnnnnnnnnnnnnnnnnnnnnnnnnnnnnnnnnnnnnnnnnnnnnnnnnnnnnnnnnnnnnnnnnnnnnnnnnnnnnnnnnnnnnnnnnnnnnnnnnnnnnnnnnnnnnnnnnnnnnnnnnnnnnnnnnnnnnnnnnnnnnnnnnnnnnnnnnnnnnnnnnnnnnnnnnnnnnnnnnnnnnnnnnnnnnnnnnnnnnnnnnnnnnnnnnnnnnnnnnnnnnnnnnnnnnnnnnnnnnnnnnnnnnnnnnnnnnnnnnnnnnnnnnnnnnnnnnnnnnnnnnnnnnnnnnnnnnnnnnnnnnnnnnnnnnnnnnnnnnnnnnnnnnnnnnnnnnnnnnnnnnnnnnnnnnnnnnnnnnnnnnnnnnnnnnnnnnnnnnnnnnnnnnnnnnnnnnnnnnnnnnnnnnnnnnnnnnnnnnnnnnnnnnnnnnnnnnnnnnnnnnnnnnnnnnnnnnnnnnnnnnnnnnnnnnnnnnnnnnnnnnnnnnnnnnnnnnnnnnnnnnnnnnnnnnnnnnnnnnnnnnnnnnnnnnnnnnnnnnnnnnnnnnnnnnnnnnnnnnnnnnnnnnnnnnnnnnnnnnnnnnnnnnnnnnnnnnnnnnnnnnnnnnnnnnnnnnnnnnnnnnnnnnnnnnnnnnnnnnnnnnnnnnnnnnnnnnnnnnnnnnnnnnnnnnnnnnnnnnnnnnnnnnnnnnnnnnnnnnnnnnnnnnnnnnnnnnnnnnnnnnnnnnnnnnnnnnnnnnnnnnnnnnnnnnnnnnnnnnnnnnnnnnnnnnnnnnnnnnnnnnnnnnnnnnnnnnnnnnnnnnnnnnnnnnnnnnnnnnnnnnnnnnnnnnnnnnnnnnnnnnnnnnnnnnnnnnnnnnnnnnnnnnnnnnnnnnnnnnnnnnnnnnnnnnnnnnnnnnnnnnnnnnnnnnnnnnnnnnnnnnnnnnnnnnnnnnnnnnnnnnnnnnnnnnnnnnnnnnnnnnnnnnnnnnnnnnnnnnnnnnnnnnnnnnnnnnnnnnnnnnnnnnnnnnnnnnnnnnnnnnnnnnnnnnnnnnnnnnnnnnnnnnnnnnnnnnnnnnnnnnnnnnnnnnnnnnnnnnnnnnnnnnnnnnnnnnnnnnnnnnnnnnnnnnnnnnnnnnnnnnnnnnnnnnnnnnnnnnnnnnnnnnnnnnnnnnnnnnnnnnnnnnnnnnnnnnnnnnnnnnnnnnnnnnnnnnnnnnnnnnnnnnnnnnnnnnnnnnnnnnnnnnnnnnnnnnnnnnnnnnnnnnnnnnnnnnnnnnnnnnnnnnnnnnnnnnnnnnnnnnnnnnnnnnnnnnnnnnnnnnnnnnnnnnnnnnnnnnnnnnnnnnnnnnnnnnnnnnnnnnnnnnnnnnnnnnnnnnnnnnnnnnnnnnnnnnnnnnnnnnnnnnnnnnnnnnnnnnnnnnnnnnnnnnnnnnnnnnnnnnnnnnnnnnnnnnnnnnnnnnnnnnnnnnnnnnnnnnnnnnnnnnnnnnnnnnnnnnnnnnnnnnnnnnnnnnnnnnnnnnnnnnnnnnnnnnnnnnnnnnnnnnnnnnnnnnnnnnnnnnnnnnnnnnnnnnnnnnnnnnnnnnnnnnnnnnnnnnnnnnnnnnnnnnnnnnnnnnnnnnnnnnnnnnnnnnnnnnnnnnnnnnnnnnnnnnnnnnnnnnnnnnnnnnnnnnnnnnnnnnnnnnnnnnnnnnnnnnnnnnnnnnnnnnnnnnnnnnnnnnnnnnnnnnnnnnnnnnnnnnnnnnnnnnnnnnnnnnnnnnnnnnnnnnnnnnnnnnnnnnnnnnnnnnnnnnnnnnnnnnnnnnnnnnnnnnnnnnnnnnnnnnnnnnnnnnnnnnnnnnnnnnnnnnnnnnnnnnnnnnnnnnnnnnnnnnnnnnnnnnnnnnnnnnnnnnnnnnnnnnnnnnnnnnnnnnnnnnnnnnnnnnnnnnnnnnnnnnnnnnnnnnnnnnnnnnnnnnnnnnnnnnnnnnnnnnnnnnnnnnnnnnnnnnnnnnnnnnnnnnnnnnnnnnnnnnnnnnnnnnnnnnnnnnnnnnnnnnnnnnnnnnnnnnnnnnnnnnnnnnnnnnnnnnnnnnnnnnnnnnnnnnnnnnnnnnnnnnnnnnnnnnnnnnnnnnnnnnnnnnnnnnnnnnnnnnnnnnnnnnnnnnnnnnnnnnnnnnnnnnnnnnnnnnnnnnnnnnnnnnnnnnnnnnnnnnnnnnnnnnnnnnnnnnnnnnnnnnnnnnnnnnnnnnnnnnnnnnnnnnnnnnnnnnnnnnnnnnnnnnnnnnnnnnnnnnnnnnnnnnnnnnnnnnnnnnnnnnnnnnnnnnnnnnnnnnnnnnnnnnnnnnnnnnnnnnnnnnnnnnnnnnnnnnnnnnnnnnnnnnnnnnnnnnnnnnnnnnnnnnnnnnnnnnnnnnnnnnnnnnnnnnnnnnnnnnnnnnnnnnnnnnnnnnnnnnnnnnnnnnnnnnnnnnnnnnnnnnnnnnnnnnnnnnnnnnnnnnnnnnnnnnnnnnnnnnnnnnnnnnnnnnnnnnnnnnnnnnnnnnnnnnnnnnnnnnnnnnnnnnnnnnnnnnnnnnnnnnnnnnnnnnnnnnnnnnnnnnnnnnnnnnnnnnnnnnnnnnnnnnnnnnnnnnnnnnnnnnnnnnnnnnnnnnnnnnnnnnnnnnnnnnnnnnnnnnnnnnnnnnnnnnnnnnnnnnnnnnnnnnnnnnnnnnnnnnnnnnnnnnnnnnnnnnnnnnnnnnnnnnnnnnnnnnnnnnnnnnnnnnnnnnnnnnnnnnnnnnnnnnnnnnnnnnnnnnnnnnnnnnnnnnnnnnnnnnnnnnnnnnnnnnnnnnnnnnnnnnnnnnnnnnnnnnnnnnnnnnnnnnnnnnnnnnnnnnnnnnnnnnnnnnnnnnnnnnnnnnnnnnnnnnnnnnnnnnnnnnnnnnnnnnnnnnnnnnnnnnnnnnnnnnnnnnnnnnnnnnnnnnnnnnnnnnnnnnnnnnnnnnnnnnnnnnnnnnnnnnnnnnnnnnnnnnnnnnnnnnnnnnnnnnnnnnnnnnnnnnnnnnnnnnnnnnnnnnnnnnnnnnnnnnnnnnnnnnnnnnnnnnnnnnnnnnnnnnnnnnnnnnnnnnnnnnnnnnnnnnnnnnnnnnnnnnnnnnnnnnnnnnnnnnnnnnnnnnnnnnnnnnnnnnnnnnnnnnnnnnnnnnnnnnnnnnnnnnnnnnnnnnnnnnnnnnnnnnnnnnnnnnnnnnnnnnnnnnnnnnnnnnnnnnnnnnnnnnnnnnnnnnnnnnnnnnnnnnnnnnnnnnnnnnnnnnnnnnnnnnnnnnnnnnnnnnnnnnnnnnnnnnnnnnnnnnnnnnnnnnnnnnnnnnnnnnnnnnnnnnnnnnnnnnnnnnnnnnnnnnnnnnnnnnnnnnnnnnnnnnnnnnnnnnnnnnnnnnnnnnnnnnnnnnnnnnnnnnnnnnnnnnnnnnnnnnnnnnnnnnnnnnnnnnnnnnnnnnnnnnnnnnnnnnnnnnnnnnnnnnnnnnnnnnnnnnnnnnnnnnnnnnnnnnnnnnnnnnnnnnnnnnnnnnnnnnnnnnnnnnnnnnnnnnnnnnnnnnnnnnnnnnnnnnnnnnnnnnnnnnnnnnnnnnnnnnnnnnnnnnnnnnnnnnnnnnnnnnnnnnnnnnnnnnnnnnnnnnnnnnnnnnnnnnnnnnnnnnnnnnnnnnnnnnnnnnnnnnnnnnnnnnnnnnnnnnnnnnnnnnnnnnnnnnnnnnnnnnnnnnnnnnnnnnnnnnnnnnnnnnnnnnnnnnnnnnnnnnnnnnnnnnnnnnnnnnnnnnnnnnnnnnnnnnnnnnnnnnnnnnnnnnnnnnnnnnnnnnnnnnnnnnnnnnnnnnnnnnnnnnnnnnnnnnnnnnnnnnnnnnnnnnnnnnnnnnnnnnnnnnnnnnnnnnnnnnnnnnnnnnnnnnnnnnnnnnnnnnnnnnnnnnnnnnnnnnnnnnnnnnnnnnnnnnnnnnnnnnnnnnnnnnnnnnnnnnnnnnnnnnnnnnnnnnnnnnnnnnnnnnnnnnnnnnnnnnnnnnnnnnnnnnnnnnnnnnnnnnnnnnnnnnnnnnnnnnnnnnnnnnnnnnnnnnnnnnnnnnnnnnnnnnnnnnnnnnnnnnnnnnnnnnnnnnnnnnnnnnnnnnnnnnnnnnnnnnnnnnnnnnnnnnnnnnnnnnnnnnnnnnnnnnnnnnnnnnnnnnnnnnnnnnnnnnnnnnnnnnnnnnnnnnnnnnnnnnnnnnnnnnnnnnnnnnnnnnnnnnnnnnnnnnnnnnnnnnnnnnnnnnnnnnnnnnnnnnnnnnnnnnnnnnnnnnnnnnnnnnnnnnnnnnnnnnnnnnnnnnnnnnnnnnnnnnnnnnnnnnnnnnnnnnnnnnnnnnnnnnnnnnnnnnnnnnnnnnnnnnnnnnnnnnnnnnnnnnnnnnnnnnnnnnnnnnnnnnnnnnnnnnnnnnnnnnnnnnnnnnnnnnnnnnnnnnnnnnnnnnnnnnnnnnnnnnnnnnnnnnnnnnnnnnnnnnnnnnnnnnnnnnnnnnnnnnnnnnnnnnnnnnnnnnnnnnnnnnnnnnnnnnnnnnnnnnnnnnnnnnnnnnnnnnnnnnnnnnnnnnnnnnnnnnnnnnnnnnnnnnnnnnnnnnnnnnnnnnnnnnnnnnnnnnnnnnnnnnnnnnnnnnnnnnnnnnnnnnnnnnnnnnnnnnnnnnnnnnnnnnnnnnnnnnnnnnnnnnnnnnnnnnnnnnnnnnnnnnnnnnnnnnnnnnnnnnnnnnnnnnnnnnnnnnnnnnnnnnnnnnnnnnnnnnnnnnnnnnnnnnnnnnnnnnnnnnnnnnnnnnnnnnnnnnnnnnnnnnnnnnnnnnnnnnnnnnnnnnnnnnnnnnnnnnnnnnnnnnnnnnnnnnnnnnnnnnnnnnnnnnnnnnnnnnnnnnnnnnnnnnnnnnnnnnnnnnnnnnnnnnnnnnnnnnnnnnnnnnnnnnnnnnnnnnnnnnnnnnnnnnnnnnnnnnnnnnnnnnnnnnnnnnnnnnnnnnnnnnnnnnnnnnnnnnnnnnnnnnnnnnnnnnnnnnnnnnnnnnnnnnnnnnnnnnnnnnnnnnnnnnnnnnnnnnnnnnnnnnnnnnnnnnnnnnnnnnnnnnnnnnnnnnnnnnnnnnnnnnnnnnnnnnnnnnnnnnnnnnnnnnnnnnnnnnnnnnnnnnnnnnnnnnnnnnnnnnnnnnnnnnnnnnnnnnnnnnnnnnnnnnnnnnnnnnnnnnnnnnnnnnnnnnnnnnnnnnnnnnnnnnnnnnnnnnnnnnnnnnnnnnnnnnnnnnnnnnnnnnnnnnnnnnnnnnnnnnnnnnnnnnnnnnnnnnnnnnnnnnnnnnnnnnnnnnnnnnnnnnnnnnnnnnnnnnnnnnnnnnnnnnnnnnnnnnnnnnnnnnnnnnnnnnnnnnnnnnnnnnnnnnnnnnnnnnnnnnnnnnnnnnnnnnnnnnnnnnnnnnnnnnnnnnnnnnnnnnnnnnnnnnnnnnnnnnnnnnnnnnnnnnnnnnnnnnnnnnnnnnnnnnnnnnnnnnnnnnnnnnnnnnnnnnnnnnnnnnnnnnnnnnnnnnnnnnnnnnnnnnnnnnnnnnnnnnnnnnnnnnnnnnnnnnnnnnnnnnnnnnnnnnnnnnnnnnnnnnnnnnnnnnnnnnnnnnnnnnnnnnnnnnnnnnnnnnnnnnnnnnnnnnnnnnnnnnnnnnnnnnnnnnnnnnnnnnnnnnnnnnnnnnnnnnnnnnnnnnnnnnnnnnnnnnnnnnnnnnnnnnnnnnnnnnnnnnnnnnnnnnnnnnnnnnnnnnnnnnnnnnnnnnnnnnnnnnnnnnnnnnnnnnnnnnnnnnnnnnnnnnnnnnnnnnnnnnnnnnnnnnnnnnnnnnnnnnnnnnnnnnnnnnnnnnnnnnnnnnnnnnnnnnnnnnnnnnnnnnnnnnnnnnnnnnnnnnnnnnnnnnnnnnnnnnnnnnnnnnnnnnnnnnnnnnnnnnnnnnnnnnnnnnnnnnnnnnnnnnnnnnnnnnnnnnnnnnnnnnnnnnnnnnnnnnnnnnnnnnnnnnnnnnnnnnnnnnnnnnnnnnnnnnnnnnnnnnnnnnnnnnnnnnnnnnnnnnnnnnnnnnnnnnnnnnnnnnnnnnnnnnnnnnnnnnnnnnnnnnnnnnnnnnnnnnnnnnnnnnnnnnnnnnnnnnnnnnnnnnnnnnnnnnnnnnnnnnnnnnnnnnnnnnnnnnnnnnnnnnnnnnnnnnnnnnnnnnnnnnnnnnnnnnnnnnnnnnnnnnnnnnnnnnnnnnnnnnnnnnnnnnnnnnnnnnnnnnnnnnnnnnnnnnnnnnnnnnnnnnnnnnnnnnnnnnnnnnnnnnnnnnnnnnnnnnnnnnnnnnnnnnnnnnnnnnnnnnnnnnnnnnnnnnnnnnnnnnnnnnnnnnnnnnnnnnnnnnnnnnnnnnnnnnnnnnnnnnnnnnnnnnnnnnnnnnnnnnnnnnnnnnnnnnnnnnnnnnnnnnnnnnnnnnnnnnnnnnnnnnnnnnnnnnnnnnnnnnnnnnnnnnnnnnnnnnnnnnnnnnnnnnnnnnnnnnnnnnnnnnnnnnnnnnnnnnnnnnnnnnnnnnnnnnnnnnnnnnnnnnnnnnnnnnnnnnnnnnnnnnnnnnnnnnnnnnnnnnnnnnnnnnnnnnnnnnnnnnnnnnnnnnnnnnnnnnnnnnnnnnnnnnnnnnnnnnnnnnnnnnnnnnnnnnnnnnnnnnnnnnnnnnnnnnnnnnnnnnnnnnnnnnnnnnnnnnnnnnnnnnnnnnnnnnnnnnnnnnnnnnnnnnnnnnnnnnnnnnnnnnnnnnnnnnnnnnnnnnnnnnnnnnnnnnnnnnnnnnnnnnnnnnnnnnnnnnnnnnnnnnnnnnnnnnnnnnnnnnnnnnnnnnnnnnnnnnnnnnnnnnnnnnnnnnnnnnnnnnnnnnnnnnnnnnnnnnnnnnnnnnnnnnnnnnnnnnnnnnnnnnnnnnnnnnnnnnnnnnnnnnnnnnnnnnnnnnnnnnnnnnnnnnnnnnnnnnnnnnnnnnnnnnnnnnnnnnnnnnnnnnnnnnnnnnnnnnnnnnnnnnnnnnnnnnnnnnnnnnnnnnnnnnnnnnnnnnnnnnnnnnnnnnnnnnnnnnnnnnnnnnnnnnnnnnnnnnnnnnnnnnnnnnnnnnnnnnnnnnnnnnnnnnnnnnnnnnnnnnnnnnnnnnnnnnnnnnnnnnnnnnnnnnnnnnnnnnnnnnnnnnnnnnnnnnnnnnnnnnnnnnnnnnnnnnnnnnnnnnnnnnnnnnnnnnnnnnnnnnnnnnnnnnnnnnnnnnnnnnnnnnnnnnnnnnnnnnnnnnnnnnnnnnnnnnnnnnnnnnnnnnnnnnnnnnnnnnnnnnnnnnnnnnnnnnnnnnnnnnnnnnnnnnnnnnnnnnnnnnnnnnnnnnnnnnnnnnnnnnnnnnnnnnnnnnnnnnnnnnnnnnnnnnnnnnnnnnnnnnnnnnnnnnnnnnnnnnnnnnnnnnnnnnnnnnnnnnnnnnnnnnnnnnnnnnnnnnnnnnnnnnnnnnnnnnnnnnnnnnnnnnnnnnnnnnnnnnnnnnnnnnnnnnnnnnnnnnnnnnnnnnnnnnnnnnnnnnnnnnnnnnnnnnnnnnnnnnnnnnnnnnnnnnnnnnnnnnnnnnnnnnnnnnnnnnnnnnnnnnnnnnnnnnnnnnnnnnnnnnnnnnnnnnnnnnnnnnnnnnnnnnnnnnnnnnnnnnnnnnnnnnnnnnnnnnnnnnnnnnnnnnnnnnnnnnnnnnnnnnnnnnnnnnnnnnnnnnnnnnnnnnnnnnnnnnnnnnnnnnnnnnnnnnnnnnnnnnnnnnnnnnnnnnnnnnnnnnnnnnnnnnnnnnnnnnnnnnnnnnnnnnnnnnnnnnnnnnnnnnnnnnnnnnnnnnnnnnnnnnnnnnnnnnnnnnnnnnnnnnnnnnnnnnnnnnnnnnnnnnnnnnnnnnnnnnnnnnnnnnnnnnnnnnnnnnnnnnnnnnnnnnnnnnnnnnnnnnnnnnnnnnnnnnnnnnnnnnnnnnnnnnnnnnnnnnnnnnnnnnnnnnnnnnnnnnnnnnnnnnnnnnnnnnnnnnnnnnnnnnnnnnnnnnnnnnnnnnnnnnnnnnnnnnnnnnnnnnnnnnnnnnnnnnnnnnnnnnnnnnnnnnnnnnnnnnnnnnnnnnnnnnnnnnnnnnnnnnnnnnnnnnnnnnnnnnnnnnnnnnnnnnnnnnnnnnnnnnnnnnnnnnnnnnnnnnnnnnnnnnnnnnnnnnnnnnnnnnnnnnnnnnnnnnnnnnnnnnnnnnnnnnnnnnnnnnnnnnnnnnnnnnnnnnnnnnnnnnnnnnnnnnnnnnnnnnnnnnnnnnnnnnnnnnnnnnnnnnnnnnnnnnnnnnnnnnnnnnnnnnnnnnnnnnnnnnnnnnnnnnnnnnnnnnnnnnnnnnnnnnnnnnnnnnnnnnnnnnnnnnnnnnnnnnnnnnnnnnnnnnnnnnnnnnnnnnnnnnnnnnnnnnnnnnnnnnnnnnnnnnnnnnnnnnnnnnnnnnnnnnnnnnnnnnnnnnnnnnnnnnnnnnnnnnnnnnnnnnnnnnnnnnnnnnnnnnnnnnnnnnnnnnnnnnnnnnnnnnnnnnnnnnnnnnnnnnnnnnnnnnnnnnnnnnnnnnnnnnnnnnnnnnnnnnnnnnnnnnnnnnnnnnnnnnnnnnnnnnnnnnnnnnnnnnnnnnnnnnnnnnnnnnnnnnnnnnnnnnnnnnnnnnnnnnnnnnnnnnnnnnnnnnnnnnnnnnnnnnnnnnnnnnnnnnnnnnnnnnnnnnnnnnnnnnnnnnnnnnnnnnnnnnnnnnnnnnnnnnnnnnnnnnnnnnnnnnnnnnnnnnnnnnnnnnnnnnnnnnnnnnnnnnnnnnnnnnnnnnnnnnnnnnnnnnnnnnnnnnnnnnnnnnnnnnnnnnnnnnnnnnnnnnnnnnnnnnnnnnnnnnnnnnnnnnnnnnnnnnnnnnnnnnnnnnnnnnnnnnnnnnnnnnnnnnnnnnnnnnnnnnnnnnnnnnnnnnnnnnnnnnnnnnnnnnnnnnnnnnnnnnnnnnnnnnnnnnnnnnnnnnnnnnnnnnnnnnnnnnnnnnnnnnnnnnnnnnnnnnnnnnnnnnnnnnnnnnnnnnnnnnnnnnnnnnnnnnnnnnnnnnnnnnnnnnnnnnnnnnnnnnnnnnnnnnnnnnnnnnnnnnnnnnnnnnnnnnnnnnnnnnnnnnnnnnnnnnnnnnnnnnnnnnnnnnnnnnnnnnnnnnnnnnnnnnnnnnnnnnnnnnnnnnnnnnnnnnnnnnnnnnnnnnnnnnnnnnnnnnnnnnnnnnnnnnnnnnnnnnnnnnnnnnnnnnnnnnnnnnnnnnnnnnnnnnnnnnnnnnnnnnnnnnnnnnnnnnnnnnnnnnnnnnnnnnnnnnnnnnnnnnnnnnnnnnnnnnnnnnnnnnnnnnnnnnnnnnnnnnnnnnnnnnnnnnnnnnnnnnnnnnnnnnnnnnnnnnnnnnnnnnnnnnnnnnnnnnnnnnnnnnnnnnnnnnnnnnnnnnnnnnnnnnnnnnnnnnnnnnnnnnnnnnnnnnnnnnnnnnnnnnnnnnnnnnnnnnnnnnnnnnnnnnnnnnnnnnnnnnnnnnnnnnnnnnnnnnnnnnnnnnnnnnnnnnnnnnnnnnnnnnnnnnnnnnnnnnnnnnnnnnnnnnnnnnnnnnnnnnnnnnnnnnnnnnnnnnnnnnnnnnnnnnnnnnnnnnnnnnnnnnnnnnnnnnnnnnnnnnnnnnnnnnnnnnnnnnnnnnnnnnnnnnnnnnnnnnnnnnnnnnnnnnnnnnnnnnnnnnnnnnnnnnnnnnnnnnnnnnnnnnnnnnnnnnnnnnnnnnnnnnnnnnnnnnnnnnnnnnnnnnnnnnnnnnnnnnnnnnnnnnnnnnnnnnnnnnnnnnnnnnnnnnnnnnnnnnnnnnnnnnnnnnnnnnnnnnnnnnnnnnnnnnnnnnnnnnnnnnnnnnnnnnnnnnnnnnnnnnnnnnnnnnnnnnnnnnnnnnnnnnnnnnnnnnnnnnnnnnnnnnnnnnnnnnnnnnnnnnnnnnnnnnnnnnnnnnnnnnnnnnnnnnnnnnnnnnnnnnnnnnnnnnnnnnnnnnnnnnnnnnnnnnnnnnnnnnnnnnnnnnnnnnnnnnnnnnnnnnnnnnnnnnnnnnnnnnnnnnnnnnnnnnnnnnnnnnnnnnnnnnnnnnnnnnnnnnnnnnnnnnnnnnnnnnnnnnnnnnnnnnnnnnnnnnnnnnnnnnnnnnnnnnnnnnnnnnnnnnnnnnnnnnnnnnnnnnnnnnnnnnnnnnnnnnnnnnnnnnnnnnnnnnnnnnnnnnnnnnnnnnnnnnnnnnnnnnnnnnnnnnnnnnnnnnnnnnnnnnnnnnnnnnnnnnnnnnnnnnnnnnnnnnnnnnnnnnnnnnnnnnnnnnnnnnnnnnnnnnnnnnnnnnnnnnnnnnnnnnnnnnnnnnnnnnnnnnnnnnnnnnnnnnnnnnnnnnnnnnnnnnnnnnnnnnnnnnnnnnnnnnnnnnnnnnnnnnnnnnnnnnnnnnnnnnnnnnnnnnnnnnnnnnnnnnnnnnnnnnnnnnnnnnnnnnnnnnnnnnnnnnnnnnnnnnnnnnnnnnnnnnnnnnnnnnnnnnnnnnnnnnnnnnnnnnnnnnnnnnnnnnnnnnnnnnnnnnnnnnnnnnnnnnnnnnnnnnnnnnnnnnnnnnnnnnnnnnnnnnnnnnnnnnnnnnnnnnnnnnnnnnnnnnnnnnnnnnnnnnnnnnnnnnnnnnnnnnnnnnnnnnnnnnnnnnnnnnnnnnnnnnnnnnnnnnnnnnnnnnnnnnnnnnnnnnnnnnnnnnnnnnnnnnnnnnnnnnnnnnnnnnnnnnnnnnnnnnnnnnnnnnnnnnnnnnnnnnnnnnnnnnnnnnnnnnnnnnnnnnnnnnnnnnnnnnnnnnnnnnnnnnnnnnnnnnnnnnnnnnnnnnnnnnnnnnnnnnnnnnnnnnnnnnnnnnnnnnnnnnnnnnnnnnnnnnnnnnnnnnnnnnnnnnnnnnnnnnnnnnnnnnnnnnnnnnnnnnnnnnnnnnnnnnnnnnnnnnnnnnnnnnnnnnnnnnnnnnnnnnnnnnnnnnnnnnnnnnnnnnnnnnnnnnnnnnnnnnnnnnnnnnnnnnnnnnnnnnnnnnnnnnnnnnnnnnnnnnnnnnnnnnnnnnnnnnnnnnnnnnnnnnnnnnnnnnnnnnnnnnnnnnnnnnnnnnnnnnnnnnnnnnnnnnnnnnnnnnnnnnnnnnnnnnnnnnnnnnnnnnnnnnnnnnnnnnnnnnnnnnnnnnnnnnnnnnnnnnnnnnnnnnnnnnnnnnnnnnnnnnnnnnnnnnnnnnnnnnnnnnnnnnnnnnnnnnnnnnnnnnnnnnnnnnnnnnnnnnnnnnnnnnnnnnnnnnnnnnnnnnnnnnnnnnnnnnnnnnnnnnnnnnnnnnnnnnnnnnnnnnnnnnnnnnnnnnnnnnnnnnnnnnnnnnnnnnnnnnnnnnnnnnnnnnnnnnnnnnnnnnnnnnnnnnnnnnnnnnnnnnnnnnnnnnnnnnnnnnnnnnnnnnnnnnnnnnnnnnnnnnnnnnnnnnnnnnnnnnnnnnnnnnnnnnnnnnnnnnnnnnnnnnnnnnnnnnnnnnnnnnnnnnnnnnnnnnnnnnnnnnnnnnnnnnnnnnnnnnnnnnnnnnnnnnnnnnnnnnnnnnnnnnnnnnnnnnnnnnnnnnnnnnnnnnnnnnnnnnnnnnnnnnnnnnnnnnnnnnnnnnnnnnnnnnnnnnnnnnnnnnnnnnnnnnnnnnnnnnnnnnnnnnnnnnnnnnnnnnnnnnnnnnnnnnnnnnnnnnnnnnnnnnnnnnnnnnnnnnnnnnnnnnnnnnnnnnnnnnnnnnnnnnnnnnnnnnnnnnnnnnnnnnnnnnnnnnnnnnnnnnnnnnnnnnnnnnnnnnnnnnnnnnnnnnnnnnnnnnnnnnnnnnnnnnnnnnnnnnnnnnnnnnnnnnnnnnnnnnnnnnnnnnnnnnnnnnnnnnnnnnnnnnnnnnnnnnnnnnnnnnnnnnnnnnnnnnnnnnnnnnnnnnnnnnnnnnnnnnnnnnnnnnnnnnnnnnnnnnnnnnnnnnnnnnnnnnnnnnnnnnnnnnnnnnnnnnnnnnnnnnnnnnnnnnnnnnnnnnnnnnnnnnnnnnnnnnnnnnnnnnnnnnnnnnnnnnnnnnnnnnnnnnnnnnnnnnnnnnnnnnnnnnnnnnnnnnnnnnnnnnnnnnnnnnnnnnnnnnnnnnnnnnnnnnnnnnnnnnnnnnnnnnnnnnnnnnnnnnnnnnnnnnnnnnnnnnnnnnnnnnnnnnnnnnnnnnnnnnnnnnnnnnnnnnnnnnnnnnnnnnnnnnnnnnnnnnnnnnnnnnnnnnnnnnnnnnnnnnnnnnnnnnnnnnnnnnnnnnnnnnnnnnnnnnnnnnnnnnnnnnnnnnnnnnnnnnnnnnnnnnnnnnnnnnnnnnnnnnnnnnnnnnnnnnnnnnnnnnnnnnnnnnnnnnnnnnnnnnnnnnnnnnnnnnnnnnnnnnnnnnnnnnnnnnnnnnnnnnnnnnnnnnnnnnnnnnnnnnnnnnnnnnnnnnnnnnnnnnnnnnnnnnnnnnnnnnnnnnnnnnnnnnnnnnnnnnnnnnnnnnnnnnnnnnnnnnnnnnnnnnnnnnnnnnnnnnnnnnnnnnnnnnnnnnnnnnnnnnnnnnnnnnnnnnnnnnnnnnnnnnnnnnnnnnnnnnnnnnnnnnnnnnnnnnnnnnnnnnnnnnnnnnnnnnnnnnnnnnnnnnnnnnnnnnnnnnnnnnnnnnnnnnnnnnnnnnnnnnnnnnnnnnnnnnnnnnnnnnnnnnnnnnnnnnnnnnnnnnnnnnnnnnnnnnnnnnnnnnnnnnnnnnnnnnnnnnnnnnnnnnnnnnnnnnnnnnnnnnnnnnnnnnnnnnnnnnnnnnnnnnnnnnnnnnnnnnnnnnnnnnnnnnnnnnnnnnnnnnnnnnnnnnnnnnnnnnnnnnnnnnnnnnnnnnnnnnnnnnnnnnnnnnnnnnnnnnnnnnnnnnnnnnnnnnnnnnnnnnnnnnnnnnnnnnnnnnnnnnnnnnnnnnnnnnnnnnnnnnnnnnnnnnnnnnnnnnnnnnnnnnnnnnnnnnnnnnnnnnnnnnnnnnnnnnnnnnnnnnnnnnnnnnnnnnnnnnnnnnnnnnnnnnnnnnnnnnnnnnnnnnnnnnnnnnnnnnnnnnnnnnnnnnnnnnnnnnnnnnnnnnnnnnnnnnnnnnnnnnnnnnnnnnnnnnnnnnnnnnnnnnnnnnnnnnnnnnnnnnnnnnnnnnnnnnnnnnnnnnnnnnnnnnnnnnnnnnnnnnnnnnnnnnnnnnnnnnnnnnnnnnnnnnnnnnnnnnnnnnnnnnnnnnnnnnnnnnnnnnnnnnnnnnnnnnnnnnnnnnnnnnnnnnnnnnnnnnnnnnnnnnnnnnnnnnnnnnnnnnnnnnnnnnnnnnnnnnnnnnnnnnnnnnnnnnnnnnnnnnnnnnnnnnnnnnnnnnnnnnnnnnnnnnnnnnnnnnnnnnnnnnnnnnnnnnnnnnnnnnnnnnnnnnnnnnnnnnnnnnnnnnnnnnnnnnnnnnnnnnnnnnnnnnnnnnnnnnnnnnnnnnnnnnnnnnnnnnnnnnnnnnnnnnnnnnnnnnnnnnnnnnnnnnnnnnnnnnnnnnnnnnnnnnnnnnnnnnnnnnnnnnnnnnnnnnnnnnnnnnnnnnnnnnnnnnnnnnnnnnnnnnnnnnnnnnnnnnnnnnnnnnnnnnnnnnnnnnnnnnnnnnnnnnnnnnnnnnnnnnnnnnnnnnnnnnnnnnnnnnnnnnnnnnnnnnnnnnnnnnnnnnnnnnnnnnnnnnnnnnnnnnnnnnnnnnnnnnnnnnnnnnnnnnnnnnnnnnnnnnnnnnnnnnnnnnnnnnnnnnnnnnnnnnnnnnnnnnnnnnnnnnnnnnnnnnnnnnnnnnnnnnnnnnnnnnnnnnnnnnnnnnnnnnnnnnnnnnnnnnnnnnnnnnnnnnnnnnnnnnnnnnnnnnnnnnnnnnnnnnnnnnnnnnnnnnnnnnnnnnnnnnnnnnnnnnnnnnnnnnnnnnnnnnnnnnnnnnnnnnnnnnnnnnnnnnnnnnnnnnnnnnnnnnnnnnnnnnnnnnnnnnnnnnnnnnnnnnnnnnnnnnnnnnnnnnnnnnnnnnnnnnnnnnnnnnnnnnnnnnnnnnnnnnnnnnnnnnnnnnnnnnnnnnnnnnnnnnnnnnnnnnnnnnnnnnnnnnnnnnnnnnnnnnnnnnnnnnnnnnnnnnnnnnnnnnnnnnnnnnnnnnnnnnnnnnnnnnnnnnnnnnnnnnnnnnnnnnnnnnnnnnnnnnnnnnnnnnnnnnnnnnnnnnnnnnnnnnnnnnnnnnnnnnnnnnnnnnnnnnnnnnnnnnnnnnnnnnnnnnnnnnnnnnnnnnnnnnnnnnnnnnnnnnnnnnnnnnnnnnnnnnnnnnnnnnnnnnnnnnnnnnnnnnnnnnnnnnnnnnnnnnnnnnnnnnnnnnnnnnnnnnnnnnnnnnnnnnnnnnnnnnnnnnnnnnnnnnnnnnnnnnnnnnnnnnnnnnnnnnnnnnnnnnnnnnnnnnnnnnnnnnnnnnnnnnnnnnnnnnnnnnnnnnnnnnnnnnnnnnnnnnnnnnnnnnnnnnnnnnnnnnnnnnnnnnnnnnnnnnnnnnnnnnnnnnnnnnnnnnnnnnnnnnnnnnnnnnnnnnnnnnnnnnnnnnnnnnnnnnnnnnnnnnnnnnnnnnnnnnnnnnnnnnnnnnnnnnnnnnnnnnnnnnnnnnnnnnnnnnnnnnnnnnnnnnnnnnnnnnnnnnnnnnnnnnnnnnnnnnnnnnnnnnnnnnnnnnnnnnnnnnnnnnnnnnnnnnnnnnnnnnnnnnnnnnnnnnnnnnnnnnnnnnnnnnnnnnnnnnnnnnnnnnnnnnnnnnnnnnnnnnnnnnnnnnnnnnnnnnnnnnnnnnnnnnnnnnnnnnnnnnnnnnnnnnnnnnnnnnnnnnnnnnnnnnnnnnnnnnnnnnnnnnnnnnnnnnnnnnnnnnnnnnnnnnnnnnnnnnnnnnnnnnnnnnnnnnnnnnnnnnnnnnnnnnnnnnnnnnnnnnnnnnnnnnnnnnnnnnnnnnnnnnnnnnnnnnnnnnnnnnnnnnnnnnnnnnnnnnnnnnnnnnnnnnnnnnnnnnnnnnnnnnnnnnnnnnnnnnnnnnnnnnnnnnnnnnnnnnnnnnnnnnnnnnnnnnnnnnnnnnnnnnnnnnnnnnnnnnnnnnnnnnnnnnnnnnnnnnnnnnnnnnnnnnnnnnnnnnnnnnnnnnnnnnnnnnnnnnnnnnnnnnnnnnnnnnnnnnnnnnnnnnnnnnnnnnnnnnnnnnnnnnnnnnnnnnnnnnnnnnnnnnnnnnnnnnnnnnnnnnnnnnnnnnnnnnnnnnnnnnnnnnnnnnnnnnnnnnnnnnnnnnnnnnnnnnnnnnnnnnnnnnnnnnnnnnnnnnnnnnnnnnnnnnnnnnnnnnnnnnnnnnnnnnnnnnnnnnnnnnnnnnnnnnnnnnnnnnnnnnnnnnnnnnnnnnnnnnnnnnnnnnnnnnnnnnnnnnnnnnnnnnnnnnnnnnnnnnnnnnnnnnnnnnnnnnnnnnnnnnnnnnnnnnnnnnnnnnnnnnnnnnnnnnnnnnnnnnnnnnnnnnnnnnnnnnnnnnnnnnnnnnnnnnnnnnnnnnnnnnnnnnnnnnnnnnnnnnnnnnnnnnnnnnnnnnnnnnnnnnnnnnnnnnnnnnnnnnnnnnnnnnnnnnnnnnnnnnnnnnnnnnnnnnnnnnnnnnnnnnnnnnnnnnnnnnnnnnnnnnnnnnnnnnnnnnnnnnnnnnnnnnnnnnnnnnnnnnnnnnnnnnnnnnnnnnnnnnnnnnnnnnnnnnnnnnnnnnnnnnnnnnnnnnnnnnnnnnnnnnnnnnnnnnnnnnnnnnnnnnnnnnnnnnnnnnnnnnnnnnnnnnnnnnnnnnnnnnnnnnnnnnnnnnnnnnnnnnnnnnnnnnnnnnnnnnnnnnnnnnnnnnnnnnnnnnnnnnnnnnnnnnnnnnnnnnnnnnnnnnnnnnnnnnnnnnnnnnnnnnnnnnnnnnnnnnnnnnnnnnnnnnnnnnnnnnnnnnnnnnnnnnnnnnnnnnnnnnnnnnnnnnnnnnnnnnnnnnnnnnnnnnnnnnnnnnnnnnnnnnnnnnnnnnnnnnnnnnnnnnnnnnnnnnnnnnnnnnnnnnnnnnnnnnnnnnnnnnnnnnnnnnnnnnnnnnnnnnnnnnnnnnnnnnnnnnnnnnnnnnnnnnnnnnnnnnnnnnnnnnnnnnnnnnnnnnnnnnnnnnnnnnnnnnnnnnnnnnnnnnnnnnnnnnnnnnnnnnnnnnnnnnnnnnnnnnnnnnnnnnnnnnnnnnnnnnnnnnnnnnnnnnnnnnnnnnnnnnnnnnnnnnnnnnnnnnnnnnnnnnnnnnnnnnnnnnnnnnnnnnnnnnnnnnnnnnnnnnnnnnnnnnnnnnnnnnnnnnnnnnnnnnnnnnnnnnnnnnnnnnnnnnnnnnnnnnnnnnnnnnnnnnnnnnnnnnnnnnnnnnnnnnnnnnnnnnnnnnnnnnnnnnnnnnnnnnnnnnnnnnnnnnnnnnnnnnnnnnnnnnnnnnnnnnnnnnnnnnnnnnnnnnnnnnnnnnnnnnnnnnnnnnnnnnnnnnnnnnnnnnnnnnnnnnnnnnnnnnnnnnnnnnnnnnnnnnnnnnnnnnnnnnnnnnnnnnnnnnnnnnnnnnnnnnnnnnnnnnnnnnnnnnnnnnnnnnnnnnnnnnnnnnnnnnnnnnnnnnnnnnnnnnnnnnnnnnnnnnnnnnnnnnnnnnnnnnnnnnnnnnnnnnnnnnnnnnnnnnnnnnnnnnnnnnnnnnnnnnnnnnnnnnnnnnnnnnnnnnnnnnnnnnnnnnnnnnnnnnnnnnnnnnnnnnnnnnnnnnnnnnnnnnnnnnnnnnnnnnnnnnnnnnnnnnnnnnnnnnnnnnnnnnnnnnnnnnnnnnnnnnnnnnnnnnnnnnnnnnnnnnnnnnnnnnnnnnnnnnnnnnnnnnnnnnnnnnnnnnnnnnnnnnnnnnnnnnnnnnnnnnnnnnnnnnnnnnnnnnnnnnnnnnnnnnnnnnnnnnnnnnnnnnnnnnnnnnnnnnnnnnnnnnnnnnnnnnnnnnnnnnnnnnnnnnnnnnnnnnnnnnnnnnnnnnnnnnnnnnnnnnnnnnnnnnnnnnnnnnnnnnnnnnnnnnnnnnnnnnnnnnnnnnnnnnnnnnnnnnnnnnnnnnnnnnnnnnnnnnnnnnnnnnnnnnnnnnnnnnnnnnnnnnnnnnnnnnnnnnnnnnnnnnnnnnnnnnnnnnnnnnnnnnnnnnnnnnnnnnnnnnnnnnnnnnnnnnnnnnnnnnnnnnnnnnnnnnnnnnnnnnnnnnnnnnnnnnnnnnnnnnnnnnnnnnnnnnnnnnnnnnnnnnnnnnnnnnnnnnnnnnnnnnnnnnnnnnnnnnnnnnnnnnnnnnnnnnnnnnnnnnnnnnnnnnnnnnnnnnnnnnnnnnnnnnnnnnnnnnnnnnnnnnnnnnnnnnnnnnnnnnnnnnnnnnnnnnnnnnnnnnnnnnnnnnnnnnnnnnnnnnnnnnnnnnnnnnnnnnnnnnnnnnnnnnnnnnnnnnnnnnnnnnnnnnnnnnnnnnnnnnnnnnnnnnnnnnnnnnnnnnnnnnnnnnnnnnnnnnnnnnnnnnnnnnnnnnnnnnnnnnnnnnnnnnnnnnnnnnnnnnnnnnnnnnnnnnnnnnnnnnnnnnnnnnnnnnnnnnnnnnnnnnnnnnnnnnnnnnnnnnnnnnnnnnnnnnnnnnnnnnnnnnnnnnnnnnnnnnnnnnnnnnnnnnnnnnnnnnnnnnnnnnnnnnnnnnnnnnnnnnnnnnnnnnnnnnnnnnnnnnnnnnnnnnnnnnnnnnnnnnnnnnnnnnnnnnnnnnnnnnnnnnnnnnnnnnnnnnnnnnnnnnnnnnnnnnnnnnnnnnnnnnnnnnnnnnnnnnnnnnnnnnnnnnnnnnnnnnnnnnnnnnnnnnnnnnnnnnnnnnnnnnnnnnnnnnnnnnnnnnnnnnnnnnnnnnnnnnnnnnnnnnnnnnnnnnnnnnnnnnnnnnnnnnnnnnnnnnnnnnnnnnnnnnnnnnnnnnnnnnnnnnnnnnnnnnnnnnnnnnnnnnnnnnnnnnnnnnnnnnnnnnnnnnnnnnnnnnnnnnnnnnnnnnnnnnnnnnnnnnnnnnnnnnnnnnnnnnnnnnnnnnnnnnnnnnnnnnnnnnnnnnnnnnnnnnnnnnnnnnnnnnnnnnnnnnnnnnnnnnnnnnnnnnnnnnnnnnnnnnnnnnnnnnnnnnnnnnnnnnnnnnnnnnnnnnnnnnnnnnnnnnnnnnnnnnnnnnnnnnnnnnnnnnnnnnnnnnnnnnnnnnnnnnnnnnnnnnnnnnnnnnnnnnnnnnnnnnnnnnnnnnnnnnnnnnnnnnnnnnnnnnnnnnnnnnnnnnnnnnnnnnnnnnnnnnnnnnnnnnnnnnnnnnnnnnnnnnnnnnnnnnnnnnnnnnnnnnnnnnnnnnnnnnnnnnnnnnnnnnnnnnnnnnnnnnnnnnnnnnnnnnnnnnnnnnnnnnnnnnnnnnnnnnnnnnnnnnnnnnnnnnnnnnnnnnnnnnnnnnnnnnnnnnnnnnnnnnnnnnnnnnnnnnnnnnnnnnnnnnnnnnnnnnnnnnnnnnnnnnnnnnnnnnnnnnnnnnnnnnnnnnnnnnnnnnnnnnnnnnnnnnnnnnnnnnnnnnnnnnnnnnnnnnnnnnnnnnnnnnnnnnnnnnnnnnnnnnnnnnnnnnnnnnnnnnnnnnnnnnnnnnnnnnnnnnnnnnnnnnnnnnnnnnnnnnnnnnnnnnnnnnnnnnnnnnnnnnnnnnnnnnnnnnnnnnnnnnnnnnnnnnnnnnnnnnnnnnnnnnnnnnnnnnnnnnnnnnnnnnnnnnnnnnnnnnnnnnnnnnnnnnnnnnnnnnnnnnnnnnnnnnnnnnnnnnnnnnnnnnnnnnnnnnnnnnnnnnnnnnnnnnnnnnnnnnnnnnnnnnnnnnnnnnnnnnnnnnnnnnnnnnnnnnnnnnnnnnnnnnnnnnnnnnnnnnnnnnnnnnnnnnnnnnnnnnnnnnnnnnnnnnnnnnnnnnnnnnnnnnnnnnnnnnnnnnnnnnnnnnnnnnnnnnnnnnnnnnnnnnnnnnnnnnnnnnnnnnnnnnnnnnnnnnnnnnnnnnnnnnnnnnnnnnnnnnnnnnnnnnnnnnnnnnnnnnnnnnnnnnnnnnnnnnnnnnnnnnnnnnnnnnnnnnnnnnnnnnnnnnnnnnnnnnnnnnnnnnnnnnnnnnnnnnnnnnnnnnnnnnnnnnnnnnnnnnnnnnnnnnnnnnnnnnnnnnnnnnnnnnnnnnnnnnnnnnnnnnnnnnnnnnnnnnnnnnnnnnnnnnnnnnnnnnnnnnnnnnnnnnnnnnnnnnnnnnnnnnnnnnnnnnnnnnnnnnnnnnnnnnnnnnnnnnnnnnnnnnnnnnnnnnnnnnnnnnnnnnnnnnnnnnnnnnnnnnnnnnnnnnnnnnnnnnnnnnnnnnnnnnnnnnnnnnnnnnnnnnnnnnnnnnnnnnnnnnnnnnnnnnnnnnnnnnnnnnnnnnnnnnnnnnnnnnnnnnnnnnnnnnnnnnnnnnnnnnnnnnnnnnnnnnnnnnnnnnnnnnnnnnnnnnnnnnnnnnnnnnnnnnnnnnnnnnnnnnnnnnnnnnnnnnnnnnnnnnnnnnnnnnnnnnnnnnnnnnnnnnnnnnnnnnnnnnnnnnnnnnnnnnnnnnnnnnnnnnnnnnnnnnnnnnnnnnnnnnnnnnnnnnnnnnnnnnnnnnnnnnnnnnnnnnnnnnnnnnnnnnnnnnnnnnnnnnnnnnnnnnnnnnnnnnnnnnnnnnnnnnnnnnnnnnnnnnnnnnnnnnnnnnnnnnnnnnnnnnnnnnnnnnnnnnnnnnnnnnnnnnnnnnnnnnnnnnnnnnnnnnnnnnnnnnnnnnnnnnnnnnnnnnnnnnnnnnnnnnnnnnnnnnnnnnnnnnnnnnnnnnnnnnnnnnnnnnnnnnnnnnnnnnnnnnnnnnnnnnnnnnnnnnnnnnnnnnnnnnnnnnnnnnnnnnnnnnnnnnnnnnnnnnnnnnnnnnnnnnnnnnnnnnnnnnnnnnnnnnnnnnnnnnnnnnnnnnnnnnnnnnnnnnnnnnnnnnnnnnnnnnnnnnnnnnnnnnnnnnnnnnnnnnnnnnnnnnnnnnnnnnnnnnnnnnnnnnnnnnnnnnnnnnnnnnnnnnnnnnnnnnnnnnnnnnnnnnnnnnnnnnnnnnnnnnnnnnnnnnnnnnnnnnnnnnnnnnnnnnnnnnnnnnnnnnnnnnnnnnnnnnnnnnnnnnnnnnnnnnnnnnnnnnnnnnnnnnnnnnnnnnnnnnnnnnnnnnnnnnnnnnnnnnnnnnnnnnnnnnnnnnnnnnnnnnnnnnnnnnnnnnnnnnnnnnnnnnnnnnnnnnnnnnnnnnnnnnnnnnnnnnnnnnnnnnnnnnnnnnnnnnnnnnnnnnnnnnnnnnnnnnnnnnnnnnnnnnnnnnnnnnnnnnnnnnnnnnnnnnnnnnnnnnnnnnnnnnnnnnnnnnnnnnnnnnnnnnnnnnnnnnnnnnnnnnnnnnnnnnnnnnnnnnnnnnnnnnnnnnnnnnnnnnnnnnnnnnnnnnnnnnnnnnnnnnnnnnnnnnnnnnnnnnnnnnnnnnnnnnnnnnnnnnnnnnnnnnnnnnnnnnnnnnnnnnnnnnnnnnnnnnnnnnnnnnnnnnnnnnnnnnnnnnnnnnnnnnnnnnnnnnnnnnnnnnnnnnnnnnnnnnnnnnnnnnnnnnnnnnnnnnnnnnnnnnnnnnnnnnnnnnnnnnnnnnnnnnnnnnnnnnnnnnnnnnnnnnnnnnnnnnnnnnnnnnnnnnnnnnnnnnnnnnnnnnnnnnnnnnnnnnnnnnnnnnnnnnnnnnnnnnnnnnnnnnnnnnnnnnnnnnnnnnnnnnnnnnnnnnnnnnnnnnnnnnnnnnnnnnnnnnnnnnnnnnnnnnnnnnnnnnnnnnnnnnnnnnnnnnnnnnnnnnnnnnnnnnnnnnnnnnnnnnnnnnnnnnnnnnnnnnnnnnnnnnnnnnnnnnnnnnnnnnnnnnnnnnnnnnnnnnnnnnnnnnnnnnnnnnnnnnnnnnnnnnnnnnnnnnnnnnnnnnnnnnnnnnnnnnnnnnnnnnnnnnnnnnnnnnnnnnnnnnnnnnnnnnnnnnnnnnnnnnnnnnnnnnnnnnnnnnnnnnnnnnnnnnnnnnnnnnnnnnnnnnnnnnnnnnnnnnnnnnnnnnnnnnnnnnnnnnnnnnnnnnnnnnnnnnnnnnnnnnnnnnnnnnnnnnnnnnnnnnnnnnnnnnnnnnnnnnnnnnnnnnnnnnnnnnnnnnnnnnnnnnnnnnnnnnnnnnnnnnnnnnnnnnnnnnnnnnnnnnnnnnnnnnnnnnnnnnnnnnnnnnnnnnnnnnnnnnnnnnnnnnnnnnnnnnnnnnnnnnnnnnnnnnnnnnnnnnnnnnnnnnnnnnnnnnnnnnnnnnnnnnnnnnnnnnnnnnnnnnnnnnnnnnnnnnnnnnnnnnnnnnnnnnnnnnnnnnnnnnnnnnnnnnnnnnnnnnnnnnnnnnnnnnnnnnnnnnnnnnnnnnnnnnnnnnnnnnnnnnnnnnnnnnnnnnnnnnnnnnnnnnnnnnnnnnnnnnnnnnnnnnnnnnnnnnnnnnnnnnnnnnnnnnnnnnnnnnnnnnnnnnnnnnnnnnnnnnnnnnnnnnnnnnnnnnnnnnnnnnnnnnnnnnnnnnnnnnnnnnnnnnnnnnnnnnnnnnnnnnnnnnnnnnnnnnnnnnnnnnnnnnnnnnnnnnnnnnnnnnnnnnnnnnnnnnnnnnnnnnnnnnnnnnnnnnnnnnnnnnnnnnnnnnnnnnnnnnnnnnnnnnnnnnnnnnnnnnnnnnnnnnnnnnnnnnnnnnnnnnnnnnnnnnnnnnnnnnnnnnnnnnnnnnnnnnnnnnnnnnnnnnnnnnnnnnnnnnnnnnnnnnnnnnnnnnnnnnnnnnnnnnnnnnnnnnnnnnnnnnnnnnnnnnnnnnnnnnnnnnnnnnnnnnnnnnnnnnnnnnnnnnnnnnnnnnnnnnnnnnnnnnnnnnnnnnnnnnnnnnnnnnnnnnnnnnnnnnnnnnnnnnnnnnnnnnnnnnnnnnnnnnnnnnnnnnnnnnnnnnnnnnnnnnnnnnnnnnnnnnnnnnnnnnnnnnnnnnnnnnnnnnnnnnnnnnnnnnnnnnnnnnnnnnnnnnnnnnnnnnnnnnnnnnnnnnnnnnnnnnnnnnnnnnnnnnnnnnnnnnnnnnnnn

SEQ ID NO: 91 - DNA, 32746 bp, Homo sapiens
  source 1..32746: mol_type = other DNA
gattatatataagaggacccaggagttacatcaggactcaggaagagatagacccataatgatgctgcctcaaaactcgtggcatattggtaaggttttgcttttattttgctctgccatttgggagatggtgggtatactaagaatatgtgtaacaacaaacagatataaatattatgtagtaaggtaaaaagaaaacaggacatgagaaatataaaaaaattgaaagttttgtggaacttagagtagcagcaatattggaggcaaaactgaaatccaagaaaggaggaaaacattaataaagtaaacagaaaatgtattataaagactggagattagaagtcacacaaggatatgaagttgtggaaatagaaagaagggataaattagaaacttattgttatcaagtgccaggtactacagtaaatgctttaggtcatctcaatttaattcacacatgtaacctattttatagatattattgtctccattggtagatggaaaatgaagacttataaggactaactgacttatgtaaggtcatgtagtagaatctcaagtgtaatttaaattcaggaccagctaagtctgagcccttgatctttctgctataaattttaataaagcaaataaataagaagacattatgataaaaaacaaagaacaagtctttgatggaccctaaagagtaaggactaagaaaggaatacatggctaagaagtctttcacagcacatctgaaattagtagtaacctttgcacttgcacttcatagacatttcgtggaaataaagaatcacgaagggaggtttttgctgtatttgggacttataactcctaaataggattgaggcttttgaaaatgcagtgctactcctgttggcattgtgtctctgtgccattcctcagtgcaattactacaagtcaacttaatattttgtaactgttttgcttatgactaaagaccagcacatttctagaaaaccagcagaagttctgatatttttcaaagcctcctttttgaaaaagggtttctacagtttgagaagcttggctgccttctatctagcaaggctcatcttaatgaattacagttcttcataattcatgtgtgttacttaaaagataatattatttaactttcaacatgctgtctgccatgtatctaattagaaaaggaatgggaaagatgaaggtcttgaattggtgagatggtattagatatatagaaggtcacaagttctggcaattatactttaattctccttctcaagaatttcctactgcactatttgttcacgttcatcagatcttgattgtgctggtgtcagagcttactattcttttttctttatagttcatctttagctctaaccattcttacaaatgggcactcagagtttcctggaaggatttaggaagatgaaatggcctcctaggataatcctacacatgaggtttgatggaactaaatattcttattaggaacaaaagaaataagagaaaaaagaagaccaacttaaagtgttttggacaagatggaaaagaaggaaattgggacactaattgcccattccacacttatttctccctgtttcgttctatagggagggttttctcttgatttgggtacattttccaagaatgatggatgtgactgatgataattgtaataataaagtctcctctatggttattactgactgttgccaaactcacttgggattacttcttagagaagtgcccgggatccattttagtttcaaagcatcatttgaaaaactaaagatgtccaccaaagcaggttgcgccttctgtctctgcttttgcgtagcccaagcagcatgggcctttccccgatgggtactgttccttctgtcctcttagggtttttgttttttgttgtctgggattacacatgctcagtttaactctgacttcatcttttccataagatactaatgaaaatactatttaagatagttctctaacagttacagctgttacatacccctcaagtaaacaggatgataaatattattttaaagtatttcttatacatttatttacccctatgaattaatcatcccatctgcttttaaaataatctttctataatgtaaattttatttattacactgattcaattctttatagtctccaaataactctcagaataaattctcaactccttcgcttgtgtattgctcctgcctatcttagttcattctttccccacacgtgtagcataaactttattagatgcagaactgagcatgactgaaaagacagggagaagtgaggaagtggcaagattctgtaggaataatagaatagtgaccctgaagaaaagtggatagctttggtaaataatcatgagctcaatcagcagttattatagtgacctccaaatgttgatttgcttgtacattccagtcacaagccactgagtggaatacaggcaagaacacttattcattcctctattcccataatgaagcacaagatcgggtacatatgtcatactcaataaaggagcaaatgaatgaacaaagtagggggataacgttaggaggaaaaacagtaaaaatgaggagagggtcaaagagttgagaagtaaaaattactcagtaacccaaaatgctaatcaattaccccaaacagccacaaaatatatttggacacagaatgcaatttttcaatgaatcacatgctaaaatatctgccctgttacaaaccacttggtgcctttccatcacaaacaggagctagtcctgtggcttttcctgggaaaaggactttcttgtgcggtatccttgacaggtggaagaataattcatcttactccttctattttattttggatttaagtcattgaggtcatctaacatttcttagaaagacatgaaattctaccctgctatattttgtttctccagattttggaagatgctgctgtcatcagaaccttttctctgctgtggtaacttgcatcctgctcctgaattcctgctttctcatcagcagttttagtgagttctgatggatgataacttttgggcttacaatcctctattctacctttcccctactcactaccctaagtgcatattttgagggaaatagaacatgtaaaaataatgttggaccttcaatagctataccctgtaaataaaggtgtccaaattatttttatgcatttcatattacatttttcgttgacatttttctccttcagataaagagaatttccaaatccggccgggcacagtggctcaggcctgtaatctcagcactttgggaggccaaggtggggagatcacctgaggtcaggagttcgagaccagcctggccaacacagtgaaaccacatctctattaaaaatacaaaaattagccgggtgtggtggtgtgcacctgtaaccccagctacttggggggctgaagtggaagaattgcttgaacccaggaagtggaggttgtagtgagccgagatcgtgcccctacactccagcctgggcgacagagcaagactccatctcaaaaaaaaaaaaaaagaaaaaagataaagatagtttccaaacgtaaaatgtctcactgaaaaaatatggatattgtatttttgcaaatagaaaaatcggttaataaaaacttacaagatacagaaatcaaagaattaaatacaattaaaaatatatatgtgttacacaccatggaatactatgcagccataaaaagatgaattcaagggccgggctgggcgcgggagctggccgggctgggcgcgccgcggtcccgcacccacttccgcttcccgtgcggcggtggggggatggcggcagggccggtgggcggcggcggctccaggtccctgcccgggcgcggcactgcgcagtccgccctccccgtcgcaggggcgctcctgagcttcgcggggccgcctccagggctgcctgcgcggagggccggccgcggccgacgcgagtgttaagtgtccgccctggccggctacccggagccaagagcaggcggcggagcctgagcgggacgtggccacgctggcgcggcgggtccaagcccgccattggtcggcttccgttacgccgctgatgtggagtagggcggagcgcggaacgcgaggagctgctggggtgtgtgtcgcagcgggttttcctcggcggtttgcggagctgctaggatggagcaggctgcggagggagcgagtgtgaccgcagcccctgtgtcagctgccgacagcactgaggagttggccgaagtcgaagaaggagttggagtagtgggcggggataatgacgcagccgcgagaggagcggaggcctttggcgacagtgaggaggacggagaggatgtgttcgaggtggagaagatcctggacataaagatcgaggggggtgaaattctttacaaagttcgctggaaaggctatacatcggatgacgatacctgggagcccgagactcacctggaggactgtaaagaagtgcttcttgaatttaggaagaaaattgcagagaacaaagccaaagcagtcaggaaggatattcagagactatccttaaataacgacatatttgaggcgaactctgatagcggtcagcaaagtaagacaaaagaagatacttccccaaagaagaaaaagaaaaaattaaggcagagagaggagaaaagcccagatgatctgaaaaagaaaaaagcaaaggccgggaagctaaaagacaagtccaaaccagacctggagagctccttggaaagtttagtttgatttaaggacaaagaaaagaatttctgaagccaaagaagaactaaaggagtccaaaaagcccaaaaaagatgaagtaaaagaaacaaaggaattaaagttaaaaagggtgaaataagagatttaaagacgaaaacaagagaagatcccaaagaaaatagaaaaacaaaaaaagaaaatttgtcgaatcccaggtggaatctgaatcaagtgtacttaatgattccccctttccggaggatgacaatgaagggctacattccgacagcagagaagagaaacaaaacactaaaagtgcaagagagagagcagggcaggacacagggctggagcatggctttgagaagcccctagacagtgccatgagtgctgaggaggataccgatgtcagaggcaggaggaaaaagaagaccccgagaaaggttgaggacactagagagagcaggaagctagagaacaagaacgcattcttagagaagaaaactgtgcctaaaaagcagaggaatcaagacagaggcaaaagtgctgcagagttagagaagcttatgcctatatctgtccaaacgccaaagggctggaggttgagcggggaagagagaggcctctggtccatggactcagccgaggaggtaagggccacgggaggcagcagaaaacccgtgttgagtggccaagacatttcacaagcaaggaaagggaaacagtcaagctatgagaaagtgtttatgaccatgggcggtcataaatgaagatcctccagctcttggacactgcagcttatctcttagtctctggtttgtttctcttagaatgattttgactagaaaattataggctaatttgtgagcaaaaatcaggatggtttttagaggtactcagatgatatatggagcattgtatactcaggtttatagcttcatcagcttattttattagcttttcacatcctgcttggtcatttcccctgttgtcttgagtataccactattaaataataggacacaaactacattaaccagtattttaatgcttataaaaatgtatttaatagagaatttgtcccattataaaaattatttttatatggctttgcaaaatggatatattttccaaattatgagagtatttatatatgcaatatttatcaagggctataaaaaacatcatttttttcatccattatttccagttttgggaatttattttaaggaaatcattttaaagaaggaaaagctgtgcatacatagttatttatggcagtattatcttcattagtgctacagcaaaatagaacaacttagaaaatgcagtggagaagaaaaaccctacataaatgtgaacacagtcatgtaaaaatatgtgtgtaatgtaagcaaaaatgaattttaaaaaagattatgcatgtaaaagtacaaggaccagaagggggaacatggagaagtaaaatagtcatgattggttaagactatgggtggaaaactttcttagaattttctttttttttttttataataataaaattcctaaaagagggttggaaaactggtgttgggttttgaatttgatattttgtgaattattatatggttgactgaggaagcaaaattcttttgtgtgaagaggatttaatgatcattgatcatgtaccacagtatacaagggtgattccctgaagccacaaacctgtattttccggttttcaaataaatatacagtgtcaaaaaaaaaaaaaaaaaggatgagttcatgccctttgtagggacatggatgaagctggaaaccatcattctgagcagactatcacaagggcagaaaaccaaacaccgcatgttctcactcgtaggtgggaattgaacaatgagatcacttggacacagggtggggaacatcacacatcagggcctgtcatggggtggggggagcagggagggatagcattaggagaaatacctaatgtaaatgataagttaatgggtgcagcacaccaacacggcacatgtatacatatgtaacaaacttgcacgttgtgcacatgtaccctagaacttaataaatataaaagtatattaataaaaataaaaataaaaataatattcattaataaaataaaagtaatactattaaaataaaaagtaatacttttaaatactatttaaatactatttaaaagtaaatacttttaaatactattaaaataaaaaagtaatactattaaaataaaaataaaagtaatactattaataaaaataaaagtataataaaaataataaataaaataaataaaaatatatatttgttaatatattaacatccagagaaaaacactattgtttaaaataccaatttgtggcattttttataataatgtttcaagaaaattatttcattatattttatatattggttattacctatatagttctttaacatttttattttatcacatatcacttatgataccttgttttattggctgtgtagttttctgtcatttggatatacccaaatagattttaataagaccttatgagtgattattgaagttatttaattgctttgtatttcagtaatttttcaaatatattacatttcatagatctgacacagaaattgtcatttttaaggtttttcattattttctatatttttcattagtgccaaatttgtagtttaaataaaattttattgttattaaagtggattcttttttttaaagagacggagtttcactctgtcagccaggttggagtgcagctacagatgtgtgccactatacccagctaattaaaaaaaattttttacaggtagggtctcactatgttgtccaggccgatctggaactcctggcctcaagcagtcctcccacctctgcctttcaaagtgttgaaattacagacatgagccatggcatctgggctaaattaacattttaaatgctgttgagatttaatcatggtattgaaatgattattttaattgaatgctttatttgtgcaattttcttatttctgtttaatcatagataatattactatatctttgtgtactccaaaatagtattggttcttgtccagttacaaatatttttgattaatgtatttgctttttaaaatgctttaaatttctcgctgtttaatgttatatttgattagacaaaaatggccattttataacatatatacaaatcattaagcataatgtaatggcacacataaatccatccctcaaccaggaaactggatttttatcaaccatttttttctacgtatgttttcctcttctcttccacctaccttccaaccccaccagagataatgtctatcctgaattgtgcatttctcactaccttactttttaataatacaatactttctaataatatgatagatatagatgcagaaataatgtattgtttagttttgcttattttaagctttataacatatcaaactgcatttagtgttctgggacttgcttttatctttcaatattatatttctaagcttcatctctgctgttgcaatggctataattatttaagttttcgttaagtaaaatatattatcttgtataaataaatattcccagtgaatttgtctattatcctgtcaatagttatttggatttttcattactattgtcaaatgttctgctataaatatgtctctggtgcagattcatgggagtttactacggtctataggtaggagtagaattagcaggttctgggatgtgcatgttttcaactttaccagataggatgaattctgctagcaatgtatatatattttcaaatatatgtatgaggatatgactcatatcctcactcatattttaaatattcagagttctaaatttttgccaatcaagagagtataaagctatatctttttatcttaattttcagtttcctaaagactaataagtttaggcatttctccatgtatttaatggtcatgccttttgttttcttctgtgaaatatctgttcaactcatttgcccattttgcttatttttctaaatatatatatttaaaaaatataatctagatactagtccatagtcataatatatgttgctaatatattcttcacatttgtgacttttcactttttatagagtgtattttgaagaatagaagttcttaatttatcaagttttctttaattttatcacaccttggtagaaatttggtatgtctaaaaattagtagaaattctaatgtacacgttgaaaaaaacaccttaatcagtatattgaaaaaatagaaatggcaaatatcaatcatattagaatatatctctgtgtgtgtgtgtatcaactacatttttaagagctttcattagacttaagagttatatgatatgagcacagccattagaatgcccctcacacacatttcaactaaaaagaaaaatgttcatatagaaagaaataggaaacagtagcagcactaggaactgagaaagagaaatataaggaaaccaaaatttctagttatgagtatagtataggcaagaccacactgaatgaagacttatggttaactcacaatccactttcagaaagaatattgttatcttttgtgaaaagtgtattctcactaagccattgtgtactgaaactcagaactgggaagccttttctattgtactctctctccctgtttctctctctgtctctgtctgtctctctctctttctgtctcttcctctctccttctttttctttctcttttttcatctttttcttcctccttattgcttctctttgtccctttggctcacttgctcttcttactaacacaccctctcatcatcatcatatgcacagaattcaccataaagtttcacgttgaaaactcatggttgctttaaaattttctcccttcacattggttttccatttaaatttttattgtctgttcctcaaaattttggcttacaagtagatttgggttaatattaacttcacttgttttaagttgattttttcacctaggattttttaaaatccattttacttatttcaaatttttaagatgggaatatgagtagccaatggtcatctgaaggactgccctttctgaagtggttgtctacctgtgattcacatagctgttgattagagaaggtggactagcatattacaatcatggacgactaggtcttctcctcctgcaaggcctattgttgaatgtatttaaaacatctgaggatataaatactcaaaagtatttaatgctgtagattttattgagtagaaaattattatgtcaaccttacaagatgttttcaattattaagtatataaaacatctccttcaaaaatgtgaggtggactcctcagatacagattattttgaaactgactagccaagggactttctttcattctgcgtgcacaacagcaaaccttaccttttctgtggtttatattggtgggaattgcatagaaagaaaaaattctttcccttcttttaattttcacattacaatgcaaagcaaaactatgctgcaatgtggtctctagttccctatcatgaaaaattaaagcttctcacttcaaattttctcatttttattttctctctactataagttctaataacaacatttaaactaaatgatcatcatccatctcacctacttatattatttctgccttctaatctttgccatctctaatgtatgtttctgtctttcttgcagatggaacagatttggagttgaggctggtcaatggagacggtccctgctctgggacagtggaggtgaaattccagggacagtgggggactgtgtgtgatgatgggtggaacactactgcctcaactgtcgtgtgcaaacagcttggatgtccattttctttcgccatgtttcgttttggacaagccgtgactagacatggaaaaatttggcttgatgatgtttcctgttatggaaatgagtcagctctctgggaatgtcaacaccgggaatggggaagccataactgttatcatggagaagatgttggtgtgaactgttatggtaagagtctaactagagtaggaaggcaaggtaagacctaccctcaggaatcatctgctggaaggtaggggtttctattatgactttaatagtgtccctctgggaggtgtaggaaatattttatatattctacccttcccttatttccaaagtaatgtctaattgcttttctttttataactataactgagtttagaaagaaatggagagagaaagagagagacagagagagaatgcattacagttaccaatgtaatatctttatcataactataattgagtttagaaagaaatgaagaagtttgggagcagggttagctttgatttaagtgccttttttcatgtaccaggtacactaacagaacaaatattttctgaaaaatgaggtataaaattaaagcaaaatgataaagaatatcatgctaatgattgattttttcacctaggattttttttgtttgtgtatttgtgtttagaaaaaagcctcacatacccctcctataagtattttcagttatttttttttaatttttggtaacttcattcataacagggctgtcttctacgtatccttttgattttatttcaggctcaaagttgaatcagtttttcatatgtctgcttgtctttctcgtaggtgaagccaatctgggtttgaggctagtggatggaaacaactcctgttcagggagagtggaggtgaaattccaagaaaggtggggaactatatgtgatgatgggtggaacttgaatactgctgccgtggtgtgcaggcaactaggatgtccatcttcttttatttcttctggagttgttaatagccctgctgtattgcgccccatttggctggatgacattttatgccaggggaatgagttggcactctggaattgcagacatcgtggatggggaaatcatgactgcagtcacaatgaggatgtcacattaacttgttatggtaagaacccaagacatcatgtagaagaaaggaacaatttgtttagaaacagtatgtatggaaagaaaaaggtcaatcattctctggagaagaattttctctggttataacacatttttgttaccctgaaattgctccattctggagttttcctaaacactcttcctaaaactgctcttcctaacaaatctaaagcacattttgagttttaatatttctgatcactcagcagtattccataggccgatcaaatcttttttctaaaaacctttttcaaataacttcttgacacaatatcatatttttcccttctttctctgaggtcactcattcttagtctagtttccccactttactaattctttccagctaccaaaacttagatttcatcaggactaagtccctaatctcacgctgccctctttcctttggcaatttactttcctagcttcaactaaaattccacaccagacacctcctaagagctctagatacatatatccgtgtgctacgaagggtccaaaatgtacccgaaccttaatgtttccaaaagtaagcttcttatacctgtttactcatcatctaatcttcctaagctcagtaaatagcattattacccacttcattattcaagtcagaaataagggatcacttttttttttatactttaagttctagggtacaagtgcacaacatgcaggtttgttacataggtatacatgtgccatgttggtttgctgcacccatcaactcgtcatatgcataggtatttctcctaatgttatccctcccccagccccccaccccccaacgggccctggtgtgtgatgttccctgccctgtgtctatgcgttctcgttgttcaactaggggatcacttttaagtccttcatttctctgttagcacactatattcattacatcaccagatggaaatgattatactatttaaatattttaaaatgtgccttcttcatcttttttttttggatggagtctcattctgtcacccaggctgttgcccaggctggagtgtagtggcatgatctcggctcactgcaacctccacctcctgggttcgagctattcttctgcctcagcttcctgagtatctggaactgcaggcacccgcaaccacgcccggctacagtatttttaatagaggtggtgtttcaccatattggccaggctggtcttgatctcctgatcttgtgatctgcccgcctcagcctcccaaagtgcagggattacagccgtgagccaccgcacccggctgaagaatgcggcttcttttcaccatttccattactatcagtataaaccaagcaacaatcacttaccacctctaagaagtcactacggaaagcaacgacctctccccagtgacctctctgtagtcatttcaaacaccttcaaatccattttccacagtgcagctgaagtgatgttttttgcagcacgtttagttgactttatagtaatataggaaatttcttattatctacgagatgttgctactctctcctcttttctgcttgatctctgctgcgttctttcatgtacgtgatattttccaacccacctcagaacattgagacattctgttcctctaggtagaaaaaaactcttcctccttcatttctcttggctaaatttggttatccattaacatcatcttaaagagcatttcctcagggaagccttccccaaatataaacatatcctattcatatgctatgatggcactctgtcctcattcttcatgtgttaataacattttagttatttaatttcccgccttctctcaaatatgctaataccagagggatgggaattattttaaacttatgtattcctaacaattagcacagttttcagcaattttaggtgatctatacatgtttatgttttaactggttaatttattagaaactcggagaggtggaagaggcatagaaaatatgataaatctttgttcttattcttaaaatccaattcctatcatttttttatgtttggaatttcaggaagatacaaagttctttaatttctaagtgatctgtctcttactggctgacagagttcttacaacaagtgaataatctgaaagaacttaaagtcttggagtagttcaaagtcaggaagagtacttagaaccttctgtaaagtcttctaatttcttctattttttcttctacaaacatctacaggtttgtaaactccaataaatgttttgaaataaagatacaaattagtatcagattatttaataggatgactcacttaatgtaagtctttagaattggctttactgaaatctgaggtgttaaaagcagtttttcaataaacagtatttcaaaaggagaaacccaattctcctgaagtaagaaaggacttggtggcctccaagggtagagaaaacactggagtagctataacttaatgaggaaggttgagtgatagttgatgaagctgagggctggtactcagactggggagctatggcaagagttttagactttattttaataggcaagggtattctttgaagggttttatgcagataattaccatgataaaatttgattattaaaatatcatgtggactaactgaatgaagaatagcttttgagagccaagcttggatgcagagacagaagttaagaagaccctgaaggaggtcaggtaagacatgatagtggtttgactagggctaaaatagttaagatagagataagtggatggattggagttatatttacacagcagctttgatagtaccaagagaagtgaaaaaagaggtgagaaagaaagaagggtaagaatttttcccaaatttcttatgggtacagccttgtagctagtagtaccatttaaaagaaagatgctaagagtgttggaacatttttgagggacttggaagatatgtaggtggatattcccactggaaattctcagaagaaatgtatgaattagagatataaatttagtatcagcatatcagtagtgcttgaggcctttgcaattgataaaatcttgggagattttagaggaatctggacggatatgtttttgtggtttacaaattttctataaagacaaatccaaggaaattcttaaaacatttttgattatttccagtaatgcctactgaggtggacattttatttttatttttaaatgtcataatagcccctaagaattctattatttaacctaaaatatgttttaattgttacatggtttgaaaaactttatgacgaaatgaggaagataaaagtattcagttacaatttcaaatttgagataataccctttattttacatagttttttcttgtttattaaactttgctacacatatcttctgattatgttcaacaattttggcacataacacaatattgtatatataattacatttttaaaagtcagtttttgtagaagaaactcggattaaataatttgttatttatatttttactttggtattgatgcctatagactagtttgattggattacttaaatctgcaaacataatttatttatttcttccagctacctgggatctgtgaaaggaacatcagcagcagaattagcaaaagttagttttatattttcactatgtttaagtaaccacaaatgtccccaaaagtgcaaaatagagtatcaaattcttgccaaaattacagccagttgaaagcaagtagtaatgatgagcatggtttataggtatagaaacaaaagagaacaaagggaagtcaagtctaggtttgatacagtacagctgaatgggagaatgaagaagtgaggaacggggctttagtccagaagctggtaaatcatatcaaaatactggcttacagtgggagaatactactctgagtggagaaaggaactaaagagataagtgataagtgacaaagaggtgatttttctagggctttttcttgttgtgtactagacacaatgactgattctatgaaaaataagaaaaaagtatgtgttacatattttatcctcaaggaactagtaatctactgggcaaacgatatgaatacatgccatctaaagaacactgaaagtgaatgtatatttcatactaaatagattccattgacttaaaaaaattttttttatcagtacaattgactatgttatgtagctaaataaaatatattccctaattttactccgtattttagtttctggatgatagttaaaaccataaaggggatatcttggcaatcaaaacagctaggattttatagttttatttaaagttgtttggcttcagttacagatttttcagttatagaaacccagttttgccaagggcaaccagaaattatctgattcagcaggatttatctgttactaaatttataatagaatgacatataaacaaagcttcaaattattgttttgcaattagcaatataactaccaagtaggccagaatgtttttgaaaattggtcagaatatacactcttcataggaaatttattatataattgtataatgtgtttgatgagacttaactaagagcaaaagaagcaagggaagtaagttataattaatcattgaccagtaccattaaatacagacaatctgaaacctctataatttggaaggatacctacatgaggggaatggattgttaggttcactgaacaagaatcacatttgcaggtatgacattgtcaaattcttgctatctgacctgcctttatcattttattaaagcccttaaatgagtttgttggacatgtaaaaagctgtacgtatttaatatacacaacctgatgagtttgagaaaaactgtaaacccatgagcccatcgccaccatcaaggccataagaatatgcatcacctcccaaagtttcttcccactcattttattattaattttttgatggtaagaacatttaacatagtatctaccttcgtagctgcttttaagcatgcaatacagtacctgtaggtcttttgaggtagaatgaacattttaacaatattaattattttaatccataaacatgggatatctttccatgatttttatcaatgacttctggttttcagaatctactgggcaaacgatatgaagacatgccatctaaagaacattgaaagtgaatatatatttgatgccctttaaaagaagctatattctgctactttagatggaatgttacatatatgtctgttaggttcctttagtctatagtgttgttcaagtccgctatttccttattgattttctgtttgaattatctgtccatttttgaaagtggagtattaaaatccctactattacgtattactatttctccctttcaatctcttaatattcgctttatatgtttaggtgctttgacaggggctcatatatattttttcttgttatatcctcttgatgaattaacccctttatcattatataatggacttctttgtttctttttacaattttggacttaaatctgttttgtcagatataagcacaggtgctctagcttacttttggttgccatttacatgaaatacatttttccatctctattttcagcctatgtgtgtcctaaaactaaagaagtgagtcccttgtaagcagcatatatttggaccatgttttttcttaatccattcaaccactctgtctatttatttattttttactttaggttctggtatacatgtacagaacatgcaagtttgttacatgggtagacatgtgccagggcggtttgctgcacctatcaacctggttttgggggaacaggtggtatttggttacatgaataagttctttagtagtgatttctcagattttggtgcacccatcacctgagcagtgtacactgtatccaatgtgtagtttttatcccttacccacctcccaccctttctcccaagtccccaaagtcctttttattatttatttatttatttatttttactttaagttctgggatatatgtgctgaacatgcagatttgttacatagatatacatgtgccatggtgattggctgacctatcaacctgtcatctaggttttaagccccacatgcattaggtattcgtcctaatgctctccctccccttgccccccattcccagacatgcccaagtgtctgatgttcccctctgtgcgttcatctgttctcattgttcaactcccacttatgagtgagaacatgtggtgtttgattttctgttcttgtgttaatttgctgagaatgatggtttccagcttcatccatgtccctgcaaagaacatgaactcattcttttttatggctgcatagtattccatggtgtatatgtgccacgtttcctttatccagtctatcattgatgggcatttgggttggttccaagtctttgcttttgtaaatagtactgcaataaacatatgtgtgcatatgtttttataatagaatgatttataatctttgggtatttacccagtaatgggattgatgggtcaaatggtatttctagttctaaacccttgaggaatcaccacagtcttccacaatggttgaactaatttacatctccacatcctcgccagcatctgttgtttccagagtttttaatgattgccattctaactggtgtgagatgtatctcattgtggttttggtttgcatttctctaatgaccagtgatgatgagctttttttcaaatgtttgttgaagacatttatgtggccaacataatgtctgttcacatcctttgcccactttttgatggggttgttttttttcttgtaaacttgcttaagttccttatagattctggatattagccctttgtcagatggacagactgcaaaaattttctcccattctgtaggttgcctgttcactctgttcacttcttttgcagagcagaacctctgtagtttaattaaatcctatttgtcaattttggcttttgttgccattgcttttggtgttttagtcataaagtctttgcccgtgcctatatcctgaatggtattgcctaggttttcttctagggtttgtatgattttaggttttacatttaagtctttaatccatcttgagttaatttttgtataaagtgtaaggaagggttccagtttcagttttctgcatatggctagccagttttcccagcatcatttgttaaacagggaatcctttccccattgcttgtttttgtcatgtttatcaaggatcagatggttgtagatgtgttgtgttctttctgaggcctctgttctattccattggtctatatttctgttttggcaccagtaccatgctggtttgtttactaccttgtagtgtagttttgaagttaggtagcatgatgccttcagctttgttctttttgcttagaattgtcttggctatatgggctcttttttggttccatatgaattttaacgtagttttttctagttctgtaaagaaagtcaatggtagcttgataggaatggcattgaatctataaattactttgggcagtatggccattttcacagtattgaatctttttatccatgagcattgaatgtttttccatttgtttgtgtcctgtctgatttctttgagcagcagtttgtagttctccttgaagaggtccttcatgtcccttgtaagttgtattcctaggtattttattatttttgtagcaattgtgcatgggagttcactcatgatttggctctctgtttgtctattattggtgtataggaatgcttgtgatttttgcacattgattttgtatgctgagactgctgaagttgcttatcagcttaaggagtttttggactgatacgatggggttttctaaatatacaatcatgtcatctgcaaacaaagaccatttgacttcctctcttcctatttgaataccctttatttctttctcttgcctgattgccctggccagaacttccaacactatgttgaataggagtggtgagagagggcatccttgtcttgtgctggttttcaaaggggatgcttccagcttttgcccattcagtatgatattggctatgggtttgtcataaatagctcttattattttgagatgtcttccatcaatacctagtttattgagagttttttttttttttaccatgaagggatgttgaattttattgaagaccttttctgcatctattgagatactaatgtggtttctgtcactggttctgtttatgtgatggattacgtttattgatttgtgtatgttgaaccagcctggcatcccagggatgaagccgatttgatcgtggtggataagctttgatgtgctgctggattcagtttgccagtattttattgaggatttttgcattgatgttcatcagggatattgacctgaaatttccttttttgtcatgtctctcccaggttttggaatcaggataaggctggcctcataaaattgagttcgggaggagtccctttttttctattgtttgtaatagtttcagaaggaatggtaccaaatcctctttgtacctctggcagagttcggctgtgaatccatctggtcctgggcttttttgggttggtaagctattaattagggcctcattttcagaacttgttattggtctattcagggattcaacttcttcctggtttagtcttgggagggggtatgtgtccaggaatttatccaaatattttaggttttctagcttatttgtgtagaggtggatatagtgttctctgacggtagtttgtatttctgtgggatcagtggtgatatcccctttatcattttttattgtgtctatatgattcttctctcttttctttcttattagtctggctagtggtttatctatattgttaatcttttcaaaaaaccagctcctgggttgattgtttttttgaaggtttttttctgtctctgtctctttcagttttgctcttatcttagttatttcttgacttttgctagcttctaaatttgtatgctctccttctctagttcttttaattgtgatgttagggtgtcaattttagatcttccctgctttctgatgtgggcatttaatgctataaatttccctcttagcactgtgttagctgtgtcccagagattctggtgcattgtctctttgttctcattggtttcaaggaacttcattatttctgccttagttttgttatttacttagtagtcattcagaagcaagttgttcagtttccatgtagttgtgtggttttgagtgtgcttcttaattctggggttctaatttgattgcacagtggcctgagagactgtttgttatgatttctgttcttttgcatttgctgaggagtgtttatttccaattatgaggtcgagcttagaataagtgctatgtggtgctgagaaaaatgtatattctgttgatttgctgtggagagttttgtagatatctattaggtttgcttggtccagagctgagttgaactcttgaatatccttgttaaatttctgtctcgttgatctttctaatattggaagtggggtgttaaagtctcccactattattgtgtcaaagtccaagtctgtttgtaggtcttaaagaactggttttatgaatctggtgctcctgtattgggtgcacctgtgtgtatatatatatatacacacacacacacacacacacatatgtatatatatttatatatattcatatacatatatacacatatatacatgtatatatatgaatatatatgagatagttatgatatgagatatatatgaatatatatgagatatatatatgaaataaccttttttcatatatatatgaaaagcatattatgttcttctctaaactgattattctagttagtagttctttaaccttttttcaaggttcttagcttccttgcattgggttagaacatgttcctttagctcagaggagtttcttattacccaccttctgaagcctcgttctgtcatttcatcaaactcattctctctagttttgtgcccttgctggagaggagttgcaatcatttggaagaaaagagatattccggttttgggaattttcagcatttatgcgctggtttttcctcatcttcgtgggtttatctaccttagatctttgtggctgaagacctttgcatggggtttctgtgtggacattcttttgttgatgttgatgttattgctttttgtctgttagtttttcttctatcagtcatgcccctcttctccaggtctgctgcagtttgcttgggctccactccagaccctatttgcctagttatcaccagcggagtgtgcagaacggcaaatattgctgcctgctctttcctctagaagctttgtcccagagggcaccggcatgatgccagccagagctctcctgcatgaggtgtctgtcaatccctgttaggagttctctcccagtcaggagtcatggagttcagggacccacttgaggaggcagtttttcccttagcagagctcgagcactgtggtagtagaaccctccttgtcaggatctgctgctctattctccattatatcattcttatgcctttgcatcttcatagcttagctcccacttatgagtgagaacatatggtgtttggttttccattcctgagttacttcacttagaagaaaaaatatatatatatatatatatatatacacacacacatatatacatatatacgtatatgtatttatgtacacatacatatatgtatatgtacatatgcacgtatatgtatatatgtacatatatgtatatgtgtacatatatgtatatatgtacatatatgtatatgtgtacatatatgtatatgtatatatgtacatgtatatatgtacatatatgtatatgtatatgtgtacgtatatgtatatatgtacatatatgtatatgtatatgtacatatatgtatatatgtacatatatgtatatatatgtatatatgtacatatatgtatatgtatatatgtacatatatgtatatatacatttggaagatatatatacatatatatcttccaaatgtatatatacatatatacacatatatatacatttggaagatatatatacatatatatcttccaaatgtatatatacatatatacacacatatatatatacacacatttggaagatatatacatatatatcttccaaatgtatatatacatatatatacacatatatatacccatatatatacatatatacacatatatatacatatatacatatatatacatttatacacatatatacatatatacgtatatatacattttcttccaaatgtatatatacatatatatacgtatatatatacgtatatatacatatatacgtatatacatatatatacacgtatatatatatgtatatatatacacgtatatatatatatgtatatatataccacaatttctttacccagtcattgattgatgggcatttgggctgttgccatgtttgtgcaattgcaaattgtgctgctataaacatgcatgtgcaaatacctttttcagataatgacttcttttcctctcggtagagacccagtagtgggattgttgggtctaatgatagttttacttttagttctttaaggaatttccacactgtttttcgtagaggttgtactagtttatattctcaccagcagtgtaaaagttttcccttttcaccacattgaaaccatctattactttttgattatggccattcttgcaggagtaagatggtattgcattgtggcttttacttgcatttctctgatcatgagtgatgttgagagttttttcatctttgttggtcatttgtattttttcttttgagaattgtctatttgtgtccttagcccactttttgatagtattgtttgttttttttcttgctaatttgtttgagttccttgtagatcctgtaaattagtcttttgtcggatgtgtagattgtgaagattttcttcaactctgtgggttttctgtttgccctactgattgtttcttttgctgtgcagaagcttttttatttaattaagtctcatctatttatctttttttatgttgcatctgcttttgtgttcttggtcatgaagtctttgcctaagccaacatctagaagggtttttccgatgttatcttttagaatttttacggtttcgggtcttagatttaagtctttgatccatcttgaattgatttttgtatagagtgagagatgaggatccgttttcactcttttacatgtggcttgccaattatcccagtaccatttgttgaatagggtgtcctttccccactttatgtttttgtttactttgttaaagatcagttggctgtaaatatttggctttatttctgggtactcttttccattccactgatctatgtgcctatttttatactagtaccatgctgtcttggtgactattgccttatagtttgaagtgaagttatgtgatacctccagatttgttctttttgcttagtcttgctttggctatacatgctcttttttggttccatatgatttctaggattgttttttctagttctgtgaagaatgatgaagatattttggtgggaatttcattgaatttttagattgcctttggcagtataataaattttttttttgcagctattgtaaaaacagttgagttcttgatttgattctcaacttggtcactgctgttgtatgcagagctactgatttgtatacattaattttgtatcctgtaactttgctgaattcttttatcagttctaggagctttttgttggaggtctttagggttttctaggtatatgatcatatcagcaagcaacaacagcttgactttctctttactaatttggatgctctgtatttctttctcttgtctgatttctctggctaaggctttcagtactatgttcaatagaagtggtgaaagtgggcatccttgtcttgttccagttctcgggggaatgctttcaatgtttccccaattcagtagaatgttggctgtgggtttgccatagatggcttttattaccttaagttatatcccttctatgctgattttgctgatggttttaatcacaaagtgatgctggattttgttaaatgctttttctgcatctgttgatcatgtgattttcgcttttaattctgtttatgtggtgtaccacatttattgacttgtgtttgtttaaccatccctcatccctggtatgaaacccacttgatcatggtggattatctttctgataatgttgttggattcaattagctagtgttttgttaaggatttttgcatctagatttatcaggcaattttcttttattgttatgtcctttcctggttttggtattagggtgatactggcttcacaggatgatttacggaggattctctctgaatcttgtggaatagtgtcaataggattggtatcaattcttctttgaatatctgatagatttcagctgtgaatccatctggttctggactttttttgttctcatttttaaaaattaccatttcaatatcactgcttgctattggtctgttcagagtttctatttcttcctggtttaatctagaagaattgtatatttccagaaatttacctatctcctattggttttctagtttatgcatttaaggatgttcatggtagccttgaatgattgtttgtatttctgtgatattggttgtaatatttcttattttgtttctatttgagcttatttggatcttctcttttatcttggttaatctcactaattgtttatcaattttatttatcttttcaaagacccagctttttgtttcattcatcttttttgttgttgtttttcaatttcatttagttctgctctgatctttggtataattttcttctgcaggatttgggtttggtttgttattgtttctctagttcctttaggtgtgcccttagattgtctatttatactctttcagaccttctgatgcaggcatttaaggctatgaactttgctcttagcaccacctttgttgtattccagaggtttttataggttgtgtgactattatcattcagttcaaagaatttttaaatttccatcatgatttcattgttgacccaatgctcattcaggagcagattatgtaatttccatgtatttgcattgttttgagggtttcttttggggttgatttccaattttcttccattgtggtgtgagagtgtacttgatataattttggttttcttaaatgtgtggagactcgttttgtggcataacatatagtctattttagagaatattccatgtgctgatgaatagaatgcatattctgcagttgttgggtaaaattttctgtaaaagtgtgttaagtccatttgttctgcctcttatttgccatttttacctctacactctgttttttcattagagaatttaatcaatttacatttaaagcagttattgataggtaaggacctattgatgctattttgttaattatcttacactgttttgagacacaataacaacaaaaaactgcaggccaatatccctgatgaacatcgatgtgaaaatcctcaataaaataccggcaaactaaatccagcagcacatcaaaaagcttgtccaccaagatcaagtcgtcttcatccctaggatgcaaggctgattcaacatatgcaaatcaataaatgtaatctatcacattaacagaaccaatgacaaaaaccacatgattatctcaatagatgcagaaaagaccttcaataaaattcaacatcccttcatggtaaaaactctcaataaactaggtattgatggaatgtatctcaaaataataagagctatttatgacaaacccatagccaatatcatactgaatgggcaaaagctggaaacatcccctttgaaaaccagcacaagacaaggatgccctgtctcatcactcctattcaacataatgttggaggttctggccagggcaatcaggcaagagaaagaaataaaggtattcaaatagaaggagaggaagtcaaatagtctctgcacatgacatgattgtatagttagaaaaccccatcatctcagcccaaaatctccttaagctgataagcaacttcagcaaagtctcaggataggaaatcaatgtgcaaaaatcacaagcattcctgtacaccaataatagacaaacagagagccaaatcatgagtgaactcccattcacaattgctactgagagaataaaatacctaggaatacaacttacaagggacatgaaggacctcttcaaggagaactacaaaccactgctcaaggaaataagagaggacacaaacatggaaaaacattccatgctcataaatagggaggatcaatatcatgaaaatggccacactgcccaaagtaatttatagattcaatgctatccccatcaagctaccattgcctttcttcacagtactagaaaaaactacttcatattgcatatggaaccaaaaaagagcctgtttggccaagacagtcctaagcaaaaagaacaaagctggaggcatcatgctatctgactttaaactatacctcaaggctacagtaactgaaacagcatggtactcataccaaaacagatatatagaccaatggaacagaacacaggcctcagaaataatgccacacacctacaaccatctgatccttgacaaacctgacaaaaacaagcaatggggaaaggattcctcatttagtaaatggcattgggaaactggatagccatatgcagaaaactgaaactggaacccttccttacaccttatacaaaaattaattcaagatggattaaagacttaaacataagacctaaaaccataaaaaccctagaagaaaacctaggcaataccattcaggacaaaggcatgggcaaagacttcatgactaaaacaccaaaagcaatggcaacaaaagccaaaattgacaaatgggatctaattaaactaaggagcttctgcacagcaaaagaaaactatcatcagagtgaatagtcaacctacaaaatgagagaaaatttttgcaacctatccttctgacaaagggctaatatccagaatctacaaggaattcaagcaaatcaaaagcaaaccagcccatcaaaaagtgggtgaaggatatgaacagacacttctcaaaagaagacatttatgtggccaacaaacatatgaaaaaaagctcatcatcactggtcgtctgagaaatgcaaaccaaaaccacaatgagatacatttcacgctagttagaatgttgatcattaaaaagtcaggaaacaacagatgctggaggcaatgtggagaaataggaatgcttttacactgttgatgggagtgtaaattagttcaaccattgtggaagacagtgtagcatttcctcaaggatctagaaccataaataccattttacccaacaatcccattactgggtatatacccaaaggattataaatcattctactataaagatacatgcacttgcatgtttattgtggcactgttcacaatagcaaagacttggaaccaacttaaatgcccatcaatgatagactggataaagaaaacgtggcacgtatacaccatggaatactatgtagccaaaaaacgggtgagtttatgtcctttgcagggacgtggatgaagctggaaaccatcattctcagcaagctaacacaataacagaaaaccaaacactgcatgttctcacttataagttggagtcaaacagtgagaacacatggacactgggagggaaacatcacacaccagggcctgttgggggttgggggggtaggggagtgatagcattagaagaaatactttatgtagatgactggttgatgggtgccccaaaccaccatggcacatgtatttctgtgtaacaaacctgcatgttctgcacatgtatcccagaacttaaagtataataaaaaatattattttacactgttttatagtctttctatttttccccctcttaaagtcttcttttgtgatgtgattattcttttgtagtagtattctttgattcctttctctttatctttggtgtgtctactagttttttcttttatgtttaccacaaagcttacatgacgcatattagagttataactatttttaagttgataacaacttaactcccatgaaatgcagatctgttatattttattttattgattatgttgttcatgtcagaatatacatatctttatattttttatccagtaacaaattactgtaactgtagttgcttaatgcttttaagttttacaattatgttaaaagttgtttacacatcatcattacagtgttacagtattctgaatttggctattttttactagctttatacttgcatatttttcatgttgctaattagcaatcttttatttcaattgaaatttcgttatttagcacttcttttaaggaagatgtggtgataaactttctcagtttttgtttgtttaggaaggtctttatctctccatttctgaaattaagctttaccaagtataatgttcttgattggcagggttctttttttgttccagtacattcactatttcatcccactctctcttaggttgcaaggttctgttgagaaaattcattgatagctctatgggaatttctttgcatgtggctagttttctgttgctgctttcaacattttctctttgtcattgacttttgacaatttgcttattatgtataacagtgaagctctctttatgttcaatctatttggagttccttgggattattggtttgggatgctcattttcctactaagatttgagaaatttttagttattaatttttaaatttctgttgtttttctttttctcttctctgtaatttctataatgcatatattggttaatttgatagtgtcatataggtcttgtaggctgacttcactatttctccttctttttgttcttctgactgattaatttcaagttatctgtctttcagttcattggttctttcttctgctcaatcaggtaatttgctgaagctctgtattgaatttttcaggtgtcattgtattttttttactccaaaatttctgtttcattgttttcaattgtttctatctctttactgaacttctcattttgttcatacattattttcctgattttatttagttgcctatctatgttctctttagtccattgagtttctttaagaagagcattcttaattctttgtcaggctgtttttagatcttactttctttggggtcagccactggaactttattttgttcctttggtagtgccatatttccttcattcattgtgttttttgaagccttggtgtttctgtttttccatttgaataagtcatttcctctagtctttactgatgctttggaaaaaatgaaccttcaccactcagcctggctagagattctagggggtctctcagaccttttttatgggtgtacttaatccaccccttttgttccctgctagtgtggaaatctggggactgtgtatcttctctcaatcctgcaaagccaggctgagtactgagagatttccatttatttttcttaggcaagtgcccagaagtgctcaaggttgtacacctcctctctattcagcagaatcaagtcagctgctgacatctgtgtgctgtctgcaaaagatacacacaccgtctgaggatcttgcatgtgctgcttgcagaggctcacatgcaccatctggggaagaccacacaagttatctatggaacctcacacacattctgtggggaaatgtggggcactgcccaggggcgagatgcatagattgatgggggtaaatattagctagcggagggatccacaggtgaggcatcctacatggcatgtgagcaggtttcttggtagagataatgagctggttggtaggatgtgtgtctaattactagcatccgctggttgctgtaagcctccactcattttcttttctcctgatggtccccagattattccgctgtgctaatcttttcagtgttctaggtgagatgagacagaaatgggcctcttgggaaatgttccataaggctaggaaagccaggcactcacttcatttccaccttctcccatgggagaaatcatgtactaagggagtctctcttggccatagctgtgccacttagaagagtgatacagggaaagtgaaactgtccttcttatcctctttaatgtgtctattttcatttgtattttgctccaccaaggtgcttgaacctcttttttttttttttttttttttgagatggagtctcactctgtcgctcaggagtacagtggcatgatctcggctcactgcaacctccaccctccaagttcaagcgattctcctgcctcagcctcccgagtggctgggattataggcacctgccaccatgcctggctaattttttgtatttttagtagagacggggtttcaccatcttggccaggctgatcttgaactcctgacctcgtgatctacccgcctcggcctcccaaagtgcttggattacaggtgtgagccactgcgcccggccaggtgcttggacttcttatgtgtacttctaggatcccataaaaatattttcactcataaatggttgttaaaattctttctgtgggagatatgaggtctttctgccatctggcttatgttcttttggcttgcctctgtgttgacatcttactggtaatacacattttttttttcctgtgatcttcctctttttatactctccagatagtgtgcaatattttttatctatgatttatcctctcctttaagattacaaccatatcattgtgattagaatttgcatgtttctaaaatgtttttattatgcatatacaaattgtcaacttttattccatggaaattttatgttccatttcaaatggttctttatgggaagattgtttcaattctatttttctcttttgaccagattctttaattgcttatgtaattttggtgtcctgcgtaatacagcatatgagagtgtcccacagatacatcttcaaacccatttcctgggagtctattttactctaataaacaacaaatcttaaaagtttcagccaaaagatttatgtgaccttaagtgagggaatacatcatatattgaattccttttgttctagaaatgaacaattgttcctagtaaaatgaattgtgaggacaatattttagcattaaagccatgagtccgttgattcaaaaaggaatgtcctatagaaataagtagataaatgatgttttcaaatccaggaagactttttctccttggtctcacttatgacccagacttttgtctattttgaagataggaaggaattgttaaagatagtgaatggaagtaaccaatgtgaagaagtgggaaatgtcaatgtccaggatcagtggggaactgtgtgtcatcagaactgggatgctaatagttgtttgtaattaactgggttaacactttgtagtcaacacaaattttcctcctaatgttagtgcttaatccaagaatatatagatgtttcatacatcctgctttggagataaatcagctctatgggtatgcaaacactatggttgggggatgtgttagtccatttgcattgctatgaaggaataccggagactggataatttataaagaaaagtggtttgtttggttcatggttctgcaggctgtacatgaatcatggaaccagcaactgcttctggtgaggggctcagaaaccttacaatcatggcagaaggccaaggggaagtcagcatatcacatggaaagaggaagcaagagagaagggagcaaggtggtgggggaggtgccaggtgccaggttctctaaacaaccagctcccctatgaactcattactgcagggagggcacaaagccattcatgagagatcctcctcca

SEQ ID NO: 92 - DNA, 32744 bp, Homo sapiens
  source 1..32744: mol_type = other DNA
gaggagcccggagcgccctggcgggcgtggagtccccagcctggccgctgggaggccgcgtccccaccggagggggcagggcgcactcacccggccgccctgaggccgctggcggcctgttggcttctccacaggcgcgctcgccgttcaagcgcgctttgtccccgccccagatcctggggggtgagcggtggagaaggggcgggcgcccgcgagccgtgaatcacctcctcctcttgctgcctcagcgccgccgccacctttccattcagtcgcccaacatggctggagcgcggcggaggtgagccggccgcccgcccgcagacgccccagcctactgcgcccgagtcccgcggccccagtggcgcctcagctctgcggtgccgaggcccaacggctcgatcgctgcccgccgccagcatgttgggcgccccggacgagagctccgtgcgggtggctgtcaggtgaggacagtctgccggcggcgggcggcgggcggcgggttgagggcgcggcaaggacctggctgtggcgcggagcaccggctaccggggtggagcgacctgaggggcgtcccggccgggttctgcggctgaggaaactgaggcagtgagtccccgctggcctggcacgcgcggccgggtgctggcagggcgactgcgccgccctcacgccgtctgtgtttgcaggtggctggcggctgcgcggcgccgggtccctggggggcgtcttgacttctctgggggaaaagccctcgtcactcccctccgtcccctcgcgggatcagtcacctcaggtctggccgccttgggctatcgcctgtccgggaggagctgcctgtgcgcggggctgtggtgttcttttttattagttctagaatgtctgtcatacgtgtccatgcagctccggccttcccaggcaggagacaaagcatctgactatcagcgccggcgaccgcagggcccgccgcgcgcccactcgggttctgatgtctgtgcaaatgagacatctttttcagcatcacggggatctagacatgcccccgcgtgtgggtagaggagacagatctagcctcttgggtgttggaatgggagtggaatttaaggtaaaatccactggggagaggtctacagaaggaggaaaactctttagccagaggaagggtgaaatgggtgactgtgtgaaacatactgacattaggcagggtggatacaatgtaatcgtaacgttacccaggccagggtgtgagtctggaaatactaggtacatcctagtattgaaattatatttcggccaatgacaggcacgagtattcgatgtaatttcggctgttttgatacttatcaagaaggaaagctctgatagttgctcatggaaaattgcaacatcatcacactgtgtgaaaaattaatgaagcattcatcctagagtaagtgcgtggctttcacagctctgagagtctactgttaattcacttctccttatttatgctttaaggattataaaaataatctacactccaaggaattaggaactattaacaatctcccagtcttgtagtctttccagaaaattattctaaaaattctcccctctaaacatttctatagttactattttagtgacacatcttgggtcaggcatagtaatggctgtttcgtatactttgtatctttaattaacttaaataataaaatgagtttttaagtgttttttttttttttttttttaccacccagggaggtgacagttttatgactggttagaatcacctgttataaggcttttgaagttttaattaggccttcttcgttattctagggctacttatccaattgttagattagtctgtttctcctattcactgctactacctctcttttggccctttaataccagttaatgactgcaccagggtggagaaaggggaaggaaaaagacagaaaacccaataagaggcaattttgttaggagatctgatcaaggaaagtgaagaaggtgcataaaatattactgaaaacagacaatttgtctgtttttagacgtttgagatttttatatgtgaattctctagactatcacaaggcagtttgttgaccattctgttaaatccgatgcttctttgcctgtagagccatggatgaccctaaagtgatgctgactgataaataacttgtattttgttttggtgtgtatgttaggactttttaggtgaatgaatgtgggtttgatttttggggaaaggctttataaaaacttcaacataacttagtaagccatattgtaaagattcaatttgttgaattcaggattccttccttccttccttctttcctttctctttctctcttctttcctttcttctttcttttttttgagatagggttttgctgtgtcacccaggctagagtgtcgtggtgccatcatagctcactgcagcctcaacctcatgggctcaagcaatcctctaatctcagcctgctgagtagctgagatcacaggcatgtgccacactgcttggctaatttttatacatttttgtagatatggggcctccctatgtttcccagagtggtcttgtactcctgggctcaagccgtccctcccaaattgctgggattacaggcattagccactgcgcctggataaatcggggatttctttcattaaatacattgttctctgaacagagctaccttgtaaacttactttatataggataaaaatagcttatactcatatagcactttagtatttataaagtgtttggacttatattgttcatttataaccattatttattgaagatatatacccgtctctgttatcctgatttctgggctaaaagtagtgataattgtttgacttatactgtgtgccgggattagtgctgtgttaagatgttttatctcatgtaaagtcttatttattcctcataacaatctgtgacttaggtcctgttattatggccatttacagatgaggcacagaaagattaagtaaaccatccaaagttaaattggtaacaaatgagagagccagggttccaacccagatagcttgactcagtagcccaagttcttaaccattaaccctgcggaagtgagaggcaagaacatggctttgcaaagtttcacttagctttgggtcagttgcctgttcttgattttgtattagttcatttacaaatgagtggctttcacaggttattcatattttgatattgctagaaaagatagaactaagacaggacctgaacttactaaaatatttcctcaaattatttaatctttccagcttcctgttaccctacccttcagtttgagaagggttcctcagcagaataaataaatcaatacaaaatcgtgtgtctatatacaaaatcaaaagcatttgacctgctttttttcctttaatgaataatataattgtggaaatgcatcctagaggtgcttatgttttattagaggtttattagtatgttaaagctgatgactctattgtagatttctcaagataaggaaatgggtcatttaaggctttgggagaaagatgttaaacagaaagattctcatttagggagaacaatttttattcaatttccaaaaatacctttttacagtatatttgagatgttctgtggggtttctttcagtgagatagatatggatttggataacagcccttgctatccaaccccatgtggctattaagcgcttgaattatgattaatgctaatgaggaactaaatttttaatttaatttaaatgagttaaaatttaaatttaaaaactggtccttcatccagttatcataaacttttaagtatgttttgaacaacttggatctactttttcagctgtaaagttttgaaatcgaagtagtgatacaagtatttctgatgaaaatttagtgtacgtattgactagaactgtaagtgtaatagatatacattggctttcaaaggcttactctgaagaaacgaatgtaaatatttcaattcttatattgactgtatgttgaaatgataatactttgcttacattgagttaaataaaatataattaaaattaactttcacattgtatgtgtccattggataccactgcactataacttaaaaatgtgaggaatacatttagaataaaacttttcacagacaccccatcatggactaatcacatccttcgattaagaaaatactaaaatattgggtatctggttttagagtggatatgcatgtacgcacacaagtatatatatacatgtaagatgtaagatgtgattcaacagcaacactttttttcctctgagtgcatgggtgtaggaaggtatggattttgactcaataatcaggtagctgttttcctaggaaatgtggtaagttgaatggatggcttagatagatgtcgccaacaaaaatgaacaataaagtacaatgtagaatctattcttattatctaagtatactgaattgaaccaaacagttaactcaaaaagataaagtcaaacatttcacattctaaatctaatacattatgagaggatgtgttcctttctcttccttatctcttctgacacgataactttgaaatgtttttcctttccaagaactttagtttgcaaaatatgtcaagagtttggtgaaaatgggagatacagaaaggacctttgtgtttttatgttattctctgtatatagaaactaaaatttccttgcctggctttatcagagaactgtacctatccttgacagtgagtttggattagtgtgtaatgtggtctaatttatgtttcagtttgctaggttttcaccttaccaaagcaatttaaggagtggcattgctcagcaggcttaggggctatttggacattcagaagctcagttttaggtctttcactggcacttatttgcaatgtgagctcactatacttttctttttcccaatgctggtttgtcaacctaaagatattaagagttgtaagaacttttcatgtgcagtctgttaaatatgattttagttgttgttagtcaaactgcaggcactaatgatgcctctatattaactggaaggaactattttaatatttcaaacttgactttcctaataatataatttctttaggtatccttattactgaagaataaacatgtaggctgtaatggtctctttgtcccattctggttataatacaaatgaataatattttattggctctacattaaaatcctatcagatagcctgggcagctattattatctctgttttacagaggagaaaaatgtgtctcaaggtttattcaccactaagtaacagaattggaactcaaactcaggtttctgatatctattgctgtgctctgaaacatacttccaaatgttttaaaaaattttacttaataatttcaatgtaataaggatcttttaagttgaaactctagatatacatgtgaggtaaattattcgaaacagtttaatgttcaaaaaatatggaagcaaatgagtaagacctctgagaaacatttattttatggaaatagatggttatttggtgtttggttatttattcctttcatccttaatacaacaaatctttaagtgcctattacatgccagacactttcctaccacaacacacgtgacgtatgttgtccttgctttcatggagcttagatctagcagtacaatgctttttaaacacacgaaatatgtgggaatgaacacacaacagaatcaatagcacataccagaaatgaaagataattgttagatttgagtttttgtttctctcttatttttctcaatgacgttttttagttcatacatttctcacagacaatgatacaaaatgccaatgcattaggaggatattccttatatcatgccctacttatatgtctttgtatttggatgaggagtaatggaaatgaaagagagtagactgaaaagccagcagataatgcaagtagaaagtcaatgaaataatttcatttacaaaatgtgggttgatagtcattcttcagatatggtttattaagtagtggacctgtttgttatttgggactcaatggaacttcaggtttcaggtctaattattactaccccttgagctcttgccatcttacctgctaattggttaatattttgatgcctaattatggggtagtgaatgatgcactagaaattccagtttagtgaaaccatgaaagcagaaatgatcgtagcagttaatactataatatgcccaatcttccaattctcatcaatttctcctcaaataaattgacttggaatatgcattgttttaagtgtttttccccaagacatgttacagctcaaagatgagtctcggacttataaatagttgctttctgtcaaaatcacatgtggcctgacataatctgagtttcagattaggaagaaaaacatatcaataaaaatgcatggcagatgatagtatttgtttgctgtatatcattagaacaattttattcaaaataaaacaaagttgttgttattttcactgcttctctttggaaaggggatttgtggattcaacttggtttcccaatggattaactatttaatcttctcagagtgttaaaatagttttcccgtggctcaggcattatttgaagcaaatgacagccaagccaaagggacagttttcatgataccatacaattattatgagatctttctgaaggtttaagaataatttttgaggttaccttgttcttttttttttttttttgcaattattaaaaatgtttaaagctggcgttgtggtgtgtgtctgtagtccgtgccacttgggaggctgaggtgggaagatcgcttggggctagaaattcaaggctgcagtgtgctgtgatcactcctgtgaatagccacagcactccagcctgggtaacatgaaaccctgtctaaaaaaaaaaaaaatatatatatatatatatatatatataatatagtaaacccttataattattgacgagatagattttaaagttgaaagggatcttgaaaggattaattggttgaggccccttcttcgagatagttgaggtgttagaggcccagaaaagttaaaaggaattgattgaggtcacatgactagtagctcaagtcttcttgattagtgctgtggattttctaggacttcgtgttttgctaacatacatcgaagaaataatttttatattaaaataacctacaattttaatcccttaagcattccttatataattttagtttgacatttagataaggtcgctcactgtcaacccattattttgactttagaagcacctcagtagtaggaacttgatcagtgattctaacaaagatctctcagaagtaaagggagaggaaccgcaggggtagaaacccaggtctaaattttgaggtttctggtatattaaaatataaagaaatgccagaactgagttataaaaaaatgtagactgtttttaacatttgcaagtagcacattaatgctttcacaacaaccacagaaataaaattcgtatgtagtctaatttgaaaataattttaaacatgtaaatagaaattctttagtgaattccaggcctgagacatgtggcttccctgcttcctcccactttggttcttaatactttactccaacagactaaaggattatggcacattgcagtaataacaacctcactaaacggaaggtggctggagtgtggggtgggggtggggtggagtgaggcgtattttttggcatctggaatggaagatggaggcagaaatctgagtggtttagaaagacctccttttgagtgttacttcactaattaggtggttcttaaccagacccatttcagaaggaaatacagagtacattttgattgtaatggaggcctgtcaccccaaaagcatcctaaatcccacatctacacaaagcttttctagactgatgtcatgcagaaaaatttctgccatttggggtcttagacctgccatatatgattcttctttctctccctctgaaattccagtaggaaatggcttgaaatgttcaaaacctcaaagaatatttaagcactattacaatagaacatttgaaggacattggattattgacttgagacaagtagatatctgagttcccagactgtaataaaggtcattcaggatttaaccccagggtcaatctacttgggcacatccatctgcttcttcagtaagaggaaagaaccaagaaaaatgttcaaacttagttatggaatggacccacccagaggctaaaaacatcaaggacagctcaaggtttattccccatgttttgggtatcttagtgtgtagtaagatgttaccttttgagactggatttgaattattctcaactttggagagttgtgtctgtcacgtaggcctgataatatcatagatctctcaatatgatgaaggaattacatttttttcagaatagatatccacattatttgatacaactactaagtcagctaggagttgttctaaataagtcttttatctttcagcaagtgggaacaagagaccttggagagtcaagctgtagtttattatgatgtggcatattgatcacatggtactaatgaggcacagggcatctctagcctcaattgtattccttcttatttacttttttggatcaaaattcattcatataatatataattaatgagtgttcattgtgtactggaatcacataagctggaggcattaaagtaattgaaggcaatgtgctataataaaatgagcattgcatggttagaaaactgttttggtttagactcttacccctgataaatttggttttccctcagtaattctcccctggatttgagaaaggatcacgagacaaccatgtgaaagcacttgaaaaatggtttttatacaaacataggtagtaatattattagataaagttggtataaccaactgttatggtttgaatgtgtccctccgaaagatcatgtgtcggaaactaatcccctatgcaacaatgttgggaagtggagcctaagaagtgattagttcatgagggctctgccctcattaatggattaatgtcattattgagggagtagtttcattttcttgagagtggctttgttataaaagagtttagtcccctcttgttctcttgtgcatgctctctttccttctgccttccgccttaggatgaggcagcaagaaagaccgtgccagatgcaggcctgcaggcctcttgaccttggagttcccagcctctagaactgtaagaaatacatctctgttcattataaataacccagtctgtggtattttgttatagcaccacaaaatggactaggacaccaacgatgggcatgttgattatattccaaactctagcaattggattagttattctttgatgtacaacctataacttgaatttgtaaagtgctttaaagatgtctgtatctggtatctgttcttttgctttttgagtatctcttacttacaccactataagtgatataacagtatatataaatacttccaagatccttattctatctagtctccccgttttcttttgctttcaatatataaattacatgccatactgctctactctatcaaattcatccttttatagtttattagaattcactatttttattctttctttttccacaaagccttttaattagtacagttcttcgtgtttgtaaagttactagcatatactttgtgagattaacagtagttttgagttatactttttactagttgctcaacctaatgtaagagaatggtaactaaagtggatagtaaaaatgtgaattttccttctgaattaggttgcaccagatttttggaaatattgctaatgctttccttttgcttcctttcatcaaccttggcaagaagtattacactaggctgtggattaaagagcactgtaaggggtaaactgagtaaaaggagcagaagtaataatataaaaattttaattatacattaacttttttgataaatttttttttttctgggacctggagctactggggcaatgtgcctgcaatactcattaatagaacttatataaagacttgcctgaaggcattttagaacaagactgatatttagaaccagaaagtatatcttgtaagcttgtctgaaagtatatcttgtaagcctgtctaatgatctcaaaatcagtttataattccataagaaagttatttttattcagttttttcctattattgaaataggttaatcacattagaaaaattatcaggaaaagataagaaaaacaatcaatcataattccctaatacaattactactagcattttgctatatttctttttagtctgttttaatatgtgtacctacagttttttgaaattgttgtaatcagtgtgttgataccctttagtagcttgatatttacccctctaacacatagcataagaatttgtccatcttggtcgtcgtgtggtggctcacgcctgtaatcccagcactttgggaggctgaggtgggcagatcacttgaggtcagaagtctgagaccagcccggccagcatggtgaaaccctatctctactgaaaatacaaaaatcagctgagcatagcagcaggcacctgtaatcccagctacttgggaggctggcggaagagaatcacttgaactcgggaggccgaggttgcagtgagctgagatcataccactgcactccagcctgcgtgatagagccaggctctgttaaaaaaaaaaaaagaatttgtccatctttatattaaggaagggcattttgagtaacatgctaaatattatacaccatctgctttatttcaataactcagtacaatatgcattaaattcaatatatcagtgatttaattgacatgactttattgtttagtaagggcattaatttcatttttataggaactatgctgtctcctttgattctttataatgtttcatttctactgatgaacactgactttaccaaagagtgtttattggaattgatgagagtgaatagtgctgctcacccagaatatatgggtaagcattatggtactgaggatgttttccagaaaaagatatattgatatttaattttaacttttcacctatatctatgtaaagacacaatgtattaggatgaagtagatatttcccagcacattattccaagccagtgatggtaaatcaaacacaagaccataactagttcatgtttcttgaaaataagtgagtttctaaggtgtttattttgcttgctttcacctcagttcaacacaaaacacttctctttgagtagcgtgttggtctgttagtcttcacctgtcctgtcctaaagtggaggttggcaactgctaattaaacatgagattgcagatttcattcctggttatttgacctgccatttgaagttccttaattccagtgtgacatctgtgacattttcaagtgtcaatttaggcaatacaatatgaggcttttgaattttagtttgctaacttgcccttagattgacaacagattccatctgtccttgataatattcttatctattttgttacatgagaggaattggatcttctgttgcctctgtagcagattgggttttggtttctttagttagctttggctctaaattttttattaactttatataacctaatcataatttttcacaagtgtgtgttctataacgtcaggctgcctttgaattcctgtcttgcttaacttttttcagatgacgttcttcatgccccaagtggacaaactcagcctttcctgagtttctgggtcagtcctcaataaagccacaagtaaatcacagcagtagttttgttccaccaacccattagtgtgaaattttttggctgctactccagacttattattaattattcctgtgcttttaggatcatagccttccctttaacctcctattttacttgtccaaacttggcttttgtcttggtttcctgatttagatctctttccccgtgtcttgaatccaaacccacttgacaaagtgaaattattgaaagccccctctctgtggagagggaaacttgtccccttttgtcccaactggggtctccttcaactcatgtgggctgcacagaactggcagctgccaccagagttattccacttgtatacataggctggcactgatctgttctaggtcatctctggacattacttcacttccatgccatccagtttagttgtccagctttctactttaccccattcaacctggaggccctaggatgttttgagactaaaatcacatgggatctagaagctgtgatttccatgtgtgtctcagtccattttctgttgctataacagaataccaacagggacgacttatacagaaaataaatttatttagctcctggttctgggtgctgacatctgatgagggctttctggcagcatagtaccatggtgaaggacatcacatggcaagagggagggtgtgtgtctgctcaagtcttcttcttcttacaaagccactagtttcatcatgggggccttcctctatgaccttatctaatccttattatctcccaaaggccctaccctcaaacaacataatgaatttggggattaagtttctaatacatgaaatttggggacacattcaaatcatagcagtatgggattgacatgaaacacacacaccaaaacataaaatccactaaggagttgaatgaatctgcccaatatggtataaaatatattaatgttcacaaaaaaataaattgatatgtttctttctttctttttttttttttgagacgaagtcttgctcttgtcccccaggctggagtgcaatggcgccatcttggctcactgcaacctctgactcccaggtccaagtgattctcctgcctcagtctcccgaatagctgggattacaggtgcctgccaccaagcccggctaatttttatatttttagtagagacagggtttcactatgttggccaggctggttttgaactcttgacctcaggtgatccgcccacctcggcctcccaaagtgttggcatgacaggtgtgagccaccacacctgacccttaattttattttcttttgcagcatgacttatggaaaaaagcatggactttatttatttacgtttttatttttttaaggttgttttttttttttccagggtcttagggttttgctatgttgaccaggctggtctgaaactcctgagctcaagagatcctcctccctcagtttcccaaagtgctgggattgtaagcatgagccaccgtgcccagccaagcatggactttagaatcacaaatatttgagttcagaatttcggatggccacttaacttttatgagccttagttttctcatgtataaaatagggttaatcccttaatccctatctcacagggttgttaagattgttagaatgttctttagaattgtttgtgagatgttagattcttttttcttttttagttttatccctcctcttcttttttctcctccttctatctgctgttttcctctttccctctccatctacctgaaactctatttttcctcttctaggtaatatctaataactaaccataatttctttcaaaatcaccttaagatagggttaatttctttggtgagttcctgtttataaaaccacactttcatcttggttggtttctttatccgtgaagtggaggtaataagagtactaacataataggatcgttatgagaattaattgacataaagcactcagaataatgtctggcacatagtaatcctgaaatgttagttgggactaacttgcaaaaatctatttctttaacagagattctttctagtcttcacttgggccccctttttacaatttattatgtctgtcttcaatgatgaagaaaagggatgataatagtgcatttatatttgataatatgtgaccttgatattaccagtcaaagctattagcattgtatttatatgatagaatggatatcttgaattatctttaatgaatatgttgagttgtgaaagttaagactgagatgattaaaccccctagagcagtttgaataaaatgttttcttaatctttgttctctgttggtatgtgtgttaatggaaattcattccttttctgtttatctttgacatgggggatacttatttatttctagttggttagcaggcaaggtgagctctttggcatattaatccttaaacctcttaaatatattgcttaatatgtcattaatctgagcacacctctacttataccaacaaggtttttactaagaccccataattgatcacacacacacatactttatatttaaactataagtgaacatctcatttccatgtgtcatgtctaatttgaagtccttttttttttttttttgagacggagtctctctctgtcaccaggctggagtgcagtgacaacatcccggctcactgcaacctctgactccccggttcaagtgattctcctgcctcagcctcccgagtagctaggattacaggcatacgccaccacgtccagctaatttttgtatttttagtagagccagggtttcaccatgttggccaggatggtttcgatctcctgacctcatgatccgcccacctcggcctcccaaagtgctgggattacaggtgtgagccacggtaatttgaagtcatttttaaagattgactgaagtgacagttcctttgctaacttagcaaagacatttgattaattttacttttcctctttgtagttatgagacaagtcacattgcatattataaaaattttaattaccatggttaaataagaaaaatcaattaacaattatttgtgactctgttttttctaaggatcttactcaataattgggtcttgattgttgacacaataatagccactgaaacctttgactagataactagttttgtttgggttgaaaaacaagtttctgagagataaggtatcaacaaatgaggtctgaaacttaaatgatcctgaaaacaaccttcactttttaagacaaacctttttagaaagcaaacttgattgaattgttaaaacaaataccttttgagtccttcacaaaagttggtttactgtgaaatgaaatactgtcagatggacctagaatatttgtggtagacagttaagtggactattgaggatgactaagaaagccctatttgctgtctttgacaaggaagaatcatccacatataagctattaggataatgaacacaatagtaggactagactaagaatgaacattcttcaaaatcatccctacccatactgcacagcagaggcttatatatttgaattgttttctgtgccttgtgatgagaaccatgttctctgtttacctttagaaagaaaaagatgtggctgggcgcgggtggctcatgcttgtaatctcagcactttgggaggctgaggcagctggatcatctgaggtcaggagcttgagatcagcctggccaacatggtgaaaccccatctctattaacaatacaaaaattagctgggtgtggtggcaggcacctgtaatctcagctactcaggaggctgagacaggagaattgcttgaacccaggaagtggaggttgcagtgagcccaggctgtgccactgcactccagactgggcaacagagagagaccgtctcaaacaaacaaacaaaaaagatgcaatagcagtcatctttgtggtttgtggttttcttttcttttggactatcaaatatgtttatttgcacattgcataattttctttttactattgaatattttaaaatgaactttgatgatgaaaagtaatgctgttggactttgagttcaaatcccttctgtttcactgacttcctttgaggtagtagcggtgtaaaagtaaccctgtgaaaaataacgttacccctctctatgagtcaggtccttttgtgtgtaaagtagataatactactgttgagtatattacaggcattttggaaagtacagctagtaaaaatgtaaaaagaaagctattgctccaagttcattgtaggcacagcagaagttactaaagtattccgatatctaaagaaacaaaatttttaaggataataagtaacttccatccctgaccattccaatttatttcagctcagatccattccatgtgttttaatttagttcagttccgtttattagttactgagccccactagatcaagtgcactcaacatagtttgatggggaaatgcaagatgattcagataggggttttgccctcagtccagctgggagagccttgcatgtctacacaagacctgatggctctcccatgaaacatgccaaaaatgaagtatgaacacattatgtgtaagctattagtttgcccctccagccactataatcacattagctactttctcagacagtaaaacgatttcttaattttctttcttttctttttttttttttttttaacagagtctcactctgtcacccaggctggaatgcagtggtgtgatctcacctcactgtaatctgtgcctgctgggttcaggcaatccttgtgcctcagcctcccaagtagctgggattaccagcatccaccaccatgcccagctatttttttttttttttttgtatttttagtagagatggggtttcaccatgttggccaggctggtctcaaactcctggcttcaagtgatctgcccacctcggcctcacaaagtgctgggattacaggcgtgagccaccgtgcccggccttaatttccaaaatagtaatgtaaatgcttcttaataatgatataagtcccatgacatctggtctttgccttatctttgacatagcctccttggtttatttgctttctcttctctaatgcttttttaatttccatgctcattccatttttaaaaatacctctccatgaatttattcctattttcatcacatatgttaaatgcaaatatttattgacgactgttcatccacacatacaaggatatgagtacacgcatacatgcgtgtacatgtgtgtatactcacacatattcgcaacatccttttctcacacagttagttaataacatccatttagagtggacagcttgaattttagtgaggtagaaagcttttatggaaatttcttaaaatattccaattctaaaaatattttgaatacaatttaagactcctttgttaactgcttattttttttcgtatgtttccatttcatcaatctcagtgtcttgtgggtaccagccagttttgtcttggtagaccgattacctgttttatcattcaaagacccaaagacccaaggcagggtaaacatttattattggtggagttttgctgttgaatcttgcatagatttctagatgtccttgacagctccatttttttttttttttttttttagtttctaatcttacttctgttagatgtatctttcagagtagctagctcttgttataaggaagcggcagaaacatgatttcctgaggaaaatgggctctgacattaggagacttgcttgaacctgactcctttcctagtttttaaccttgggtggattctttaatctgcctaagcctctgttccctcatctgtaaaaggatattgataatatatgcctcaaaaaattattctcttttaaggacgcctttcctaattctatcatattctcaacacttataacccctccatgtatataatttatattatatgacagtaagtttattcatagattgctttgtaaacagttatctttagtatcttgggcttatgttggttttttattcctcctccaattcattgtgaattactcaaaagcaaggataggctcttttatttcttgtttgtcctctgtctggatgcttaatacatcagcaggcacatagctctggtctttaacatcagaggtgaaaaatataatttacttcggattattcttacggagactttattcagtctgtcaaaaaccatttgactgccactggtgtgcctggaagggagttctgggtattgagggtacagatgtgagcaagacaagagctttaattctcaaggagctgagcattgggtgaggatagagacaataaatatttttttttaaatccagatattgatatatactatggagagggtaaaacaatatgcttgatagtagttgtccttggttgggaggagtcatttgagttgagacctgaatattggaaaatgagccatgagaagacctgagagaacagcattccagcaaaagcaagtgaaaaagggctaagaaataaactggcctgttagtggacaggtgagaaggacagtatagccagatatagaaaatagaaccgagggtgaagataggtaagatcggagaggtaggtagagaggtaagatcattaagggccttataggtctgggtggaaattttagacttcgcttttagtgagaaatctttagagagcttcaagtagagatgtgacatgatctaatatgcatttcagaaagataactcttgttgctcggtacaaggtggactgtattataagaggtgaaaatgtaggagatgagtgagaaagcagttattatgttccaggagtgacataaaggtggcttgggctaaaaaaataacagtacaaatggtgaaacgtagatttggggagatagagctgttaggacttgctggcaaagggtgtgatgaaaagaaaaggatcaagtagattcttaggcttggggctttgaggtgaaattgattttttgggggtgagattaatagttctatattgtctgtgttgaaattgttgtgcatattggacattctaataaagatgtcaagtcagttatttaatctatgagtttggatcacagggaagatgtctggtctgaagataaacttttgagagtcaacagcatttagatgtttgcagccatggctttggatgcattcatccatgaagagggaaaatttagagaagacttatggggaaagagctctggaacactaatatttataggccaagaagagaagatctagtcaaggatactggagaagagcggttagtagtagtgaggtaggagaaagcagtgagagtatgttgtcctaaaagttgactttagatgttgctgagaagtcaagtaagatgtgagcaaaagttggccattgcctttggttggagttaagttatttatgactcaaatatgagctgctttagtggagtgcttgattacagtaggttaatgagacaatgctaggcaaggaagcagaaacagtggtatcaaataatgcatgtaagttgttggatatgagagtgggaagatgaagtagttctcttctgactgcctttttttttttttttttttttttttttttgagacagagtcttgctctgtcccccaggctggagtgcagtggcgcaatctcggctcactgcaacctccgcctcccaggttcaagtgattctcctgcctcagcctcttgagtagccaggactacaggcatgcgccaccatgcccagctaatttttgtattttttaagtagagatggggtttcactgtgttggccagggtggtctcgatctcttgacatcgtgatccacctgccttgccttcccaaagtgctgggattacaggcatgagccaccatgccctgcctaattttgtatttttagtagagacggggtttctccatgttggtcaggctggtctcaaactcctgacctcaggtgatccactagcctctgcctcccaaagtgctgagactacagcgtgagccacggcgcccagcctgcattttttttttttaacaaaaatgagaatgattttaaggagggtaagaagctgtggaattgtgttgttgaatgtagcacctatggggatttgaagttgccaagaatgctgataggactatcagtggcgaggagaagactgtggatcttgagatcagtggatgaggcagtgtgtccaggtacagcaataaagggttttgaagggtagtaaggtctatccttacatgtgcttcaaagaatatgggatctttggaggaaaaaaaaagaagagagatactggaaactacattagggagcaagaaaaaaactcatctccgggcactgacttatagtagaagaaaaaatagccttacttgagagcccttcagtagaagccatgtcctcaggggatgagcaggttaagttttaggttgagggtatagatgagtgttctaataaaaaatagttcattttaatacatttgtcaagcacttactatttgccggaagcaaaactgttcccaactctaaacacatattaactcatgtgatcctcacaataatcctataatattggtactattattagtctcactttatgaatgaggaaattgagaagttaagcaacttgcccttggtcacagagttggaagtggcagtgctagatttgattccctctggtgttccaggcaataaccacactatactgctgatggcagatgatgattttcaacacagtggaagtatttaggaaggaaatgaaagatagatgatggggccaaattagaggatatttagagcagtgttgaatgaacacttttatattgaaggatgatcttggaagcttgtacttctggtggagactttggtgaacagtagtttgatgaacttttggcatatttcagaccaaagaacaacttgaaggccttagatggctagttttgctaggggtggagatgttttggtaactgggaaaaagtggctaattaaagttttgaggtgtcccatgacaccactgagaggaggtgggagggtaattgatgatttatattttcatagcagttgcctaccgttttattgtcttgtcttattgacagtcttgggtgaataatacattgactagttatctttctggccctgaaattcaaggattgtagtcttatcatctgatattattagtacagctgcttttggcagcaaaatttagaacaatactagtcacactgaaaggaagatgaaaagacgttgtagaaaaaatttttctatttttttcacaagactacttgcaagggttaactatttttctctgattgtagaagtactgtttgcggctgggcatggtggctcatgcatgtaatcgtagcactttgagaggccacagtgggtggatcacttgagctcagaagtttgagaccagcctgggcaacgtaatgaaaccctctctattaaaaaaaaaaacaaaaattagctggatgtggtggtacgtacctgtaatcccagctacttgggaggctgaggtgggagaatcgcttgagctaggggaggctgaggctgcagtgagctatgatggcgccattgcatgcaggcctgggtgataaagtgagagtttgccctccatcccacaaaaaggtactatttgttcattttggaaaatttataacaattttaccactcagataaattttaaaaatgttattttatttctgccatatatatgtttattatttatatatataaattatatatgtaattatataatatataaaattatacatataattatataatatataaaattatacatattttatttttatatataaataaatatatatgtgtgtatgtgtatatatatatatatatataaattatatatatttatttatttatttattttgagatggagtcttgccctgtcacccaggttggagtgcagtggcgcagccctggcctactgcaacctccacctcctgggtttaagcaattctcctgcctcagcttcctgagtagctgggactacaggcatgcactatcacacccggctaatttgtgtatttttagtagagaaagggttttaccatgttggccaggctggtcttgaactcctgccctcaggttattcacctgccttggccaaccaaagtgctgggattacaggcttgagccactgcgctcggccatctgcctatcatatttttaatataatcttatattacagtcatgttttgcttaaacaggatatgttcttaacgacacagagaaatgtgtcattaggcaattttgcggttgtgtgaacataatagagtatacttatacaaaccttgatggtatagcctgttacacacttagggtatatgatagagcgtattgctcctaggctacaaacctgtgtagcatgttactatactgaacattatacagtaggcagttgtaacacaatggtaagcatttgtgtatctaaacagatctgaacatagaaaatgtgtggtaaaaacacagtattatcatcttaagcgaccactgttgaatatgcggtcagtcattgactaaaatgtcactatgtgacacgtgtctttaaccctaaattaaatcctattgtatgtacagttttccttcatttttcacttcactttatttttttttttgttaaatcaagagcatttccctagatcataaagttgttctttcaaacctgattcctgaagactgtataactggtttgttgggtgggttgaatttggtgggttacagctaggaaatttgggtttatgcttcattcaggatttgtctgatttttttttttcttttcagcctcacgggtagatctcattactttcaacttacttttagctgtaagaatggtgtcattttcaggaattagagtactgcctaatctaaaccaaaaacatccaatttgctcttcttttctttccatttagctccatcctgactgaagacttaatgacctacagtgggaaagggggactcgccttactgcctcaacttgctctttcattcctccttccatactcactttgctgtttctgggtcttcaaaacagggagtggagacacatttgaggaagaagagcagattttttttttaaacttagtgttcttcgtagttctttgcttgatgttctttatagttctcttttgctttcattagctggccattacacccttgggttctttgtaaagcctcctgagggcagcttccttgctacatctgtgatgagagttctactctctgtctgacctcttgggaatcccctggctcctgttacctctttactctcccatacacccatagcctcttacagcaaatgtacctttgcccctgtagtcaactttccttagcaaaattccagtgaaatggcatattctcgggccattctcattttgtccagttgggcaatgagaagtatcacatatctgtgactcgtcaaacagcaaaagtgcagcttgcttgttgagttactgccctctcatttttttttttttttttttttttttactttctgtcttcagacttttccaggtgagaagcagttgccatttctctgtgtttatttatacatctggtctccagaggacacatcagattttcccagaactctcacctctcctctccgggtggacactctgagatgggcctgtcttctatgagatggacatactgagatgggatgtgcttgagttctgccgaatggagatgccagaattctcttcttttaggtcttcaatttctgaaagtaaaatctttggccaccccctcatttgtcttgacacaggagaggtattctactgccttatactttggagaggaagagagaaaacaatgttctctataacttggaatttcttcaaaatatccccaccatgaatctttagccttatcttatatagcctgaagatgaatgataaagggcttatggttgaagggccagtttggctaccttttggtaagtcatgtgagactgtgtctagcaacttaccttgagactttcatttaaattatgaggcagtaagaaaaatcctttccctatcttgacgtaaatgcgagtattttatatatactaatagttcaagtgatttcatagtaaacattactggtcagtatggttccttcacataggagcttcaatcaaccctcaagggagtagcaaaaaggaactgtttacactataggaatggaaattataggaactagggctgagccttgcatcttacagtaactagataagttaactttaggcaaatcacttgctttctcttggcatcatctttaaaatgagagagttagagtaaaggatctcctccaagattccttgtggctctaaagtttatgaatctgtttccaaggcatttctactgttagaactacacctaggaacttgtcaacagagtactcctgtaagtggagttttcagaagagagccagtactaaaccatacccttccatgtcataccatttcatgccattcattcatttcttcaacatttattcattcacttaacaaatactatatttacttgtatgaatccagccattgaaccaaattcacatgcaagttagatactgtgccttttccgcttaagagaaaaccaaaccaaacaaaaccactgtttgagaaactgtaattgaacaaatagcaattattaataaaataacaaatgtagattctaagtacagttcctggcacatagtagttgcttagaaaatgttaattcctccctgaaacaaagggcaattaagccaatggaacatgttctgggggctgcactaattgtatcacataaatgctacatttttggtaatttgtgggtgttcttataacacaatcatgtaacatcatcatttgtcatagtcatttagcaactttctcttattgcaaaaccagaccttcctttaacttattaatggtgaattctcactgatgctactgtagaagcttgagtgctcaccattcatagaggaacattctgaattaaatggcttccactcttgatttctgttgcatctgtagttttctagtatttcccaaacactcggatgtttatgtgcccgggtaaagtatcataatcagatattaggaacaacagataatgaactcagaaaattctaggaagtcctatattgttttcatgtatcagttacccaagtaacaagagaggtgtttgcatttttggaggggattgaacaatgtttgctatgttttcatcacttaacatattacttcatgtatgtgggtcattcctaccgaattactaactgggcaggtctcaaaactgttactaatcacctctgtccagatatagattagaccttacaaaatcaatgttttctggatgtttttctgtctatagctactctttgctctttttttttttttttagtcagggtcttgttttgtcacccaggctggaatgcaatggtgcaatctcctctcctgttaggctcaagggatcctcctgccttagcgccatgagtagctgagactagaggcatacaccaccacgcttgactaatttttgtattttttgtagagatggggttgcaccatgttgcctgggctgatctccaactcctgagcccaagagatccacctgccttagcctcccaaagtgctgggatttcaggcataagccactgcacccagccaattctttgcttatttaaatgacagaattagacattgcccagaagttggaccaaattggattcccactagtaaaatttaagtggtagagcttcttgtcatactgtcatacttgtcatactgtattttatattaataatatatatatattttccattccctttgttgctgccctagttcaggttttaaattattcaatacctgaccgaatataatagtgtcataatgatgtagaccagtgaagtatgagcattccatggagcaaatgttctttccagggtgatctgaccacaaaattaagtgttattggtattgctttgttggttgtatagcctttctagaactcaataggtaataagatgaaggaagccatatcttttccttgtatgctacatttgctaagtgatacgaagaagcctcacataactgttcccttactggttaaaaagtagccggctaatatattttcatttcttgtgtgtttcataacataatataaatagtggaaaatttggtaaaatctaaaagctataattgtcagtatcattgatattggaaaatataatcatgactgaacaaaattgtatctactggagaattttctgttctcctcacgtgattctggcattattagatgttgtattcatacttaatatttttcaaggttcttccccacccccaatttagtactgccatatttttctatcattctctcccataacactgtgtcttctgatacattttacaaatttctttttttttatgtaccccttgttgtagccaaatcctgtttctttctcattaatgtcttatatactgcatttttcttctggccccattcctagccattcacacacatggccttcatgctagttctggtgtttactatttaatgattgagttagtgctatagtctgttaatgaatgatactaatagctaacatttgtatggctccttgcagattagagagtgaatcctcaaggttttttaaaatttttttatttatatgtgtgtgtgtgtacatatatatatacacatatatatatgtacatatctatatatacacatatatatgtacatatctatatatacacatatatgtacatatatacacacatatatatgtacatatatatacacatatatatgtacatatatatatacacatatatatgtacatatatatatacacatatatatgtacatatatacacacatatatatgtacatatatatatacacacatatatatgtacatatatatatacacatatatatgtacatatatatatatacacatatatatgtacatatatatatatatgtatatttaaggcggatctcactctgtcacccaggctggagtgcagtggtgctatcttggctcactgcaacctccacctcccgggttcaagcgattctcctgcctcggcctcctgagtagctgggattacagtcacctgccaccacacctggctaatttttgtatttttagtggagacggggtttcgccatgttgaccaggctggtcttgaactcctgacctcaggtgatccgcccttctcggcctcccaaagtgttgggattacaggcatgaaccaccacgctcggctgtcaagtttttttacttgagcattttaatcagcttattgttattcctgttttaaagatgacaaaccagagactttgagagtatcagagaatattaattaaaagggcagtgactagggccaggtgttgcctttttgatttttttcatctctagtacttggtgtaggtataaactttttttttctttctgaatgaattaaaactttattattggctcttcaatagcttgattccaggaactgaattttggccatgccttatatcactattccaataatttgtaccctggcttgttgctccctgcaccttagttaccagcttcgtttactggttagttcatcattaagctttccttgaactgatatcaacaaccaaataacacttgtacttgaaagaagtggtcaaaggatgtgatgcctatatttagaggaagagctgtctaagcagagggaatccaaatacaatagccctggagtgggaaattccccagcatgtttcagaaatagaaagcaggccaacattgttggaatagagagtaggtggggagaggcaaaggtgggaggagttaaagtcaagtcaaaggtaacaaaatgtgaagctgatatgtgaagcttgaaatatctcctgcagattgagagggacactaataaagtgtcttttctaatgacctgccagattacagaagtggaagatgaggtcatggaaagcttctcagacataagggagctaaaatcatttatgttttaaagaagcattctcggccgggcgcggcggctcacgcctgtaatcccagcactttgggaggccgaggctgctgggaggccgaggcgggcagatcacgagttgaggagatcgagaccatcctggctaatgcggtgaaaccccgtctctattaaaaatacaaaaaaattagccgggcgtggtggcgggcgcctgtagtcccagctactccggaggctgaggtaggagaatggcgtgaacccgggaggcggagcttgccgtgattcgagatcgcgccagtgcactccagcctgggcgacagagcaagactccatctcaaaaaaaaaaaaaaaaaaaaaaaaaaagcattctctaccagacttttaaaaaaatttccgtcctgattttgaatttaactataggaacaaaacaaaacaaaaaaaactgacttaaggaaaggccaggaactcagttctgttgaacagccttcctaagaaagattttcaatgtttctcaggtgcgtttagactaacttcattaggcttgtccacagtgacctctaacagttacttgcagtgttttgatggtgttttcccagtcctaggctgattttgctttgcttttttttttctctctgataaacccattccattaaaaaaaaaaaaaatccaaaaaacaaaacacttgtaatcacagaatgtttagcacagaaccttgtatatagtaagtaatcttcatcatgttattaatatctagatccccagtattcagaacagtgactaattcgtgagtccttcaataaacatttgttgattgactctctaaatttttgttataaatcaaagtaaatctttgtgattgggtctcttatacctgctgacattattttcctgaggccgactgcatatctgcttagacttcactgcctgctgcttaacctcattttcctaatgttctctgcctactgctagacctacctgtttttaccagcctgcatgcatggatttcttcccagagttatggtgcttctgggactccctaattgtcaacagctagtgtatctatttgatctttaggtcttacgtttaactggatgagatgcttaccaagactgtgtagaattctttaagagccatttagagctttaaattctttcttaaagatgattttcacactatgtttgtagtacatggttgtcagccaaatatcagctagatcttttgataataaagtattagagacagtaatgtaataaccattaatggtttcatagtgagcacttttggtctgctttctgcacagctgcccttttgtcattgaataaattgtgagggaggagagagtaaaaaggacaattgggtaaaacataatctttatatgaccattcctgataacagcaagaataattatgcctaattccttgagtgaaacatctctcaagtatatagaatgattttgaatatttctgctaatatataaaggaaaagaaagaatcaagtgagatttccaagcttttaaactagagtacatctgaaccctttgtgaaactgaaacatatgtttatgttcattttgtgggtgttggtgcaaaactttcactagcttcaacaagtaaattttttaaaatggtattttgttgatcttatctgtcaggactgtaggcctcaaatattacattttttttttatgggaaaacaactttatgagataactatttacacttaaaatagctttaattccatatgttacatttgatggtcatcttattatggcaaaaaaagaggaggctacctgaatacatttttattttatttttatttttagagataagttcttgttctgtcaccctggccggagtacagtggcacaatcatagtgtactgcagcctccaactgctgggttcaagcgatcttcctcagctgggttacaggcattagtcactgtgcctggccctgagtacatttttgtattctatgatatgtgtatcattttttagttcctatttcacagttttgaagtaatttgaattagtgattccttgtagaacttcaaaattattatctgtcagaattaattttgttcttttagaataaagaagtgaggtatgacagtaggcatctatctgacacactttcttgttgtccccaaggaacctcttttaagtatttcacctggtcaaggaacgcaaaggattaggtgttgatgttttgtttaagtgggatagcgttcaataggtaggggcaggagggaagaattgaccaattgtttccaaaatgggtgtaggaacctaggcatgcaatataagctactaatttatctgtttaaactggaaacaaagatttttagatactacggggtcaagataacaaaattttagttattcttaatggcaccttctcaagtgctgtattcttttttttataaagaagaagttcagttaggtaattaaaattaagtggatgtttgacctgaaaaaatagaggaggcattcctaaaagatttgctatattaatggtttcaaaacaaaaaagaaatacactaaaacaggtgctttcaaattcaaatttcaaaatcactgggataggtcctccagaatgattgaaggccgaattcatatttgtttgttttaaatgagatttttaaaaatttcacaaatgcatgagagttttttggtactctggtaaactgtataacatttattaaaatctagaagtagttttagtgcagcattttaaagcaaaattaagtatcatatctttgagggcttgacgtgggactcaggtagttcaaaagtaggtatttgtaaagagttactgctctaattatggagatgcattagttataatatattgctaattaattttttttctgtttttttgagacagggtctggctctgtcacccaggctggagtgcagtggtgcaacctcagctcgctgcaaccttcattttctaggttcaagcaatcctcccacccctcagtcttctgagtagctgagactacagacacatgccaccatgcccgggtaatttttgtatttttgtagagacagggtttcaccatgttgcccgggctggtcttgaactcctgagctcgagcgatctgcccaccttagccttccgaagtgctgggatgaaaggcatgagccaccacacctgggcgctaattacttttcaacaagtcctttcatccacttgatggtagagtaggcataaacaaccattcagtttgttattcatcatgggtcattattcttagtgactagtcaaacatttaaatatcttttgcatcataatgtctaggcaacaggcaggagaaacatcatgttgccatgtgcttggattttacaagtgtctattaaaataccattaatcattgtacttattgagaatatacatttttttaccttaaatttattacgtgttctttggatgttaaaaacgtagcagcatgcagggcactggggctcacgctcccgtgtaatctcagcactttgggaggctgaggcgggtggatcacctgaggtcaggagttctagaccagcatggccaataaggtaaaaaccccgtctctacaaaaaaaaaattacaaaaattagctgggtgcagtggcgtgcacctgtagtcccagctactcagcaggctgaggcaggagaatctcttgaacccaggaggtggaggttgcagtgagctgagattgtggcaatgcactccagcctgggtgacagaaggagactgtttaaaaaaaaaattagcagcaggccaggtacagtggctcatacctataatcccagcacttcgagaagccgaagagggaggattacttgaggccaggagttcaagatcagcctgagcaacatagcaaaacctcatctctaaaaataaaaataaaatacataaaaattagctgggtgtggtggtgcatgcctgtagtcccagcctcttgggaggctgaggcaagagggccacttgagcccaggagattgatgctgcagtgagccatgatcacgccactgcactctagctggggtgacagaggaagaccctgtctttaaaagaataaaaaataaatgtatacgtgttatatttttaaatcaatttgaatggtatttattaaattgcttacaatgtgcaatatattgtggtggattaaagagaagcactataaggcatgacatttcaaacttaaatatgtattccggtcacctgtggatcttgttaaaatgcagattttaatttattaggtctgtggtggggtctcagaccaccatttctaacaaactccttggctgatgctcctgtttctggtctatgcatatcaaggctataaggtatagattatatcattaaacagttggcattcttattaaagaatagtgtttacccacataaaatattaaataagactttaggataagaggtggttgagagctaaaagaggcatggacaatatctagtttaaaagttgaggggaagctgagatcattatggacaaaaagcaattagggactgctttatggcaaaggcaaggtttaagttaggccttgaagagaggcaggaattggtggaaaggcaaaaggaaaaactttacagagaaggctagcagtggtaaagaccaagatgaatctgaatgagggtggtgacattttaggacaggtagcattctctctctttccctccctccctccattcctccagggtatgagaactttgcaggggagaattttgcaggggaggaggaaaagagagagggctctcttattttccagtatatagaggttttttgttgttgttttttaaaatttattattattatttagatgtttctattgtttatttctagtttaattcctctgtgggcagcaaaaaaacttggtataatttcagttttctgaatttgtaagacttgctttatggctcagcatatggtctgtttcagtaaatgttact

SEQ ID NO: 93 - DNA, 5331 bp, Homo sapiens
  source 1..5331: mol_type = other DNA
cgagcgcgcgcccgcgttctcctggcgggcttggtatttggcgcctgcgcgctgagtgcgtgccgctccgccgaccgaagaggctggtaagtcctcaagctggcaggtggtcgggggagcggccggagaggagctgccgggagttcgtgccctgcaggtctgcgacgctggcgttcgctcctgcctgggccactttggtgggctcagagcatcgctttttgccaaggggcgtgacctgagcccgcctcctggggctggggggtggagaggaatgggaatcgttaaggccggttatcaatttggtgcctgtttgttgctcgaggaggggcatagagcttacaaatagtgaagaggaaggggcgaggctggaccaggtgggagcgggggtgccccaagtcccagggcggtgaggatcgaggcaggtgcgtgaaaggcaggccccgttccccctccccacccccgccggctgtgtgtggcgggtaagaggagagtgggtagcactactacaaaatgagggtcccgatagaaatcgtacaggtgttgggaccacactcagggcggcaacttgtcatttttgcgtttttaattttcttatagaaacaagcgatttctgtcgtgattcactggggccgctaacgtgcactccctcttttcatcttaggacatgacaccagtggcatatcacggccatggggtctcagcattccgctgctgctcgcccctcctcctgcaggcgaaagcaagaagatgacagggacggtttgctggctgaacgagagcaggaagaagccattgctcagttcccatatgtggaattcaccgggagagatagcatcacctgtctcacgtgccaggggacaggctacattccaacaggtgatcatggagggatgattccctgatgagaatcccaaggtaccctcggagttctcctgtctgcccagacaacttttcttctaggcagtaataccataatagagacagtgccctggacaggagccagctcaactgacttaatacacttgggcagttctgcaacttctcttcctctccttatttttccaaccctttcttttctttaccgccactcttgttcttttcctgaggtttggaacattcagttcgctctgtgttgtgggatttgttgacaggcacatttctttatcgctgtcacaaggattgggacagctttgcgggggaaccatcttggaagctgcttttcaaggaaatgggtagctaatccttaacagcctaaggtcagaaaaatatatcaggtcaagagagagagacaaatacttagccttggtacaggatcatctattactattaacaaattggccctcagaaagtctttaacagtttagctggagagtcacagaaatttagagctggttaggaccttcaaaatcatttactccaaagcttccatatgaaaggcaaggaaaccatggccttgagagattcgacgactctgccaagcccatgcagtaaagccagaacaggatcccaggtttttcaacttccacatcactaccctggcagcactgatagatgttttataatttgtggcactctcttgtttcttgttcattagacccaacatgtgaatttcactagtattttttaaaatgtctcattccagaagaatatttgttgtggcaggctcaagtgagacgtgaaggaagtactgccaacacatgggatttacaaaataattgtttggctcttttctagagcaagtaaatgagttggtggctttgatcccacacagtgatcagagattgcgccctcagcgaacgtgagttacctgcttctcacctgttaatacctacttctgtccctaatctctttctgtatgtatgaatgccagttaattctttgaaaactacacatgttcttataagttccccattttccttataactgtttgcccaagcaagatatctctgcccccatcacaatctggggaaagaaacttgaagctggaaatgctttgaaggtcaaggaatggaatcagaagaaactgggaaagtggagtgttctgggaggtgtgggactgtctctgtccacatagctcctttcttcagcttttcttcccagagtgcaaacagtgtttaaaggagttttaaaaggtttctcctgcttcactgcttcttaactggtttatggttcctggctcttggaacttccctttcagctcccttctctttcctggttttgtgtttaatcttgacacattgaaccttgatatctgactgcctgggtcggtcatgtgctgtgtcatttgcagtaagcaatatgtcctcctgtccatcctgctttgtctcctggcatctggtttggtggttttcttcctgtttccgcattcagtccttgtggatgatgacggcatcaaagtggtgaaagtcacatttaataagcaagactcccttgtaattctcaccatcatggtaagccttagggtttcattccctgggttgtgcacctgccaggctgggacccaggacacttacacttgtttcctgacttgccctgatgtaggccaccctgaaaatcaggaactccaacttctacacggtggcagtgaccagcctgtccagccagattcagtacatgaacacagtggtcagtacatatgtgactactaacgtctcccttattccacctcggagtgagcaactggtatgctgttcttttaggaatcttgccccacaggcctaagagaagagtagggggctgtaggaatgccatagctgtgtcactttcctttttgtctcctcatttctacttgtaggaactggtgatgaggaagacctgttgggccctgtaattataaataattgtgagaaaaaacagctatcatttaagcatttggggagcagaataatttgtaagagacaaagatttgctacaaaataagaagcagcagtgttacagcctgaggtccattggcctctcaaaagggaagaggttggcagtatcaattagaggctcatagactatattagggacaatctcagggaagtattttgcatgtgatggaagaatgacccaaggtctttggattgctaataataatactgttctgtgtcaagcctgcttggccacagaccaactctggtatcttattttcaggtgaattttaccgggaaggccgagatgggaggaccgttttcctatgtgtagtaaggacactgttctctctgtgtgtgctctctactggaggaaagggattcaaagtcatactccattgattggggcctggtcctgccttagatctcagcttttgacttataggttccctggctttggatgtcttgagatttatttgaagaatgtattattattatgtgtgtatttgaagaatgtattatttgatatgtgacagaagtgctggaatttctaaaagagaacattaagccactaaaaacgttaccaagctccagcacttatgtgatgggtttgaaaaaacagaaagtggtatgacgctgtgggaggatgaaaatgacagtggcagggactgagagctgacaagccttggcagcacttaggtcggaagggggaggggggcaccccaaacaggacagtgtaactctgcactcttctactgaggctttaaaaaaaaaaaaactgactatttccatatttgctgtttggtagcttcttctgcacggtacctgagatcctggtgcacaacatagtgatcttcatgcggtgcgtctctcttccctatcccgatggcctgtccggccatgtgagcctaccacctttgctcaggaggcccctgtgtgaccacagggcagaggcacctagcccgaggggacaccctgtgcctcacaggcacagatacagtagacccttggtgttctctaaacacagtgtccacatgcccttcacaaatcaccagtcaccctgagcagtcaaacattttctccataaaatgggtctagtttaactaaacacttgatcccctcagaatcctaatgagacagtcatgaacagaaaagctttctcaagatgttaagtactgggcatttgaccagacttcctctctagccacacaaattaccacatgtcatggacctttagggttgttttctggaagcatggctgttaaatttgcaagtgacaagactctgctgcagacatgaaatatgaggggttagagcagagtttctcagccttggcactacgaacattttgggccagacctttgttgtagggggctgttctgtgcattataggatgtttaacagtattcctggcatctgcccactagatcccagtagtaaaccctccatcccttagttgtgacaacccagaatgtcttcaggcattgccagaagtctcctgtggggtaaaatcattctcgattgagaagccttgtttggaaggccacctcctggcacagtatctctgtgaaagtggaaagatcttctggcctcctggttacataaccatgaggatatgtgcctggggcccgtgggtattgttctctgaacttgcaaaaaatttcctgggacatttttctggcttatttcatcccccaaacataattaattcttcttggttttcttttccctagaacttcagtgaagatttcatacattggcctcatgacccagagctccttggagacacatcactatgtggattgtggaggaaattccacagctatttaacaactgctattggttcttccacacagcgcctgtagaagagagcacagcatatgttcccaaggcctgagttctggacctacccccacgtggtgtaagcagaggaggaattggttcacttaactcccagcaaacatcctcctgccacttaggaggaaacacctccctatggtaccatttatgtttctcagaaccagcagaatcagtgcctagcctgtgcccagcaaatagttggcactcaataaagatttgcagaatttaatacagatcttttcagctgttcttagggcattataaatggaaatcataacgtggttctaggttatcaaaccatggagtgatgtggagctaggattgtgagtgacctgcaggccattatcagtgcctcatctgtgcagaagtggcagcagagagggaccatccaaatacctaagagaaaacagacctagtcaggatatgaatttgtttcagctgttcccaaaggcctgggagctttttgaaaagaaagaaaaaagtgtgttggctttttttttttttagaaagttagaattgtttttaccaagagtctatgtggggcttgattcacccttcatccattggctggaacatggattggggatttgatagaaaaataaaccctgcttttgattca

SEQ ID NO: 94 - DNA, 3737 bp, Homo sapiens
  source 1..3737: mol_type = other DNA
ggcggccaggccgggcgcggagtgggcgcgcggggccggaggaggggccagcgaccgcggcaccgcctgtgcccgcccgcccctccgcagccgctacttaagaggctccagcgccggccccgccctagtgcgttacttacctcgactcttagcttgtcggggacggtaaccgggacccggtgtctgctcctgtcgccttcgcctcctaatccctagccactatggtgagtaagccgtgcggctcccggctgctttcagggaagcagggaaaagcgagccggcggggcgctggggccctgtatacagccgggaagggctggcctcagagccgtccgtttggagggcggaaaacgaggcgagaggccagggcgggagtggtgagacctcggtgtgtgtaaatagcgggggcccggaaaggtcgaggggcgccaggatttcttctcggactctggaagggatggggggctcgggctgccctccgccgtatccggagctctcttttgtcgcgtaactgtgtcctgggtgcggtccctcgagtccccgcagtcctttccagcgcatgcccttactccgccttgggtggacgcgcgcgcggactcttccagccctcacttcctcttgagcgcgaaaagcgggggtgggaagcagctggagacaaaagcgcgcacgcgcgaccgttaccttcccgccgctcctgggcgggaaaccgccactgcgctttgcgcatgcgctctgggtcgcgacgcgactagggctacagggcgtgtctcctgttaacctgagtgttctttttttgatgaaagcaataagaggactgcggaagagctccctgtcaatgtaccgctctacaccagtgtattacgacagttcgtacacaacagtctgtagaggccacctgtctctccctgctgcgttaggaattcaggggagcaggtggtggcagtaagggattttgagggaacggaaatcggatcttgacccagatctgggccgccgataatctcctactgcgctcagactgctgtggaggtgttaggctgagcccgatgccggcaggcaagggaggatgggcggcttgggcagcgcctttgcagacgtggccatttcgtgcctctgcagcaccgccggggggcgcaagagcgcgcgcccggaattgctcattcatcctgtgccgcagagccccgccccttgtccctgcggacagacatttcttctgcgctggtctggccacgtgcttcctgtgctaggagctgcccggaaatgtgaccacctagtctaaagtgggcttctggggcctgagcgctggatggatgcccaccttcctgtcttggtcctccaaaggaggaagctgtgactgagctgtcttggtctggaaggaggccttcccggtttaggatgggaaggtaacattcattaaaagcaacgtagactatagtgtagctgttctcaaaagtagtacatcttagaaaaggatctttagaaaagatcgctttagaaaaggaaattcgttttcagattacgtgagtagcctaggtaacacagccagacctcatctccacaaaaaaaatgaaaaaattagccagcttggtggtctgtgcctgtggtcccagctgctccagaggctgaggtggggggatgactggagcctaggctgcagtgagcctagatggcatcactgcactcaagcctgggcgacagaccttatctctaaaaaaataaagattgcatgagtattttgttccacttgacagtcatcaatagattggtttaaattgtgatatcttttttccttcccgcagcgtgagtgcatctccatccacgttggccaggctggtgtccagattggcaatgcctgctgggagctctactgcctggaacacggcatccagcccgatggccagatgccaagtgacaagaccattgggggaggagatgactccttcaacaccttcttcagtgagacgggcgctggcaagcacgtgccccgggctgtgtttgtagacttggaacccacagtcattggtgagttgacctcagtaacctgagatcccaggatgctgggacaggaggtctgtccaggggcttctcttgtcactcactcactccctccgtccttctctccctcctccagatgaagttcgcactggcacctaccgccagctcttccaccctgagcagctcatcacaggcaaggaagatgctgccaataactatgcccgagggcactacaccattggcaaggagatcattgaccttgtgttggaccgaattcgcaagctggtaagcaccacatataaatatgcatttaatgtggtgtgatagttccagtgcaagttgggtggagtgactgacatcattcattctttggcacctaccaaaatgtggaataggctgcttgctatattaattggacttctaaatcagatagtccctaggttatggacagtttgtggatatgtctgttttgccaattccttgtgcttacatcagtgagatatggttcgtaatctaaaaagttgaaatagaaattctaagataatgtgtcctggcattaaaatattacatttttttattcccctacaggctgaccagtgcaccggtcttcagggcttcttggttttccacagctttggtgggggaactggttctgggttcacctccctgctcatggaacgtctctcagttgattatggcaagaagtccaagctggagttctccatttacccagcaccccaggtttccacagctgtagttgagccctacaactccatcctcaccacccacaccaccctggagcactctgattgtgccttcatggtagacaatgaggccatctatgacatctgtcgtagaaacctcgatatcgagcgcccaacctacactaaccttaaccgccttattagccagattgtgtcctccatcactgcttccctgagatttgatggagccctgaatgttgacctgacagaattccagaccaacctggtgccctacccccgcatccacttccctctggccacatatgcccctgtcatctctgctgagaaagcctaccatgaacagctttctgtagcagagatcaccaatgcttgctttgagccagccaaccagatggtgaaatgtgaccctcgccatggtaaatacatggcttgctgcctgttgtaccgtggtgacgtggttcccaaagatgtcaatgctgccattgccaccatcaaaaccaagcgcagcatccagtttgtggattggtgccccactggcttcaaggttggcatcaactaccagcctcccactgtggtgcctggtggagacctggccaaggtacagagagctgtgtgcatgctgagcaacaccacagccattgctgaggcctgggctcgcctggaccacaagtttgacctgatgtatgccaagcgtgcctttgttcactggtacgtgggtgaggggatggaggaaggcgagttttcagaggcccgtgaagatatggctgcccttgagaaggattatgaggaggttggtgtggattctgttgaaggagagggtgaggaagaaggagaggaatactaattatccattccttttggccctgcagcatgtcatgctcccagaatttcagcttcagcttaactgacagacgttaaagctttctggttagattgttttcacttggtgatcatgtcttttccatgtgtacctgtaatatttttccatcatatctcaaagtaaagtcattaacatca

SEQ ID NO: 95 - DNA, 8543 bp, Homo sapiens
  source 1..8543: mol_type = other DNA
ttggacggctgagtctggctacgcgggcctccgcgggagcgcgaccgggccaatcaagagcttggcgtattttacaaactgagaaagtagctccagcagcacccgagagggtcaggagaaaagcggaggaagctgggtaggccctgaggggcctcggtaaggtaaggcacgggggtcttgaagggaacgaaggctgctgggttcatagggaggagggcagtttggggcccgagggcgaaagagtaggctcggggtgtctggagatagcacccataagagcggtcttgcaggcgccgggggcttgtgggcgcgtggattagggcggaggtatcagggatggcaggacaggtgccccgagaactggttgatctttgatcttagattctgcctgccttcttccccgtctcaattgtagccatcatgaccacccggcaagccacgaaggatcccctcctccggggtgtatctcctacccctagcaagattccggtacgctctcagaaacgcacgcctttccccactgttacatcgtgcgccgtggaccaggagaaccaagatccaagggtaagaggggcctaatgggggaagacagtagtcacaccagtaatgcaccccaacactaaacctcacctttttgtccccgctccctcccctagagatgggtgcagaaaccaccgctcaatattcaacgccccctcgttgattcagcaggccccaggccgaaagccaggcaccaggcagagacatcacaaagattggtggggatcagtcagcctcggaaccccttggaagagctcaggcctagccctaggggtcaaaatgtggggcctgggccccctgcccagacaggtacctgttggagccatggtaacacggcctccatggctgagtaggggactaggaagggtaaaagtggggttttggggttttgcactcactcctgctgtctcctacttactgtgatagtcctggtcccagctcctggaaagctctttgctcttagaagatctccctttcctccagcaaaatgtcatctcgccaggtgccatggcttgtacctgtaatcacagctactcaggaggctgaagcaggaggatcactggaggccaggagttggagaccagcctggatgacagagggagatcccatctctttaaaaaataaataaataaataaataataaatatcacttcttctgaagccttttccagttccccatgtcacaatcagttgctctgtgttctcctaatactttgcagcacttcttttataacatgtatataccttggcttgagtctgttacctgtctatagtttgatgatagcctcttgaggataggggctttgtcttattcttatgggaccccagtgcttagaatagtgtcttatgtaacattctatgaacatttggtgaccaggtgtggtggctcacgcctgtaattccaacactcctccgaggcaggaggatcatttgagctcaggagtttgagaccagcctaggcaacatagtgagaccccatctctttttctctttttttttttcttttcttttttttttgtggagacagagtcttactctatccctcaggctagagtacagtggcatgatctcggctcactgcaacatccacctcccaggttcaagcgattctcatgcctcaccccgagtacctgggattaccagcacctgccaccacacccagctaatttttgttttctttcttttttttttttttttttttgagacagagtctcactctgtcactaagctggagtgcagtggcacgatcttggctcattgcaacctccacctcccaggttcaagtgattctccagcctcagcctcctgagtagctggtactacaggcgcgcgccaccaggtccagctaatttttttttgtttttgttttttgtagagatggggttttaccatgttggccaggctggtctcaaactcctgacctcaggtgatccacctgcctcagcctcccaaagtgctgggattacaggagtgagctaccgcacccagccaatttttgtatttttttagtggagacagggttttgctatgttggccgggttggtctcaaactcctgaccacaggtgatccacccgcctcggcctcccaaagtgctgggattacaggcatgagccactgcacccagccatctatttcttaaaaaaaaaaaaaaaaataagccaaattcaattgaatgagtctcttgctcaccttgtacctcaaagttcctatgctaggggccctatccccctcagccttcccccttccttttccttctcctctttccttgcagaggctccagggaccatagagtttgtggctgaccctgcagccctggccaccatcctgtcaggtgagggtgtgaagagctgtcacctggggcgccagcctagtctggctaaaagagtactggttcgaggaagtcagggaggcaccacccagagggtccaggtaatgaaacaggatgtgaggagaccaggctagggggcactgaggggggcatcctgagcagtgctgacagcctctgttggtgtcccagggtgttcgggcctctgcatatttggcccccagaacccccacccaccgactggaccctgccagggcttcctgcttctctaggctggagggaccaggacctcgaggccggacattgtgcccccagaggctacaggctctggtgagtgcccttgaggggctgatagtcggtgcttctgggagctccttccagggacaaagctgggctctgggagaagaggtacctcatgatgaggcaagggatcctactgggggagatggggttggtggtgaggcctgagggtttggggtccacctctgattccgttttcatctcttgctcctgtggatcagatttcaccttcaggaccttcctttcacccttccactcgccccagtttccaggagctaagaagggagacagctggcagcagccggtgagaaaggagagggtgtgggagaaggtcatctggaaaagaatgaaccagtgtctgatacaggagtcccccagagttggggccttccaggagctttaggactccccaccaactcaggaggggaagcaagaaacctgtgattacccgggatgagcccttgggatagggttcaggctttcacagccaggcctcagtgtgacatcagtttactcaagtcatggggggacagggaggacagaaatgtgctatctcttttgtttagtggctagagtatagactgtggcaataagtgggatttgggtttatatcctaactcttaacacttactatttgtgcaagcttgccttcacctctctgagctttggtttctttgtcaagtgagaataacatttgtaccatcattagttgtcatgagaatgaaatgagatgatgtttgtaaagcacttagcacatgtccagctcatacttggtattcagtgactgctggctaatgtccttattgtcatcaggacttcagtgagccaggcctcaggattgctcctggagaccccagtccagcctggtaagtgtttctggcgtggggagagaacaggggcagttgggctgcctgaagcagggaacaagaccagagaaaactcagcaggctgggagggagcatgaggaagtgggaggccgggaggctaggtcagaaggagaaggagaagagaccttctagataggccagcgattggcacagttgcacttttgtctaaggagatggtctccatttcggccctctctctgccacttcctgcaagatttatcttccactcactgtttatccccagcccctaagtgccatcaccacatccccagcctactcagacgttcagattaataagtgtttactgagatagtgttgggtgttgaggggctgctggatgggttcctgtccctaatagtgcaatggggcctattaaactaatataccctcttcagaagttgcagaacactgtgccaaactttggtgggtgttctagagtctacaacaaatgtcctgtttcttcctagctttctctcttcctaaaggagaacgcgaggttgtcactcactcagatgaaggaggtgtggcctctcttggtctggcccagcgagtaccattaagagaaaaccgagaaatgtcacataccagggtgagatgcgactctcctgggatggtgggtgggaggtgcaggagttgcttggaagaattttgctgcagcagccaacactgagaattgtaggtagagccaggaagtcctgggcctcaggatgttactgggtaggtttaccccagatgcacccagtccctctccaatgtgagactgacctctctttatcagatgtctggggcctagggtgagaggtcatatttgtatcaccatcagatcagtgctaagggtgagacagatctgacacttgtcagccaaaagcattcatcccttggctccacaaatatttactgagtagcaccagcctactgagtgccaggctctgttctaggctctggacatatagcagtaaacaagttcatattctagaagggggagacaagaaataaacacaggtataaaataaatagtgtctcagatgatggtaagttctctctaaaataataataataataataataaggcactaaaggagaattgggagcaggggagttggtattgcaatttaaaatagatttgtcagggaactcttactgagaagatgatgtttaagtgaagaccaggggttggaggaggagtgagatatgttgatatctgggggaaggaacattccaggccaagagaactgaagaggtaaaggccctggggagggaatgtgcctggtgtgtttgaggatcagcaaaaaggagaggccagtgagattgaagcagagtaagaagaacagtaggagatagggttttagcgataacacgatcagattgggtaaggaattgtacaccagtgtaagtctttggcttgtcttggaatgagtggaaagccatggggagaggggttgatcaagaaagtgacatgatttgacttaggtctttttttttttttttttttttttttttgagatggagtttcactcttgttgcccaggctggagtgcaatggcacgatctccgctcattgcaacctctgcctcctgggttcaagtgattctcctgcctcagcctccgagtagctgggaatacaggcatgcaccaccacgcctggctaattttgtatttttagtagagacaggatttctccatgttggtcaagctggtctcaaactcctgacctcaggtgctccaccctcctcggcttcccgaagtgctgggattacaggcctgagccaccatgcccggcttgacttaggtcttaaaagaatcacactggctgctgtagtgagaacacgatataggaagacagccaggcgtggtggcttactcctgtaatcccagcactttgggaggccgaggcgggcagatcacgaggtcaggagatcgagaccatcctggctaacatggtgaaaccccatctctactaaatatacaaaaaattagccgggcatggtggcgggcacctgtagtcccagctactcgggaggctgaggcaggagaatggtgtgaacccgggatgcggagcttgcagtgagccaagatcgcgccactggactccatcctgggtgacagagcgagactccgtatcaaaaaaaaaaataggaagacaaagggggcggggatcactcttccacctttttcttcttcacaggacagccatgactcccacctgatgccctcccctgcccctgtggcccagcccttgcctggccatgtggtgccatgtccatcaccctttggacgggctcagcgtgtaccctccccaggccctccaactctggtttgtgtcaacaactgggggctgggcaggggcagaacagtctggccggagatccttgctatgtctgggttttgtccctgctcagccacccacatctctccccagacctcatattcagtgttgcggcgtctcaccgttcaacctaaaacccggttcacacccatgccatcaacccccagagttcagcaggtaagagagggcatggagaggtggctggcataagtcacagctaggggagaaaggagatggatgggtacaggagagagaagacagaagcaaggggaggctgagtgccatctgtgggtgtcagcccttgctgacatctcacttctgtgccaggcccagtggctgcgtggtgtctcccctcagtcctgctctgaagatcctgccctgccctgggtaagtatcagaagcttccccctactgagatcccttgccctgtgctgccagcctggaggcccaggagtttgaggcacacgtgctttctgggccaggcatggtggctcacacctgtaatcccagcactttgggaggctgaggtaggaggattgcttgagctcagatctttgagaccagcctgggcaacatagtgagaccctgtctccactaaaattttaaaaattagaaagtgctctctggaaaagctgcctaactctcactgcttctctgctgcccctcctaatgtacatctagggcctctcagttaggggcttcaatccattcctcatgagggtgggactcaggctggtctttctcctgccccagcctggcttgcttgtgtgccttgttccttggtgacaggagcaggttgccgtccggttgtttgaccaggagagttgtataaggtcactggagggttctgggaaaccaccggtggccactccttctggaccccactctaacagaacccccagcctccaggaggtgaagattcaagtgagtctgtgtggccaacagctttgatgtctattgaacagtgactgggctgaggaagagggaaaagagatgggggatcaggaataggacagtgtgggtagactactgaacgcacatcttgatgtcacactggggtgctctctcccaccacagcgcatcggtatcctgcaacagctgttgagacaggaagtagaggggctggtagggggccagtgtgtccctcttaatggaggctcttctctggatatggttgaacttcagcccctgctgactgagatttctagaactctgaatgccacagagcataactctgggacttcccaccttcctggactgttaaaacactcagggctgccaaagccctgtcttccagaggagtgcggggaaccacagccctgccctccggcagagcctgggcccccagaggccttctgtaggagtgagcctgagataccagagccctccctccaggaacagcttgaagtaccagagccctaccctccagcagaacccaggcccctagagtcctgctgtaggagtgagcctgagataccggagtcctctcgccaggaacagcttgaggtacctgagccctgccctccagcagaacccaggcccctagagtcctactgtaggattgagcctgagataccggagtcctctcgccaggaacagcttgaggtacctgagccctgccctccagcagaacccgggccccttcagcccagcacccaggggcagtctggacccccagggccctgccctagggtagagctgggggcatcagagccctgcaccctggaacatagaagtctagagtccagtctaccaccctgctgcagtcagtgggctccagcaaccaccagcctgatcttctcttcccaacacccgctttgtgccagcccccctatctgctcactccagtctttgagacccccagcaggccaggcaggtaaggagttggctgggaaggagtgtgaacacaagaggtcctcacctcactgtgagctgcacacctgccctgcccctaccccaggcaatctcatgcttccacaccttccaccctggcccagcctggctctccctcaggaagaggggaggggctgcacttccagccctgtgctcctaattggcttggccgttggtgggggaggaggagaggacagtacatggtggaagtataggaccccagacctccctctaaattttccatgcccctcaggcctcagcaatctggcccctcgaaccctagccctgagggagcgcctcaaatcgtgtttaaccgccatccactgcttccacgaggctcgtctggacgatgagtgtgccttttacaccagccgagcccctccctcaggccccacccgggtctgcaccaaccctgtggctacattactcgaatggcaggatgccctggtgagactccaacccacagcccagctgtggctgcacagtgagcctgatgggaggtggggaacagggacagggggccacctgggcttcttcacagagaggtcagcaggaaggcttggctacagtgcaaggttggctgagctgtgacaaggtcttctctgtctccagtgtttcattccagttggttctgctgccccccagggctctccatgatgagacaaccactcctgccctgccgtacttcttccttttagcccttatttattgtcggtctgcccatgggactgggagccgcccacttttgtcctcaataaagtttctaaagta

SEQ ID NO: 96 - DNA, 32744 bp, Homo sapiens
  source 1..32744: mol_type = other DNA
aataaatttctctgtgattggttggtgaaggttttcaaaccggagctgtgggcgcggcgctgctctgccgttgggtgaggcgcggagcgaagtgaagggtggcccaggtggggccaggctgactgaagtgagtagtgggggtgccagaccaggtgcgtctgccgctggattgtgataggaagcagagtgttcgtgtggtgagccgtggccgccgcgggggtccgggacagcgggacagcgggacaggctggcagccacagcctctccactcgggcttttctggggtgggggtcgtggcaggtcgaatggacgcggcctgggagggtcgggggcttctgtcttggcgccgggttttgtggaaagccgggggcgtctttttgaggtggtggctggaccagggcaggagtcatcctaaacaagagtctctcagtcagatacgagtttaagagtggttggagtgacaccccatcgttttcgaagggaagagccctggtgtttgagaggcccgggcggcctgcagtggagcccctctacttcgtgggtctcgtatgtctagggaggcaaggcaaggcaatgacatcttgtccttctcatcctgattcttaccctcagtaacaacgaggccttacttgtacactttcacgtacatttctcttcacaggatttcatccgtaggccgagaggtgtgtgtcggaaagtgggggtaggtgggtagataagccctttttttttttaagaaagcattatctttctaatgtgtcgggtaaataagctttccgagttattgtaggtgtttagagaaggcgcctttcctgtagcttaatcattcaataagtatttatcttttggaggggacttaaaaaaatttttgtatatttagggggtacaagtgcagatttcttacatgcatatatcgcgtcgtggtgaggtctggtctcttagtgtccccatcactcaaatagtgaacattgtacccaatacgtagtttttcaaccctcagccccctccaccttcccatcttttgtattctccagtgtgtattattccactctgtatgtctgtgtacccattgattagctttcacttataagtgagaacatgcggtatttgacattctgagttatttcactgaggataatggcctccagttctatccatgttgctgcaaaagacgtgatttcattcttttttatggctgagtagtattctgtggtgtatgtctgtctatatattacattttctttatccaatccttcgttgatgaacacttaggttgataccgtatctttgctactgtaaattctgctgtgataaatatatcaatgcaggggtctttttgatatactgatttcttttttttttttgagacggagtctcgctgtgtcgcccaggctggagtgcagtggcgcgatctcggctcactgcaagctccgcctcccggattcacgccattctcctgcctcagcctcccgagtagctgggactataggggcccgtcaccacgcccggctaattttttgtatttttagtagagacggggtttcaccgttttagccaggatggtcttgatctactgacctcctgatctgcccacctcggcctcccaaagtgctgggattacaggcatgagccaccacgcccggccgatatactgatttcttacccttatacccattagtgggattgctggattgaatggtagttccatttttagttctttgagaagtctccatactgttttccataaaggttgtactagtttactttttttttctttttctttttcttttttgagaaggagtcttgctctgtggtccaggctgaagtgcagtggtgcgatcttggctcactgcaaactctgcctcccgggttcaaatgattcttctgcctcagcctccggagtagctggaattacaggtgtgcaccaccatgcctggctaattttttatttttaatagagatacggtttcaccatgttggccaggctggtcttgaacttctggcctcaagtgatcagactgccttggcctctcaaaatgatgggattagaggcgtcagccaccatgcctggcctgtttactttcattcaataggtatttcttaagtgcaaagtgtaagtagaagacagtcttatttggtcttaaagaatgtgcagttaatttggggtaacagaacttaaaaagataactggtgagtctggtaagcctatacactgttgaaagtactgtgcattagtacatcccttttagaaaactttttggcactattaagagccataaaatgtttttacaccctaatatagcactcctagccttggaaatctagtctaaggaaaacagtcacctgaagaaaaatattgtccataggaatgctcaattcatttattcaccaaatatttattagtcatttaccaaatgtcaggtactgttctaggcatcagggaagaaaacacaaaaatctccgctttcttggaacttaagctagaggagaaacagacaataaactgaataaatatgtaagtatgttagatggagagaagtgctttggaacaaagtaaagcagggtaatgttagagaaaggctgcagtttacaataggatggttggaaagacctcactgagaaagcagcatttgagtaaagatatttgaggtgagagagtgaccatgcaagagattccaggcagaggtaagtgaaaaactggaaatgacctaaacgtccaaagaagagaatagttaaatagttgttcatcaactctttagaacttaatggaaacatgatagaagcaaaacacaaaattatatgtaatgtatgattgtaacaccatgaaataagagtgtaaaatgggcaaagattagatcagatggtacatatagttgtttaggatagtgagatttttgttttgctattaattttttgtttttgttttcgttttgtttttttttgagacagagtttcactcttgttgcccgggctggagtgcaatggcgccatcttgggtcactgcaacctctgcctctcgggttcaagcgattctcctgcctcagcctcctgaggagctgggattacaggcatgcaccgtcatgcctggctaattttgtatttttagtagagacagggtttctccatgttgatcaggctggtctcaaactgccgacctaaggtcatccacctgcttcagcctcccaaagtgctgggattacaggcgtgagccaccacacctagcctgttttactgttaactttttgaacatagaagattaataataaacagtatttttgtatctgctaaatgaatgttatagataataaaggaaatcattttggactgaaatggttagggaaggcttcagtgaattggtgagacttattctagaccttgaaggatggaagaccagaataggaagaattcacagggaaaaaaagaggtattcagtatgctgaacttctagtaattttctgaaaaatcacaattcaaatcttcccttccttattttagtcttcatgttggattgagaacattttgtttactctctgcaagtgatttgcttataaagaacatttggtttcaagataatccttctgtccgccagttgtattagagactttcgatacagtgaagcagaagctggacatttcaggaaaagaattgtcctcacattgtcctcaaatgtgttcctatgaaaggatcttaaagtactgagattatctttgagaatggttttccttgacagcagggaatctatattgttgatttcttggaaatctccagatttagcaatgtttgtgggaaagtttttcattaaaacactttcctgaaaaactccagcaacctttcattgctttgtcttaaagtatttaacacccttgatgcatctaaaaaacctgatatataggtctcttaataatgttgtttgaaggaggaggaagaagaggatagagacttttcccaggataccctgcagtaagatctgtaatagtctgtttttctgaaggatgatatctacctcttggctgggtgattgaaattaaattgggggctcaaagcaatcacatccagctgagactctttcatggtgtttccagattgctcccttagggatactcacagattgggaatctgtaacatactgacttctccacctctggggttccccatcaataacagctgagattctctagcaccttttggtttaaagtgctccacaaactgagtttcttgctgcacgcagggatcgtttcagctttcccgaaaaggcagcagtctctgttgtggaaagtgacagctgttttacagctgcaaaagcaatgtactacaatatgactttgtttttgtttcctttcacattagtgtatctcctagctatggactaaataatacatggggggaaataaacaagtattcatgagggtgaaaatgtgacccagcaggaaaattacaactattttcaattgacgttgaatagggtgagtaaattttagctttttgagttacaatttggctgagatatcagagttagtactgatatagaaagatatttttgtcatctataaataattcctgagagtcacttctgtagaatgttaataaaaatatatggtcccctagcatataaagagaagaggattatattctgctagtgccatttttggattaccctaagtaaatctatgttagaggaaaaaataactcttcagaagcagcaaacctcatctagaacagcttgtttaaaagcctagacctggccaaattttgctgtttccttgattcttcttggtctgggttccagctataatttgtgttttatatgtgttgctgtttgtatgacatgttatggtttgcaggaggtctctgagtaggtctgcaacatatatggtctaattgatatttttgtaacttatctcttcaatgtgttgggttggagagaatatagattttggactcagacctgggtttcaatgagaactcgacatttattggttaatttaaggtttctggacttagttgcccattgtctgtaaaatggagataattaagttagtgaggccaggcatggtggctcacgcctgtaatcccagcactttgggaggccgaggcaagcagattgctagaggtcaggagttcgagaccagcctgaccaacttggtgaaactccatctctactaaaaatacaaaaaaaaaaattagctgggcctggtggtgggcacctgtaatcccagctactcgggaggctgaggcaggagaatcactcgaaccctgaaaatggaagttgcggtgaaccgagatggtgctactgcactccagcctgggtgacagagcaagacaccgtctcagaaaaaaagtcaaattcacttaaagaaaaagtgtacgtgaagtgtctagtttagtgcccgaatcatttcaaagcacctagtaaatactggattcttttctttctaattgtatagtattatttttaaaaatggtctaaaattctgaatttactgatatccttatttggagacagcctaggggggaaaacacctagatttgagaatcactgttttaggatggaagtaacaactatcagaccaaaaccaaacctaaacaaaagaaactcacttcataccaactaaaagataccttatattttggtagtgagattgtaaacttatacattttaaaatttttgtaatattctatgaggtaaatagagcaagtgttattgttttcactttatagatgagtcatggaatttaagtgatttactgaagattatactactggtagatagaagagctaaaggtttgtcccaggacctttttatttatttatttatttatttatttattttaagagaagggggtcttgtgatgatcagggtggtctcaaactcctagactcaagtgatcctcccacttcagcctcctgaatagctgggactacaggcacgcaccaccacacccatcttgtcccaggacttctgctccctctcccgcttttaactgttctttttgctttaaactatattacacgttgatgttgaggtagaatggaaattcttttgaccatagcatcacagatatgtgtgtgtttgttctctgaattaacacttatcaatttttttttgtgagcatcatattaaatgctacatgcttgtgtgtgtaatatagtagtgccgcatgtaaggtttctcccctcaaatttatattctagctgggacacagggcagaatcatatggtaaagtttaattcaagtgcaaagagtttgtatctgagtggcaactgcctgaagcagtaggggaaggactggaggaagggagtgcaattgaagtgagtggtgacaacctgcaagtgataagggggtgggtatggtagatacatgagagaagagtacacaaggtttagtgattatgctgtgggaaggggaggaaccagaggtgattctgaagtttggaactgagcgactgagagaatgataaaaatagggaaatcaaaattggaagtcagtagggtatgggatagggtaggtcagtgagtagcgtagttgatggacatgaacaggaagagtagaacagtgtcaggaggctgaggccggagaatcacttgaacctgggaagcagaggttgcagtcagctgaggtggcgccagtggactctggcctgggggacagagcaagattctgtctcaaaaaattaaaaaaaaaaaaatggacaagagaacaggttatattgtaatttaagacttaaaaccccccctaaaaaagcttttttttaaacaaccagttttcaacatcctagcaccatgaaattttcctttttgaattcttggacagatagaagttttgccgtggtattgagctgtcttatagtctcacgatatataagtgaatgccgagatgatagaaagtaataccttatattaaaactactgattagagtcttccatttttacctcaggagagccaaaggaaatcaacatttgaattgactacccaatgtcctgcccctgtttctgtcctgtagcacttagggtatgttgcctatttcattatatgttaaatccatggcatctccatgaattccacagctcttcctgccggttttaatgctatccttttagttttgttcttagtttagagaaagatctttgtaataaatttgttggtctggttgcttagcagcttgctgtgattatgtagcttggaacagatacttgccgtttgaaaatcttggtttccggccctgattcaggtatatgttgcatccaggcttggaactgagaactttttttctattatagcaattatcatatgagtataaatgtataattctgcagcatttaatatataaaatatcttcatgtttatatattcttttttttttttttttgagacagagtcttactctggcacccagactggagtgcagtggcaccatcttagcttactacaacctctgcctcccaggttcaagcgatcctcctgcctcagcctcccaagtagctggaattacaggcacacataactgtgcccagctaatttttgtgtttttagaagagacggggttttgccatgttggctcaggctagtctcgaactcctgacctcaagtgatccgcccgcctgggcctcccaaagtgctgggattacaggcgtgagctgccgtgcccagcctatgttcatatattctttgtcctttgtgcttttttatatattttttcttgctctcatagcttgtggtgcaatcttgtaaacattgcaaaatcactaacccttcataagagttcttaaaattttatttaggaaataaggacctggactagaatgttgaagcattggttaagagaaacacaagaatcctttaatggtatttctgaggacattaaatttctaataaaatttgactttttatttcatttccttgatagttttcataacatccagttaatgtctttctttcttgactgttaagtgaagatcttatttcctcaaagtgttcccagttaaagtctatttggaatagaaccgcctgtaacgacactgttttttctatagtatcagcaggcctttgaggggaaatacaaagtctgaaattcactatacaggacacagtagcaaatgatttttgctttgcccttcgaactgtgaaggtgctgtattgtctctctgatgccagaatgtggtacaacataatcctttgcctctacttagtataaatttattagacgtagttcctgcacgcagcccagcagagagccctgtattacagaaataattcttgtgctgctgagctggcgattttcccacttaatcactcatgtgacgtcatctgtgcttttggtaggaaatgtgctgaccatgtcctgcattttaaaaggcagttgcaacaggggcattagctaaaaatgaaattaaaaatagatattttaagttacattgtaggtcttcaaagcccacaaggaataaactggcaaaattattatattaatcaataggcttgacttgaagaaccacattttcttgttggtcagtcacttgctaatgaactgacatgctctttcctatttgttttctgctccaagtgattggaggggctgttatattcaaaggtctgaaatggttttctaattttcagatgagtcttaaacattccaagtttgtttttataataagaatcacacaaaacatctgttgttagcttgagattcttataatggtagttataaatggaagagtccagatgttggtcactaatggctggattgctatagaatcttttgttgtgggcgagaaggcaggacccctaatgtatatttgatttcttggcagaaagatggatactatgatgctgaatgtgcggaatctgtttgagcagcttgtgcgccgggtggagattctcagtgaaggaaatgaagtccgtaagtcattctgagctggcctgtccaaaggaaaaacagatttcaaatttgggatttttacaaagctgaagtattttccaatcttaaagttgttttccatttgggttacctaaaaagaaagcagtgatcacttacgtggtcaaagcctaatgggcactcattctaaatggtcactaaaattcttttctatagctgctcttaataggttttagccaggcttttttattatctttatttatttatttttttgagatggagtctctctctgtcacccaggctggagtgcagtggcgacatctcggctcactgcaacctctgctccccgggttcaagcgattccttgtctcagcctctcgagtagcagggattacagacacacgccaccacgcccggctaattttttgtatttttagtagagacgggattttgccatgttgcacaggctattcttgaacttctgacctcaggtgatccgcccgcctcggcctcccaaagtgctgggattacaggcgtgagccaccgtgcccggctgcttttttattatcaagattctttttccactgaatagttggcactattttctgtgccatgaactgggaaaaatttactaggatgttgcttttttctttagagtagtagttgtcttttttttatcctggattttctttgtgttctataaagcattttcagttgaagtgggaaaaattcataatttcttcttttttctttttttttaagaatctcattctgtcacccaggttgcgccaccatgcccagctactttaaaaaaaatttttttttaaatttttttaattttttttttatttttgagatggagtcttgcactgtcacccaggctggagtgcagtggtgcgatctcggctcactgcaagctccgcctcctgggttcacgccattctcctgcctcagcctcctgagtagctgggactacaggcgcccgccaccacgtccggctaatttttttgtattttcagtagagacggggtttcgctgtgttagccaggatggtctcgatctcctgacctcgtgatctgcccgcctcggcctcccaaagtgctgggattacaggcgtgagccactgcgcctggccttaaaaattttttgtagagataaggtctccctattttacccaggctagtgtccaactcctggcctcaagcagtcctctcacttctgcctcccaaagtgatgagattataggcatgagccaccaggcccagtccataatttctttttgaaggagatactaggcatttgctttcacctacttcatatatttgatgctaaataattaaggattgagagccaggtttggtggtttgcacctgtattcccagctactcaggaggctgaggcagaagaatcacttgaggccaggagtttgagaccagcttgggcaacatagcaagactgtctctgaaaatattagcggtcgggcatagtggctcatgcttgtaatcttagcactttgcagggctgagatgggtggatcgattgagtccaggagtttgagaccagcctgggcaacatggcaaaaccccatctctctctttttttttttttttttgagacagaatctcactctgtcacccaggctggagtgcactggtgtggtctcggctcactgcaacctccacctccctggctcaagcaattgtcctgcctcagcctcctgagtagctgggattataagtgtccgccaccacactcggctaatttttgtatttttagtagagatggggttttgtcatgttggccaggctgatcttgaactcctgacctcaagtgatcagcccaccacagcctcccaaagtgctgggattacaggtatgagcacctggccacaaaaaccccatctctacagaaaaaaaaacaaaaacaaaaaaacccgccagtgtggtggcatgctcctgtgatcccagctacctgggaggctgaggtgggaggatcactggggaggcagaggttgcagtaagctgagatcacactcctgtactccagcctgggacagagcgagaccctgtttcaaaaacaaaaaaattagctgggtgtggtgacacatgcctgtggtcccagatactcaggaggctgaagtatcacttgagcccaggagtttgaggctacagtgaactatgattgtgccactgcactcccgcctgggtgaaagtgagacttcaattcctggggggaaataataaagagaattgagatggggtggtgagctggggagaaaaaggaggtgctaagaaaggaacagtctgggaaataaattagcaagaaagaataatggggatgatggtactgacatgtgatccaagggaattattctataccagcttctctttgtattaccatcctgtcctatttcagattttcattaatacctaatttagtaaatgttgctctcaagtcagcctcactggtgttaatgtaagaactgtgtcttgaactttttttatttctatagtacttacttgtggtatcttgcttatgccattcaatattttttttgaattgattgatgtttttaatagctcttatccacttacaggcctttcaaaacaatattctattttctctctctaatagctgctgcatgaccctgtcatctggtaccagctcagtaaccacaatggcatactaattaggtttctctttgaggtcacatcatctcagaagatggatcagagtgtggtggggactagagtagggaataagagatattaaaactcagattcattcagcaaatattttgtgagaacctatcagggcttctagcatttttgagttgagggaaagggatgactaaatggtgtcatggaggaaagggtttgagctgagctttagctgtagggtagaatcccaagaggcagagatgaaagggggtattttagatcaggcgacagcctgagcagagcaagagggtgtgggacttgagggaaataggagtaagggggtgtgacataatcagaaccgtgctttgggaagattaccctggcagaggtgtagtctgcattagaggtggatgctggtacactgactaggaatgacatggttgtcatagctcaggaaagaggcaataacagccctaactggaatggtggttatgaagatggaaggagggagaaatgggtagaagagattgtgataataagacctgtagaaggaggcagctgatagaatatgggggcagagggaagaatctgtggtttaagagtgttgataactagtgctggcttttacctgttatttctgtgtctgtttttccacctataaaataggaatttaaacatctttattttctttgtgggagtgctatgaggatttgggcataaattgagatattagttgtgaaaatactttgggaaatgattatgccaaaaatctcccaagatatttatttttacagaaatcctgattttattgtataagcaaatttttaccttcccatttatttctattataaaacagaggtacattttacctccttctccagatctctaatttggaatgttggctttttttattttttatttttattttttgaaacaagagtttcactcttgttgcccaggctggagtgcgatggcgcaatctcagctcactgcaacctccgcctcccaggttcaagtgattctcctgcctcagcctcctgagtagctgggattacaggcatgcaccaccacacctggctaattttgtatttttagtagagacggggtttctccatgttggtcaggctggtcttgaactcccgacctcaagtgatcctcccaccttggcctcccaaagtgctgggattacaggggtgagccaccgcgcccggccctcatttattttttattttttttgaaacagagtctcactctgttgcccaggctggagtgcagtggtacgatctcagctcactacaacttctgcctcccaggttcaagcaattttcctgccccagcctcctgagtagctgggatttcaggtgtctgccaccattcctggctaatttttgtatttttatttttatttatttatttattttttttatttttttgagatggagtttcactcttcttacccaggctggagtgcaatggcacaatcgtggcttaccgcaacctctgcctcccaggttcaagtgattctcctgcctcagcctcccgagtagctgggattacaggcatgtgccaccacgcctggctaatttttttgtatttttagtagagacgggatctcaccatgttagccaggatggtctcaatctcctgacctcgtgaaccacccgcctcagcctcccaaagtgctgggattacaggcgtgagccaccgcgcctggcaatttttgtatttttagtagagacagggtttcaccacgttggccaggctgatattgaactcccgacctcaggtgatccaaccgccttggcctcccaaagtgctgggattacaggtgtgaaccaccatgctcagcctagtttttatttttttggagacaaggtctcgctctgttgcccaggctggagtacagtggtgaaatcatagcttactgcagcgttgaactcctgggctcaagcaatcctcctacctcagcctccagagtagctgggactataggctcatgccactacaccagctaattttttttttttttttttttttttttgagacggagtctcgctctgtcgcccaggctggagtacagtggcacgatctcggctcactgccagctccgcctcccagattcacgccattctcttgcctcagcctcccaagtagctgggactataggcgcccgccaccacgctcagctaatttttgtatttttagtagagacggggtttcaccgtgttagtcaggatggtctcgatctcctgacctcatgatcctcctgcctcgtcctcccaaagtgctggatttataggcatgagccaccatgcccggcccacaccggctaatttttatatttattttgattattttattttgaatttttattatttattttgtctcccaaactactataaacactacttttgttttaattctattttttgtagagacaaggtcttgccatgtttcctgggctggtcttgaactcctgggctcaagcggtcctcccacctcggcctcccaaagtgctggaattacaggtgtgagctaccgcacctgggcaaatgttggcttttgaggaactaaagtgaccctgtgttttttagacactagaatcaggtttgtgcatccaccccagtgtctgtcctcttttttctttttttttttttttttttgagacagtctcactctgtcgcccaggttggagtgcagttgtgtgatctcagctcactgcaccctccgtctcgtgggttcaagtgatcctcctgcctcagcctcccaagtagctgggattacaggcgcatgccaccaagcctggctagtttttgtatttttagtagcgatgtttcaccatgttggccaggctggtcttgaactcctgacctcaagtgatccacctgccttggcccaccagagtgctggcattacaggcgtgagcctctgtgcccagcctgtactcttcttagatccttaggaattccccacatgcccaagtatcccttgactccttactcttgcctttcatcattaacttcattcctctttctcttttttgtattcattttttttttgagacagaatttttcgctctttgttgcccaggctggagtgcaatggcgagatctcggctcactgcaacctccacctcccgggttcaagtgattctcctgtctcagcctcccgagtagctggaattacaggcatgtgccaacacgcctggctaattttgtatttttagtagaggtggggtttctccatattggtcaggctggtctcgaactcccgacctcagatgatccacctgtcctggcctcccaaagtgctgggattacaagcgtgagccacggtgtctggcctgtattgttttttaaaaagctaagtccgggccgggcaaagtggctcacacctgtaatcccagcattttgggaggccaaggcaggtggatcacttggtcaggagttcaagaccagtctgaccaacatggtgaaaccccgtctctactaaaaatacaaaaagttagccgggcgtggtagcattcacctgtaatcccagttacttgggaggctgaggaatgagaattgcttgaacccaggaggtggaggttgtggtcagccaagatcatgtcattgcactacagcctgggcaacagagtgagactccatctcttaaaaaagaaaaaaaaaaaaaagttaaaaaaagagagctaagtccaagttacaggaagatcagaatgaaagttaatattttaaaaaagatgactttaatagcatattttgttgtcttgttttctccagtccacacagtttttatgttctatttttaatttttcataagctgcctgagctttttaaaaaaaatcattggtgtataaattaggaataagtataatttaacatttatcaggtgcctgttgtgtgccagtgacatactaggtttgtgctacactatgcatagtaggaaataatgaagtatatatgacatattgcctgtcttcaagaagattatggtattttagtttcagagacaggatttttttctcatgaaacagaagatagtacaagtatcaaaatatatgcttttgggtaatctagaaaaatttagtgtgtagcaaactgattaggaaaagattcacagaccagatgggacttggtaaatgggtatgtaataggtagggcattccatttggagtgcatagcttggtcacaagtgagaaggcaggaatgcctctgttctgggggcagggacagactggtttagctagaggggtatttattgcatagtggtgggaggtaagtttgattaaactggtaaggtggtcttggatgctggtaaatttaatttgaacagcggcttttcattcattcatttgttcaacagattatttcaagtgtctactgtgtgctaggcaggttacaacactggagataaaagagcaaaggagacatagggtctttgtctttaagaagcttagagagggtagtagggaaggcaaatggaagagcctgttcaaaggcctccgggagtaaatggaaaaaaaaaatcaggatttctggacccacttaaatttgcttgctgagctatgaaccaaatcctgatttttaaattttaaataaatcaaagatcaccctcaatttgttttgaggaaatttcccttctctttcctcctttttgataggggcacttcatagtttagggtgtacgtaactttttaaaggaggtactgtaatttgaattttataaatctttttttttttttttttttttgagacagcatctcactctgttgcccaggctggagtgcagtggcacgatctcagctcactgcgacttctgcctcctcgagtagctgggattacaggcgcacaccaccacacccagctaatttttgtgttagtagagacagggtttcaccatgttggccaggctggccttgaactactgacctcaagtgatctgcctgccttagcctccccaaatgctgggattacaggcatgagccaccgtgcccggcctgaattttataaagcttttaatgtgcacttcatggcaggctggtaccaagctgaattgtgattcaccaactgaccaaaacagtgccatgattattggtcttcaacatcaaaattgtttctgatctatggcccaaaatgccttctgacccaatcccagcaaactttgctcatagcagaattgtacataaaaatagtatctttcggccgggcatggtggcttatgcctataatcctagcactttgggaggctgaggcaggtcaatcacttgaggtcaggagtttgagaccagcctagccaacgtggtgaaaccccatctctagttaaaatacaaaaattagccaggtgtgatggcacacgcctgtagtcccagttactcaggaagctgaggcaggagagttgcttgaacctgggaggcggaggttgcggtgagccaagattgtgctactgcactccagtctgggtgacagaggaagactgtctcaaaagtgaaaagtaggctgggcacagtggctaacacctgtaatcctagcacttttggaggccaaggcaggtgaatcacctgaggttaggagtttgagaccagcctggccaacatggtgaaaccccgtctctactacaaatacaaaaattaactgggcatggtgacacacacctgtaatcccagctactcaggaggctgaggcaggagaattgcttgaacctgggaggcggagattgcagtgagccaagattgcgccattgcacttctgcctgggcaacaagagtgaaactctgtctcaaaaaaaaaaaaagtaatatctttttttttttttttttttttttttcacatttctcacctgcacacacaaaaagtaatatattaatcaggtatgtaaatgttctgctttgggtctgacttaaactaagctgaagcagtaatttaataaaaggagtatcctaaagaacaaacaaaccagcaaaattaggtcagatgaaaatctttttattctcaaaattgtttttcagttcggtaaatattttgagtgtgtatgcatacggtatttagtttgcaaacatatatgtttttttctttaagctaaaaaaaaaaacccacaaaaaagtagtatgttccagactaacccagcatattatttcttaaaactatttgaattgtaatatttttttaattgttgatatccgcattgtttaagataactaggtcataataacctattttgctgaaatttgtggtttgtaaaaactaaagtttccttattacttggtttttctggaacaaattggtatcctgatttgtaagtttgatatttggtcaaatgattaaaattgtttaaaaaggactatgtattgtttctatgcttttaggttaaattcataggggaaaagtgcccttactacctaagaatctgctagctgtgtgtgaatttggcctagtttcagttttaactgggttagtttgaccagcagcagatgtacaccttgagaccttcttccttgatgttggtggagagtgatccttagagatagacggaggttaactagaaaattgtaaggcacttttgcaaatacattgcagaacagctttgccaatagcaggagataagaatgaatgccaacagggttatcttcttcctttgagatgctgccttggaagtgatgttctctttgcagacatttgaagagacttcacattctgctatcagggatgttccaaaagctagtttgatcttctcttcctgtttttttttttttcaactggaatgtttacatacccttcagggcagtgttaaacagcaaaagcaaattggctttttactttcaaatcaatatttgtataattatatagccaaatggaattgtaggtctagacatctgtaatattaatctacatctactggagcatattacagcagttacatttgaatttgctgtttaacatctctctggtgcagcaatgcgtgactgtaaaggaaactgtttttgttttatagctgtaactgtcctggtgcatgacagctgccccaaaggtatccccctttgattgccttctgttcaggagctttcagtgttagtgttacatctggagccaggtgactaatgagttacatattccatagcagatgccactggctaagccaaaagtaagtggcctattgaataggaattgctacccacaaagttctcatcagagtgacaaacatatccaggatctgctcctagttattttcagctggatttgcccatagttcagctggttccttaattatgaatttcaaataaagctaaccgtaggactcatttattagagcagttatactctgtttggtgcttgaattattaaagattccccctttcctcagaatttatccagttggcgaaggactttgaggatttccgtaaaaagtggcagaggactgaccatgagctggggaaatacaaggatcttttgatgaaagcagagactgagcgaagtgctctggatgttaagctgaagcatgcacgtaatcaggtggatgtagagatcaaacggagacagagagctgaggctgactgcgaaaagctggtgtgtattgttttccgtgctagaacagtgatgatgcaggagggggaaggcattgtctgacagtttccacttgccaaatatacctagtttcttcttccacattaaagaactgaaagtgacctgttctttaacagcttgcccatgattagagctgaaattgcagactaggaatcttgttcttcataatttgaaatttaaatgtttttgtcacttagacttgaaacttacttaacagacagatttcaaatgagaacttaaagaattagaggaaaagggagggagggagatcctaacgtacttgatctgtcacaagttattggccatccttcattgtttattttaagtgctacccggaatatccatccttacatgagtagctggtactttgtcatacatacaggcaagacaactgtgactcttcttttcatcacccctctctaattcagggtaaaaggctagatgtattcaaccagttgagcaatgtgactgacacagaacactatcattttgatgtgccaggatgggtcataatgcaaaggaaagcctttactgggagggactaatccatcttggtatacagtgttagatgcctcagtaaactcaaattgtctggttccagtgcattatagctttgtatccattttaatgcattttgctccactactttgagaggtgggtggctgctttgatccgtagaagccaatatttgtcctgataaaatgacactaaagtgtttttgctatgtgaaatctattttgggactctcattttgcattattctcctcttggattagcaggttaatccaaaagtcttgtagcagaaacttcgctgttctagatgtagttcattttaccagtcagaaatcagagacacaatctgggtttgatgtgaattaatatgctattggtgtagcagccttcctgaaggtccatttgcataatgctgcattttaatgtcttctggtctgcctgtcccataaacttgaggtgaagctttctcccctggctagttatgatgttttactttgctttggtctgtaggaacgacagattcagctgattcgagagatgctcatgtgtgacacatctggcagcattcaactaagcgaggagcaaaaatcagctctggcttttctcaacagaggccaaccatccagcagcaatgctgggaacaaaaggtggaggaactgcatctgttgttatcctatcacaagcaacacaggctgtcagatattcttgttatctgaattcttaaatatacttcttctagaatgtgtgctgaaaaaagcagaaaaagattttgtggggagagtaggtggggaataaaggcacagggatgtccctgtatattttattttattttatttttaaatctttcctaaggatgttgtttcaccatggatacaattttgatgttggtgctaaattgcacatcaataactaatcctgtgcattgctaagaaacccaaaggtgaaagtggcagttcagcaatactttcagtgtttactctccagagagctcttacagctcttctggtttagaaaggcctctgtgagccaagaccagacaataattttggttccactgcaccactgtttaaaatagtctcaaccaggctttgaatttaacatccccagtacaatatgtagggaaaggtcagctatttattttgttgcctggttgttttatggggaatctttataactaagaagatgtacaggcttaatttcttaaaaagtcagtgttgggtaatactcttgtttgtagaaaccagcacagttgggatcaaattaaacttcattcccttgattttgtgaatttggagtagcctgtaatacaaactcggtagagaatagcacccataaccctgactaactttcaactgcccttataaggtctttgctgaaaaagcaactgtgttgcacctgtactcatgcacacacactcctccgtggaaaccatacaaagtagcctaccacagggtttgagattgtaattgtctctatagtgaagattttgctatgaaattaactgatgttacctgaccagtaggacttgttctgaatgttggtgaattttacattccacagtctaccatgtctaacgttgtattgtttcactgatctagactatcaaccattgatgaatctggttccattttatcagatatcagctttgacaagactgatgaatcactggtaataaacatttgatctctgagaattacctacttttcttacctctgcttccccaggaatatctctcctgtcttctcttctgaacatcctatattactattttattagttgatgtgttatagattctgagctagcaatttaaaatataaatccacatgagctataagaggctggcttatatattagtttctgaagtgagaatatataattcagaatttggcataagttgagttcatttaatagatctctgtgtgccacatgtactaactgattatattttgacttattaaagccccagctaataataaaaatattagcaagactgtatgtcgtcagggtttatttgctgctcttaaatagacttgtgccttatttctgaattagtttggttcttggggaaagcatagtcatacttcacaattagaaggaaaccaaggtcctgggatttcagccagaaaagtgtgattagagtttctaggcactatataatgctttcatcaacaatggttaacatgttaaactatttgttgccctgcttttatggggcggcacacttcttttaacttacagtgatgcttctgcataaaaggtcatctcctgatacagtctttgatatagttcattgatttgtgcatcttttctgttactagctgaaaactagcaaacaaaacaaatcaggaagtttttggtgactggttttctggtatagcaaaacaggtgacaactatttgttacatggctaggagttttctgttcagattcagtgtttgaccagggaaaatacggccattttatagataaaaatattaggcatcacctttctcaaatagggaatgatatagtggaggtctggaatatataataaaactagatcatattatcagttgatttttgagctagacctatgatacgatatttcttgtaactgaagctgaatcaaacaaccagtaactaaattactggaccatgacttggggaagttaaatttatttagctaagctattatttgctgtataccactgtttctagatactgttttcagggatgatcaggagtaaggaaatcacaggtaactactaaaatgaatgcaaatagttaaaataggtgaattgaaatgagaccacaataaaagacaaatagttcttcagtggtggacacgttttagggcctaagttcctaaactgtagaactttttttttttttttttttttgagacagagtctcactctgtcacccaggctagaatgcagtggcgcaatctcagctcactgcaagctccgcctcccgggtttatgccattctcctgcctcagcctccagagtagctgggactgcaggcgcccgccaccacgcctggctaatttttttgtatttttttagtagagacggggtttcaccgtgttagccaggatggtctcgatatcctgacctcatgatccgcccaccttggcctctcaaagtgctgggattacaggcatgagccatcgcctggcaactgtggaacttgtgaagtggcaatattatgcagagcatttgattagacagtggcaatcccttgggggcaagaatcacatctaatacaatcagtatagtgcctaacattctgtaagttctaaaactaattacaaaaataatcagaaataaaggatcagccactggaaatatggcagaatttgattctttaacctcttcttgcctctgtggtattgattcctgattttattataatagcttcaatttttcaaagaaagcacattaacttactatagctctatagctacaacacttgagaccttcccttctctaaccctccccgaattgtacgttaggtagcctgactgaagaagcctttaaagttctctgtaaatttatttgcacagggtttagggatggcctaaccaaaaaaagaaattaatacagtgtaattgtcaacaggattgggactcttctttggtgaagactttcaaactgaagaagagagaaaagagggtatgtatgatttgtttagtctttttttaaaacaaagtaataatggagttatttttggaaattttgccatgatactgcattcctgtcatgttgctctagccattgttaagcacatactacagatgaattcatgctgtggggacagtattgatattcttttttttttttttttttcttttttttgagacggagttttgctcatttcccaggctggagtgcaatggcgcgatctcggctgaacgcaacgtccgcctcccgggttcaagcaattctcctgcgtcggcctcccaagcagctgggatacaggtgcctgccaccatgcctggctaatttttgtatttttagtagaaacggggtttcaccatgttggccaggctggtcttgaactcctgacctcaggtgatccacctgcctcggcctcccaaagtgctgggattacaggcgtgagccactgctcccaaccagtactggtactctttgaagtagtaacttaggacagaatcctgtccatttcactgtttaggctgcatttcaattcattcatacagtggaaaaggataaacttaagtttgttttgaattgtcatatgaatttttacacagaacttttgtgctctaatataagcttcatataatgggatatatagagatctatctgtgtatgcttgtttagggtacttaatgtgtttccaagacttcatgtccttagttaggattacagctgtactttttctggtggtgtcatctaaatttctccatagcttgctcattttttctagggcactgagagcatttttgtacaacatattcttttgaaacagcttattcttcatgtggaaataggcaaagagagagagagagagaacacattgtttgttatttactgtagccctaatccccaggacctgtatccaagttgtttgatggaataattttatcttctgtgcttcagatctgcttggcattaaagttacgggtctttgtctcctttctagcgctctactagccgacagtttgttgatggtccccctggacctgtaaagaaaactcgttccattggctctgcagtagaccaggtaagaatagtcaggccaaggtaacagagattactggccccaagcattaaaacttctctgagtcagcattgcagcattgttttgagagacatgatgtttagttaaagtttttgtttgttttttgagacagagttttgttcttgtagcccaggctggagtgcaatggcaccatcttggctcactgtaacctccaccttccaggttcaagtgattctcttgtctcagcctcccacgtagctgggattacaggcgcatgccaccacgtctggctaatttttgtatttttagtagagacagggtttcatcatattggtcaggctggtctcgaactcctgaccaggtgatctacctgcctcagcctcccaaagtgctgggattacaggcgtgagcctccgtgcctggcctttggttaaagtttttctatgcagtaggatccttatccctatgaatggaattactctgatgtagtaaacaactgtcagagtgagtcttagttgcttgaatatatacccccatgacctatgtttatcttcttaggtacgagatttctttatttttactttttaaagtagagggggagtctctccttgctgcccaggatgactcgaactgcggggctcaagtgatcttcccaccttggcctcccaaaatgctgggattgcaggcatgagccactgcacccagccaaacatcagatttcaacataagaatgtttcaggtcaggcgtggtggctcacgcctgtaatccctgcactttgggaggcctaggcaggtggatgatcacctgaggtcaggagttcgagaccagcctggtcaacatggcgaaatcccgtctctactaaaaatacaaaaatcagtcggccaggcgcggtggctcacgcctgtaatcctagcactttgggaggctgaggcgggtggatcacgaggtcaggagattgagaccatcctggctaacacagtgaaaccccatctctactaaaaatacaaaaaattagctgggcatggtggcagacgcctgtagtcccagctactcgggaggctgaggcaggagaatggcgtgaacccgggaggtggagcttgcagtcagccgatattgggccactgtactccagcgtgggcgacacagcgagactccgtctcaaaaaaaaaaaaatcagtcaggtgtggtggcgcatgcttgtaatcccagctactcagaaggctgaggcaggagaatgccttgaacctgggaggcggaggttgcagtgagccgagatcacgccactgttctccagcctgggcggtagagtgaaaaactctgtctcaaaaaaaaagtatcagactggggtcttaagtcttgactaagactaaggaattttttacctgctccaaaataccctatagtggagggtaagttagattctttgtttgtctttcctcattactacttttgttgcaggggaatgaatccatagttgcaaaaactacagtgactgttcccaatgatggcgggcccatcgaagctgtgtccactattgagactgtgccatattggaccaggagccgaaggaaaacaggtccattgaatttgtgactaaactggcctgtgtaaaacaactagcaaaattttggagagttggtttcttagaaccctctggaggcggggattggatgtattgggtagtttcttactgctgcataccgaggaccagagaactgcttgtgtcatgctttacctttgaattgctagcccactggcataactttagtttttcttgaaactgtttttttacatagccattagttctcacttttggctatgataacagattactgtttatctcccagttaaaattggagctaaaatttagaaggagcaaaatacttaagacacaaagcttaaaagttgcttgttttctaggtactttacaaccttggaacagtgactccaccctgaacagcaggcagctggagccaagaactgagacagacagtgtgggcacgccacagagtaatggagggatgcgcctgcatgactttgtttctaagacggtaaatctgtgattgttgtttgtgttttaattttttaattgtgaaagtaataaataccaggaataaagttaaatactttagtgttataaagttaaatgtcaaatttccttcctcattccaattttactctccagaagtaactattggttacagaggtaagtttctttccattctgtgagtaatactaaattaaagagaccaacttttctgaagcaattgttagtacttttttttttttaatttgagacagagtcttactctgtcacccaggctggagtgcaggggtgtaatcatagctcactgtagccttaacctcccagtctcaagcaatcctcctgcctcagcctcctgagtagtagggatacagatgtgtgccaccacgcccggctaatttttaaattttttgtagagacttggtcttgctatgttgctcaggctggtcctgaactcctgggctcaagtgctccccctgcctcagctcccaaagtcctgggattacaggcatgagctactgtgcctggcccattgttagtactttttagtgacacatgtttacattttttcttgaatatatcacctaagattttcaaaatgttttgcttttgtaccattttatttccttataaaaatccaagcaaattaactgaggctcagaggagttaactgacatttttgagccacatgatagtaagtgacagatttcacatccaggttttctttttttctttttttttcttgagacagagtctcactctgttgcccaggctggagtgcagtggtgcgatttcggctcactgcaacctctgcctcccgggttcaagcaatcctcctgcctcagcctcccgagtagctgggattacaggtgcccaccaccatgcccggccaattttttgtacttttagtagagatggggtttcaccatgttggccaggctggtctcaaactactgacctcaggtgatcctcccgcctcagcctcccaaagtgctgggattacaggcgtgagccaccatgccctgccaacatccaagttttctgctctttgtaaacaagttctttccactatcacacactgctgccttccagtgggatgaccttaaacaagttacttaaactctctttgcttctgtttcctcatcttaaaatgaagaaaacaaaacctattttatgggattactgtgagaattacatatgtaaatatgtctaaagggcttagaaaattttttggcacatactaagtgctcaataaatgttagttgattatggctgggcacagtggctcacgcctgtaatcccagcacttagggagactgacgcaggcagatcacctgaggtcgggagttcgagaccagcctgaccaacatggagaaaccccgtctctactaacaatataaaaattagccgggcgtggtggcgcatgcctgtaatcccagctacttgggaggctgaggcaggagaatcgcttgaacccgggaggtggaggttgcagtgagccaacctctaccacgccattgcactccagcctgggcaacaagagcgaaactctgtctcaaaaaaagacaaaaaaaggccaggcccagtggctcacgcctgtaatcccagcactttgggaggtcgaggtgggtgaatcacaaggtcaggagttcgagaccagcctggccaacatggtgaaaccctgtctctactaaaaatacgaaaaattagctgggcgtagtggtgggcacctgtaatcccagttactcgggaggctgagacaggagaatcgcttgaacctgggaggcagaggttgcagtgagctgaaatcacaccactgcactccagcccaggcgagagagtgagattcggtctcaaaaaaaaaaaaaaaaaaaagttagttgattatgatgataattttctaattcatatcactctgttccttctgccctgttttatcccaggttattaaacctgaatcctgtgttccatgtggaaagcggataaaatttggcaaattatctctgaagtgtcgagactgtcgtgtggtctctcatccagaatgtcgggaccgctgtccccttccctgcattcctaccctgataggaacacctgtcaagattggagaggtatgacttatgcaagccgtcattgttttatggcctctttattcgcctttcaaaggcttagtgtcagtttttgttctaaaattaatcatctcaaatatatttctttccacaaataatgactagaattgtaagatacttacttgtagaagagtcctgtttgggtttgtctgtctaatacctttctaaaccaaacttctttccccgcccctttttccttcttgctcttccctgcttctccttgcctcttcttccttccttcctccccttcatcccattttggaaaatttcagacatatataaaactagagaaattagtataactaacccctggttcttatcacttaacttccatgattactaacttgtgtccattttttttttttttttttttttttttttttttttttttttagctctattgcctaggctggagtgcactggcaggatgtcagctcactgcaacctccgcccccctgggctcaagcgattttcttgcctcagcctcccaagtacctggaattacaggcatgtaccaccaccatgcccggctaattttttttggttgtattttttagtagagatggggtttcatcatgttggccagggtggtctcaagctcctgacctcaagtgatccgcccacctcagcctctcaaagtgctgagactacaggcgtgagccaccgcgcctggtcatgtccattctttttttaatgtctctcttttttttgagacagagtttccctgttgtccaggctggattgcagtgttgcaactttggctcactgcagcctctgtctcctgggctcaagtgattctcatgcctcagcctcccaagttgctgggactacagccatgtgccaccatgctcaactaatttttttgtatttttagtagagacggggttttgccatgttggccaggctggtcttgaactcctgacctcaagtgatccgcctgcctcggcctcctaaagtgttgggattctaggtgtgagccatggcacccagcctttatgtctgttcttgatttatcaatactgtcgttgcctcctcctgactctgtccaatgaattacttggaagcaaatctcagctatcatataattttatctgtgataaaattatcttttattcttgctcttatgttagacatacttcataataggttatcaaaatgaagttgcttatttccaaatatttaaccagtttaatccaaactgattaaatccattaagaaattatttattgctgagtgtggtagctcatgcctgtaatcccagcactttgggaggctgaggcaggaaaatcacttgagcccaagagtttgagaccagcctggacaacaaagcaagactccatctctacaaagaataaataaataagttagccaggttagtggtgtgcgcctgtgtttgtagctcctcaggaggctaggttggactattgcttgaggtggggaggttgaaactgcagtgagctgtgatcacaccactgcactccagcctggggaatagagcaagaccctatctcaaaaaaaaaaaaaattattatgtaagtaacattagcaagaatcaaaatgactatcttcctacctactcttcagcaaatcaaatattattttcccctgatcttacaagttcttatccatgcctgtacattttgttttgttttgttttgttttgttttgtttttgagagggagttttgttcttgttgcccaggctggagtgcaatggcgcaatctcgactcaccacaacctccacctcctgggttcaagcgattctcctgcctcagcctccctcatagctgggattacaggcatgcgccaccatgcctggctaattttgtatttttagtagagacagggtttctccatgttagtcaggcaggtctcgaactcctgacctcaggtgatccgcccacctcggcctcctacagtgctgggattacaggcgtgagctaccgcacctggccgcctgtacattttttttacacatgttctgtactctaatatagaaccatggagttctcccctacaggtaggtttgtgtcataatcaactgataagatatgttaaataattttttttactgagaataatgaaagtatacacaatttttttctcttgttccagctttcttctgttagaaaaaaaaatctgtttagagtaataaattattttatattaaaggctatacctgtaacctcattattgcttgttttctgctgtccttgagtggatgagaaggaggtaattatagctggtggtcttattccttgttcacataacagtgtggtgtatatatgaaaaagaaaaagtgtggtatatatgataataaatcagtcctggtgtggaggtaggaaaaataattgagagtctctgttttaatatatgctttgggaataggaatgtaaaagtagacatgatgtcccagtttgagaataagattggaggtggttcttcgcatgtggtcttcatctgttggtctacatggcgtaaataataatttaaagctcttttttttttccagggaatgctggcagactttgtgtcccagacttctccaatgatcccctccattgttgtgcattgtgtaaatgagattgagcaaagaggtctgactgaggtaagagtcaactgtaggagatggtgaatttgttatttgtgttaattcggaggtttttaaataaaaatgtcatcttgataatagacaggcctgtataggatctctggctgtgaccgcacagtaaaagagctgaaagagaaattcctcagagtgaaaactgtacccctcctcagcaaagtggatgatatccatgctatctgtagccttctaaaagactttcttcgaaacctcaaagaacctcttctgacctttcgccttaacagagcctttatggaagcagcaggtaagggcagatgtaatacttgaatatgaattcctccacggcagtagtttttcttactctctttatttttttatttattttttattttttagacagagtctcactctcgcccaggctgaagtcagtggcgcaatctcagctcactgcaacctccgtctcccaggttgaagcgattctcctgcctcagcctcctgagtagctaggattacaggcgtgtgccaccatgcctggttaatgttttctatctttagtagagatggggtttcaccatgttagccaggatggtctcgatctcctgccctgtgatttgcctgcctcggcctcccaaagtgctgcgattacaggcgtgagccaccgtgcccagcctcttttttttttttttttaagacggagtctttctctgtcgcccaggctggagtgcagtggcgctatcggctcactgcaaactccgcctcctgggttcaagcgattctcctgcctcagcctcctgagtagctgagattacaggcgttaacggtgttataccatgttagccaggctggtctcaaactcctgacctcaggtgatctacccaccttgtcctcccaaagtgctgggattacaggcatgagccaccacacctggccaccttcctctttttattagctcctgcctagtacaatgcctgaaacatagtaggtgctcaagtagtttgatggatgagtaactgtatgcgtgtcacccttgcctatcctcttgctttctcattacgttattgtgtacagtgttcttcctttctttccttcctctccagttaggttggagctttttcaattcttagaatataccaagtttactccctaccttaaggccttcacatttgttgtctcaacctgaatgctcttacattagatacagtatggtttgctcctttatttctttcatatttctcttcatataccttgtccccagaaacacctttcctgacaaccttgtctagattaacagctctcatttctttctagcttcttgcctgccttgttttcttcatttatgtatcactctacctgataggtatttgctttttgactgactccaccaatagaatgtaggttccataagataagggctttgtttacttctgctttatcctcagcacttgtacctggcacatcgtaggcccttaaatatgtctcatgaatgaataccttcttggtaattgtagtcactgcaattgtatgcctgtctgcctagcacatcagttgccaactgctttccctaactgcaaaggccgattttttaaaagttttgacttctaatattgagctgttggccagtatcctgcttgttaatgaaactagagtctgatgt

SEQ ID NO: 97 - DNA, 2228 bp, Homo sapiens
  source 1..2228: mol_type = other DNA
aggcagaacaggatcaggaagcgatcaaacctaccaaggcagtctcacttctcaatgactggactgtgtggtaatttggggtccctatatatgggtggaaataaaacagaagtccctggtgacctgtaaatgggggagaccaagtgggagcaactggggtgcatttcctatttcctaggcctttacctaaaaagaacagaagcttggggccaggcgcggtggctcacatctggaagcctatcactttgggaggcggaggtggaaggatcacttgagcccaaagttcagaactaggctgggccagatggcaaaaccacgtctctacaaaaaatttaaaaattagctgggcatggtgtcacgcacctgtagtcccagctgcttgggaggctgaggcaggaggatccctcgagcccaggaattcaaggcagcagtgatttgtgatcccatcactgcactctagtctgggcaacagagcaagaccctgtctctaaaaagaaagtacaaaagcttggaagcaggtgatgtatgaggtgtccccctaactgagtcttgggctcaccatcgcccttagggaaatggtttgtatgtttcggatttctcccctttctagggtactctgctccagacatgcgtggcctcagactcatcatgataccagttgagctgctactttgctacctcctgctgcaccctgtggatgccacttcatatggaaagcagacaaatgtcttgatgcactttcccttgtccttggaatcccagacaccctcctcagaccccttgtcctgccaatttctgcacccaaagtcactgcctggtttcagccacatggcccctctacccaagttcttggtaagcctggctctaaggaatgccctggaggaagctggttgtcaggctgatgtttgggctctacagctacagctctaccgccagggtggtgtgaatgctacacaggtcctcatccagcatcttcgagggctccagaaaggcagaagcacagagaggaacgtgtcagtggaagccctggcctctgctctgcagctgttagccagggagcagcaaagcacaggaagggtcgggcgctccctcccgacagaggactgtgagaatgagaaggagcaagctgtgcacaatgtagtccagctgctgccaggagtgggaaccttctacaacctgggcacagctttgtattatgctactcaaaactgcctgggcaaggccagggaacgaggccgagatggggccatagatctgggatatgaccttctgatgaccatggctgggatgtcaggggggcctatgggtctagcgatcagtgctgcacttaaacctgcattaaggtctggggttcagcagttgatccagtattaccaagatcagaaagacgcaaacatctctcagccggagaccaccaaggagggtttgagggccatctcagatgtgagtgacttggaagaaacaactactctggcttctttcatatcagaagtagtaagttcagctccctactgggggtgggccataatcaagagctatgacttagatcctggggctgggagtcttgagatataaaagaatgtggtaaccacagaattaataactgtactaccctgacaagctatatacatgtcttcaaaattttaatctgatttatccaggaggaaggctgtacagtaaaacgtaagaacgtaaatgtttgggtgttgaagtcacagggtttggtttcgaatctaggctccacttgttagagcctcggtgatcactgaatagtaacttctttcttgaactaagatcagttttgaagtttctaaaggagatagaatgattttaacctcaatgagttgccctgtaaatttaaaatgatacaatgaatctaaaatgcttatcacagtactttcaataaatagctattagccaggtgcggtggctcacgcctgtaatcccagcactgtgagaggctgaggcgggatgatcacctgaggtcaggagttcaagatcagcctgggcaacatggcgaaaccccgtctctacaataaatacaaaaaattatcctggcggagttatgcacgcttgtagtcccaactacctgggaggctgaggcgggagaatcacctgagcctgggaggtcgaggctgcagcgagccgagatcgcgccgctgcattccagcctgggtgacagagcgagaccatgtctcaaaaaataaaaataaaaaaaaattgttttc

SEQ ID NO: 98 - DNA, 7893 bp, Homo sapiens
  source 1..7893: mol_type = other DNA
agttcacccaatggacctgcctactgcagcgtaggcctcgcctcaacggcaggagagcaggcggctgcggttgctgcagccttcagtctccacccggactacgccatgttggggtttgtgggtcgggtggccgctgctccggcctccggggccttgcggagactcaccccttcagcgtcgctgcccccagctcagctcttactgcgggccgctccgacggcggtccatcctggtaagtgcttttctctaggagctaacgttccattttgccgccccatgaccttgagccggggaacgatggtagctcgggcctaagggatccgtggtgttaaaaggatgcctggagccgcgtcttgctctctaatggctggagaacaagaatgggacacccataggaggtttcttcgacccagctctgtcccattttgtataaagtcctttgtgtgacggaaaaggtgcgggcaggtgcgttgaccttccggttgaataggggtactgaactctcgaaaaatggggtcttgtgcatgcggatgggaaggctgtgcaggcgctttatcgatcgctgcgcggccttccctcttggacacgcgttccgtacaagcggaaagaggcctgacttcggctgagttttcctctccttgtgtgttaagtcctggcttccgatgacctttaactggcctgaccccagctccttccaatatcttttgtctgttagtcagggactatgcggcgcaaacatctccttcgccaaaagcaggcgccgccaccgggcgcatcgtggcggtcattggcgcagtggtggacgtccagtttgatgagggactaccaccaattctaaatgccctggaagtgcaaggcagggagaccagactggttttggaggtggcccagcatttgggtaagtagagtttgttaggaatagtaaagaccttgtgtagcccaaatatccccaaaaccaagctgtctgccttctatgatgattttatcaaaatgactttcgttcttctgagtttgctgaagccacatttaggtactgagaaggagtcttggtcgatttaggtcttgataccaatttatccttatgtataaccctgcgatgcctgtatctaacaggtgagagcacagtaaggactattgctatggatggtacagaaggcttggttagaggccagaaagtactggattctggtgcaccaatcaaaattcctgttggtcctgagactttgggcagaatcatgaatgtcattggagaacctattgatgaaagaggtcccatcaaaaccaaacagtaagttgctcttattgcatctatgcacaaaggaacttctgttatttgcagttttacacattaaggtgacatgttctcctaaagcagaatttttcttctgatacgttcgattattaaaatcacacagtgcagtttcacctgaagaaattaggatgcagaatttctgattgacaaaagcctactacttgaggtttttttttttgagagggagtttcgctctcgactcactgcaacctccacctcctgggttcaagtgattctcctgtctcagcctcctgagtagctgggattacaggtgcatgccatcatgcccggctaatttttgtatttttagtacagatggggtttcaccatgttggccaggctggtctcgaactcctgattttgggtgattccccccccacctcggccccccaaagtgctgggataacaggcatgagccactgcgcctggctagttgagtatttttaagactcggtcttatggcttaggtttaggagtctccaaaacttgtaggtttttgtatttgctattgctatgtgagggaatgctgttaggttaaggctcagtaaaatgaaaaatttatgacagttaaagtcagggaatgggattattgtttcctaagataataattttctttattgcagaaagttgggttagatcctagatgatagtttatctgatttatgtaagaaaggggaggtaagactgtggttcctcaggtaaagggatggacttgagagttgatagggagggatatataagattatcatttgctttcaacaaggtgaatagatactatcctctcttctacctttacagatttgctcccattcatgctgaggctccagagttcatggaaatgagtgttgagcaggaaattctggtgactggtatcaaggttgtcgatctgctagctccctatgccaagggtggcaaaattggtatgttattaaggggtacatattttccaaacctaatatgggaggaaaaactcatacaatgttatgagtggatattgacatctattcctcactgatgagtacgttctgactttcgttcttctgagtttgctgaagccagatgcaatttctgagaaggaataggatggaaggaagcaattactttttttgaagtttgcttatttaggaaagcagaactcttaaatattctttcttttcaacctcttatagggctttttggtggtgctggagttggcaagactgtactgatcatggagttaatcaacaatgtcgccaaagcccatggtggttactctgtgtttgctggtgttggtgagaggacccgtgaaggcaatgatttataccatgaaatgattgaatctggtgttatcaacttaaaagatgccacctctaaggtaagcattgagctaattgatgtccacgtggtagttacgccaggaaactattgccaactgaagccatgttctatattttctatttaatttttttttctttttaagaaaatgttaatattttcattttcgtgtcccagggcctacaaaggaaacctgttagtgttttcccccccaacttccaatacacaaatggacattttctttcctctttgatactgacattaaataacatttccaggttttctttttggtagatagtcccatcatttgaaagctaattttgggagggctggattggacgtggtacatatgtttcagttaagcctattttgtacttttcacttaacttgaataggtttttatttcctttctactatagttttgccttactaatataagaagctgtcttttttttttgaactgcatctctaatagggaaaagaaacttgcacacaaaaacgctgacaccttctgagaaaggatctgtggtcgtttctccgatttgggaaccttcagtatgtggcttctctactcctttgtcaggttttacgattatgtatgattactgcaggtagcgctggtatatggtcaaatgaatgaaccacctggtgctcgtgcccgggtagctctgactgggctgactgtggctgaatacttcagagaccaagaaggtcaagatgtactgctatttattgataacatctttcgcttcacccaggctggttcagaggtaagagggaaggcttgagaggacctggttcatctggcctttcttcggatgaggctaaggatgtagacacctaagacctttttttcttttaggtgtctgcattattgggccgaatcccttctgctgtgggctatcagcctaccctggccactgacatgggtactatgcaggaaagaattaccactaccaagaagggatctatcacctctgtacaggtaagaaaaattacatagatgaagatctgatttgtataaaggcagggtgcagtggtgcatctcagctactgaggaggctgaggcaggaagattgcttgagcccaagagatcagcctggggaacaaagctgtatgtatgtagagagatgtataaaactgactgggccaggcgtggtggttcatgcctgtaataccaacactttgggaggctgaggtacgcggatcatgaggtcaggagttaagacaccaccctggccaacgtggtgaaatcccgtctctactaaagatacaaaaaattagctgggcgttgtggcaggcgcctgtaatcccaactactcagaggctgaggcaggagaatcgcttgaatccgggaggcagaggttgcaatgagccaagattggggcactgcactccagcctgggtgacagagtcagactctgcctcaaaaaattaaaaaaaaataaatgaaggtatacatttaaatgtagatcacaaagcaatggtttctagtctgaggggagtccggcgctatatggaaactgagcattaaatatttactgtattagggctgagtgcagtggctcacacttgtaattccagcactttggggccgggcacggtggctcacgcctgtaatcccagcactttgggaggccaaggcaggcggatcatgaggtcaggagatcaagaccatcctgacttaacacagtgaaaccccatctctactaaaaatacaaaaaattagctgggcgtggtggcacctgtctgtagttccagctactcgggaggctgaggcaggagaattgcttgaacctgggaggcggaggttgcaggaggttgtggtgagctgagattgggccactcactccagcctgggcggcagagtgataatccgtctacaaaaaaaaaaaatttactgcattaatgtactatacattttcaaatatatatagatgggatatatagtaaaattacataaattttacatatagtaaaaatgtggctaaactgtaggaacttttcatgattcagtgtaatgaactattgtgcaagaagttttttgttcttgtttttaattcttttttttttttttttgagacggagtttcactcttattgcccaggctggagtgcaatgggtgcgatctgggctcactgcaacctcctcctgggttcaggtgattcctttgtctcagcctcctgagtagctgggattataggtgcccgacaccaggcccggttaatttttgtatttttagtagagacggggtttcaccatgttagtcaggctggtcttgaactcctgacctcaggtgatctgcctgactcagcctcccaaagtgttgggattataggcttgagccactgtgcccagcctcttttttatttttttattttttttaatttttatttttttgagacggagtctgttgcctaggctacagtgtggtagcacagtcttggctcactataacctccacctcctgggttcaagcgattcacctgcttcagcctcctgcatagctgggattacaggcatgcatcaccatgcctggctaatttttgtttccgtttttttttttttttttagtagagacccccgtctctactggtgtcgaactcctgacctcgtgatctgccctccttggcctcccaaagtgctgggattataggcatgagccaccgtgcctggcccccagcctcttgtttttaattctaaaagtgggcattaaaatagttaaaataaaagatgaagaacaaaaagaatgatactaaaaattcttccatcatggctgagagaccagataatctgtcagcttattcagcaggtattaggggtggtaagaagggtcttttgagtgctaagaatatggagtgagatgataaagataggtcagaaagggggatggcttaagtaaaattactttggttcgctgggcgtggtggctcacgcctataatcccaacactttgggaggccaaggcgggtggatcacgaggtcaggagttcaagaccagcctggccaagatagtgaaaccccgtctctactaaaaatacaaaaaaattagccgggtgtggtgatgggcacctgtagtcctagccactcgggaagctgagacagagaattgcttgaatccaggaggcagaggttgcagtgagccgagattgcaccactgcactccagcctgggcgacagagcgagaccctctcaaaaaaaaaaaaaaaaatttactttggttcctgttcttcatgggatctcactttaggctatctatgtgcctgctgatgacttgactgaccctgcccctgctactacgtttgcccatttggatgctaccactgtactgtcgcgtgccattgctgagctgggcatctatccagctgtggatcctctagactccacctctcgtatcatggatcccaacattgttggcagtgagcattacgatgttgcccgtggggtgcaaaagatcctgcaggtgagtatattactatgtgggatcagtgtccggaaagtcaaaaagagggcctgtggggactatatgaggactggatctttcttagtgatttgttttggagcaaggaaagttgaggctggcaattgctagtgagagctaatgaggtctcttgagtttccaggtacttaacgctttggaatgcaatatttttctttctttttttttttttttgagatgagtctcactgtgtctcccaagctggagtgcagtggtgccatctcggctcactgcaacctccgcctcccaggttcaagcgattctcctgcctcagcctcctgagtacctgggattacaggtgcgcgccaccatgcctggctactttttgtatttttagtagagaccaggtttcatcagttggtcaggctggtctcgatctcctgacctcatgatccacccaccgtggcctcccaaagtggtgggattacagacgtgagccactgcgcccggcggaatgcaatatttttctaacagcaccaaactaggactatggagaacaagacactgatctttcttggctgagggccctcataacaccaccaccttctctgccccctagcatgtaactttccctttgttagcttgtccaaattaaaggaatgagaatacttaactcagtcttcttttttctcataggactacaaatccctccaggatatcattgccatcctgggtatggatgaactttctgaggaagacaagttgaccgtgtcccgtgcacggaaaatacagcgtttcttgtctcagccattccaggttgctgaggtcttcacaggtcatatggggaagctggtacccctgaaggagaccatcaaaggattccagcagattttggcaggtgagattttgagtacaaatcttgaatgtttactgtgctgtggtcccattccaacaaccgtcaagcaatatatgtaatatactatgcttaattatattttttaatttaaaaaacaaacttacccattgattttgtttgaaaatactctacatttaatttgagtgtgatttgttacttgattctctagctcccttttattttatatgtattttttgagactgagtctctgtcgcccaggctggagtacactggtgcaatcttggctcactgcaacctccacctgccgggttcaagtgattctccagcctcaaccatccaagtagctgggattacaggcacacgccaccacgcctggctaatttttgtatttttagtagccatggggtttcaccatgttggctgggcttgtctcgaactcctgaccttaggtgatccgcctgccttggcctcccaaagtgctgggattacaggtgtaagccaccgtgcctggcccatgtgttcttaattcatactgtatcatatcttgtaaatttgatttgtgagggaaatttaagctttctaagatgacatgaattcatcacattctaactgatggcctgaagtggtgaggaatgttacatgatgcagaaagttgatatccctccgcttcttactctttttttttttctcccccatcatacaggtgaatatgaccatctcccagaacaggccttctatatggtgggacccattgaagaagctgtggcaaaagctgataagctggctgaagagcattcatcgtgaggggtctttgtcctctgtactgtctctctccttgcccctaacccaaaaagcttcatttttctgtgtaggctgcacaagagccttgattgaagatatattctttctgaacagtatttaaggtttccaataaaatgtacacccctcaga

SEQ ID NO: 99 - DNA, 20782 bp, Homo sapiens
  source 1..20782: mol_type = other DNA
ccgccggccgtgctgttcccgccaattcctgtggtaatccttaccgtggcgagttccgcgctcaatggagacgtttgaccccaccgagctgcccgagctgcttaaactttattaccggaggctctttccctactctcagtactatcgctggctcaactacggtggaggtgatggaggcgaggaatgggttcgggagcggagtgtgaggaggttggaggcggggtgtccttagaatgacaatatgaagcgccttctgtgcaccaggctttgtgccgcgcgccttcatttgctctctcgagcccgccccaccacttcataggtgtaaatgggccgagagaggatataataagccagcctgcggccacgctgtaaaaaaaaaaaaaaaaaaaaaaaaaacagagccgccgctcctacctctgcgtggtcaggctcacattaggtgccccgtttacctgcagcggtgcccagggggttactggggcgtagcgtgaagctgctgaggcatggtttgcatcaggagcggaagagcctctctcagaggaagagaaatactttcttccttgcagctgaatttattagtgcgaatcgaggagagaggggtggcattacatatttaaaatatttatgcatctgtttcatcttttgtaccgttccctagcaaatacggaatggtaactgctttcaaattagggactaggtcatgtggattttgttttgtttttcttttacatctaccacggtgttgagcatagggggctcattaaaaacatcttctcgggccgagtgccgtggcttacgcctataatcccagcactttggaaagccgaggaggacggattacctgaggtcaggaattcgagaccagcctggccaacatggtgaaaccccgtttctacaaaaaatacaaaaattatctgggcatggtgggtcgcatgcctgtagtcccagctacagcctcgggaggctgaggtggtaggatcccttgaacccgggaggcggaggttgcagtgagcctttatcgagccactgcactccagtctgggcgacagagcaggaagcaagcaagattccctcaccgaaaaaaaaaacttctcattggctaaaattataatgccctgagccaaataaagtagcaaattaactttaaaatgtacatttattttgcagtgataaagaattactttcaacaccgtgaattttcattcacattgaaagatgatatttacattcgctaccaatccttcaacaaccagagtgatctggaaaaggagatgcagaaaatgaatccatacaagattgatataggcgcagtatattctcacagagtaagaaatctttttttaatatattttgttgttttattttgtaaaccaagaatgggttgattcctcttgcgttttgagattaaatttttagagtttattctagatgaaaagccactttttaattgtttggcaagtgattaatccttttttgttctttgacgttctgcattactgatgaaatcatttgggagtgaattggttgcatttttactaggacaaaaaaaattgagtatctagctactaggaagaggaagtcgacatgatttaggaaagggaaataattagccgggcgtggtggtacgcgcctgtaatcccagctactgaggaggctgaggcaggagaatcgcttgaacccgggaggtggaggttgcagtgagccaagatcgcgccattgcactccagtctgggcgacagagcgagacttggcctcaaaaaaaaaaaaaaagagggaaataaaagagaattacattctcttccaccatggaagttattctttttttcttttaattgtttatttttattgaggtcaaatatacatataaaacttattatctttaccacgtttaagtgtacagttcagtcataataaacatttatattctttttccttcatacccctggagttattcttgattcctctctttctcacattcccatacccattctattaggaaatccctttggctctaccataagtgtatctaaaatccagccactactaccagtgctaccaacattatcatctcatctgaattactgtaaaaacctcctaacagtttgcctttgtagaatctagagtccattgtcaatacagaagctagagtaatccttttaaaacaactcagaatctgtgattcctctgctgaaaacattctctggtggctgctcatttcactgactaaaagtccttctctccccctcattcattcctgccacactgacccttgctcaagctgtttccactgcctaaaacccatttctatacttggttcatcccctcacctccttcaaatctttgctcaaatagcaccttctcagtgaggtctactaaaacctgccactcctcccaccccctgccactggtatattctaagtaccctagaagagtgcctggcaagagacagtacactataaatatttgttgagtgaatgaacaaaccaaaattgcccttcttccccttctcaaatatatacactggtgggtggagggaatacatacatagcataatagcttttatgtggagtttttcatgttatataacttgttacttgtatcaatcctcattctttttacaaaggaggaaacaggcccagagaacttgaatagtttgcacaagctcacacacaatttctaaatgatagagctggcacttaaacccagggtttctgactctaaatcccagacccgtctctcatcatcaaagtaaggggagaagaggtaataaaaggcaggcagaaaaaaatactttggagttgttttacttcccctttataggttgagaataaaactgaaaatgaacttctaagaagggttagggtgccactctctacttccttctccttaatttctaaagggagaaaacgtctcatttttttcttgggccaagacagaagcatctatagacctttatttactttttgtgttttgttttgtgatttttgtcagttatgtatgcacatggtttacaaaatcaagtacttctattcggcttttaaaaaatctgctaccaggctgggccggtggttcacacctgtaactctagcactttgagaggctgaggcgagcagataacttgaggtcaggagttcaagaccagcctggccaacatggtaaaactctgtctctaccaaaaaatacaaaaacagccgggcacggtggcacatgcctacagtcccagctactcaggaggctgaggcaggagaattgcttgaacccggtaggtggaggttgcagtgggtcaagatcacgccactgcactccagcctgggcgacagagtgagaccctgtctaaaaaaaattctgctacccttccccctcattttttgctacccagaagcaactactttctttctttcttttgttgagacaagtctagctctcttgcccaggctggagtgcagtggctagtctcagctcactgcaatttctgcctcccggtttcaagtgattctcccacctcagcttcccgggtagctgggattataggcgcataccaccacacttgtctaatttttgtgttttttagtagagacggggttttgccatgttggccaggctggtcacgaactcctgacctcaagtgatccacccgccttggcctcccaaaatgctgggattacaagcatgagctaccacacccagacccagaagcaaccactttcttttagctaaagcttttttttttttttttgagacagagtctcgctctgtcatccaggctggagtgcagtggcatgatctcggctcactgcagcctccgcctcccgggttcaagcgattctcctgcctcaccctcccgagtagctgggattacaggtgtgtgccaccacgcctggctaattttttgtatttttagtagagacggggtttcaccatgttagccaggttggtctcgatctcctgacctcgtgatctgcccgcctcagcctcccaaagtgctgagattacagtcgtgagccactgcgcccagccctgttcagattatttagagagaaatcttctagcttcctgcctgagttggtagtggaagagtacagaagtgggtggaaagggctgggtcttaacattccacatataaatgtctaattattcccctaatatcaatttgtaatatcaatacaacacactcttcaattgtacttgttgtccaagtccagggaccttctgttttatgctctctggaaaataattcaggtgtcttctgccagggaaatgaaagagcagtcacctagctctgcaagctaagtgtacgaatctgggtagctaactgcttcttaactatgctttgaaccaatcctccttttttttttccttcagtcaagggtggccttgaaaaatcttcctgtttttcatctcagcttcactaaacacgcacttactcattccaacaatacctggtatcacctatccctgagccttttgggggttctgaggtataaattgggttgcgcctcttatctttccttactgacagcctaagatttagttttatgaatctcctcagtaatcactcccttctgacttacagttataaaaacttatggtggaattaacctctcaggttcttttttttgagacagagtctcgctctgtcacccaggctggagtgcagtggcgtgatcttgactcacagcaacttccacctcccgggttcaatgatactcctgcttcagcttcccaagtagctgggactacaggcatatgccatcacacccggctattttttgtatctttagtagggagacagtttcaccatattggccaggctggtttcaaactcctgacctcaagtgatctgcccgcctcagcctctcaaagtgctgggattacaggcatgagccactgtgcccagcttctcatagcctctttataataaagtctcaattcaaactaattggggagatctttttgaattattgaaaaatttttaaatacttctatgtatggtaacaagtaaaggttcttaaaacaccttgcaataggccattatttgtatacgttcccttgtcagaaaactaaaaacagctttattattatccttattgaccaacaaacatttatgatggatatgtattcattaaaccctgctttaagttggtgaaagttaagactctcatcaatagtgtatgtgtaagatccaaaataatgaactttcactgtcataaagttggcattatatagtctctttatttctgtttggcaactttttccatatgtgtagaaaataagcagatttagcagtgtggcagctcttatagaaactgatcaatattttgtatctgtagcccaatcaacacaatacagtgaagctgggagctttccaggctcaggaaaaagaactggtatttgacattgacatgacagactatgacgatgtgaggagatgttgtaggtgagcactgtgtgtcttgctgttagggtgggtggtatcactgacaatgagtaatgatgactctgctttagttctgcagacatatgtcctaagtgctggaccctcatgacaatggccatacgcatcattgacagagcattgaagggcaagtatcagcagtttctgaatggggtcaagtgtaagaatcggttttcctctgactactattaactattagtctctgtattttgtgatcaaatctcattaatttgtgtgtgtgtgtgtgtgtgtgtgtgtgtgtgtgtgtgtgtgtgtgtgtgacgagtctcactctgtcagccaggctggagtgcagtggtacaatgtcggctcactgcaacctctgcctcctgggttcaagtgattctcctgcctcagcctcctgagtagctgggactacaggcgcacgccaccacgcccagttaatttttgtatttttagtagaggcagcgtttcaccatgttggtcaggctggtctcgaactcctgacctcgtgatctgcccacctcggcctcccagagtgctgggattacaggcgtgagctaccacacctggcctaataaaatagttttttaaaaaagaaagaaattcccagcagagagaccaggatgggtaaagagatgaagcaagaacatggggagcacaggaaacaacaagtaatttaatatacattaattaaggagtttatagatttgttttaaaacctattatttctctcttcctcagaggactttggatttaagcatcgtctctgggtatattctggaaggagaggtgttcattgttgggtctgtgatgaatcagttagaaaactgtcttctgcagtacgttctgggatagttgagtatttgagccttgtaaaggtaagatcctcttaattctaatttgcattgctttagtttctagatgttaccaagcctgatatgtttactgtcaaagaaaatgaaactatcttttttttttttttttgagatggactctcactctgttgcccaggctggactgcaatggcatgatcttggctcactgcaagctctgcttcctgggtccaagcaattctcctgcctcagcctcccgagtagctgggactacaggctcctgccactgtgcccagctaaattttgtatttttagtaaagactgggtttcgccatgttggccaggctggcctagaactcctagcctcaggtgattcacccacctcagcctcccaaagtgctgggattacagacatgagccaccacactggcctaaaacttatctttaatggcattcacattgcagagtaaatgatcttaccaatagatcatttaaagtcatagtagctacatgttttaagatatttcattttattttgctataaatatcttgctttgtggcatatgtaaaataatagataaaatagatttattatatataaaataatagaacatgttaaagtttggttttggttttggtttgtttttttggttttttttgttttgttttgttttgttttgagacacggtctcaccctgtcacccaggctggagtacggtaacgtgaccacagctcactgcagccttgacctcctggtctcaagtgacccttctacctcagcctcctgagtagctgggactaaaggcatgcgccaccacgcccagccaattttttaatttttgcagaaacaaggtctcactatattgcccagggtgttcttgaactcctaaactcaaactatcctcccacttcaggctcccaaaatgctgagattacaggtgtgagccactacatccagcctacaaatttttttttttttttttgagacggagtcttgctctgttacccaggctggagtgcagtggcgctatcttggctcaccacaacctccgcgtcccgggttcaagcaattctcctgtctcagcctcccaagtagctgggattacaggcacttgccaccacacccggctaatttttgtatttagccaggcgtgttggcaggtggaaacagggtttcatcatattggtcaggctggtctcgaactcctgacctcaggtgatccgcccgcctcagcctctcaaagtgctgggattacaagtgtgagccactgcgtccagccctagaaatgttttaattataattatgcatcacttaacaataaggatacatcctgagaaatacatcactttgcaaaagtcatggagtatacttacacagacccagatggtatagcctactatacatctaggctatatggtataacctattgctcctaggctacaacctgtacagcatgttactgtactcaatactgtaggcaattgtaacacaatgataggtactgatgtagctaaacatacctaaacatagaaaagtcacagtaaaaatacagtattgcaatcttatgggacccaccatctttttcttttttttttgagatggagtctcgctcttgtcaccctggctagagtgcaatgatgcgatctcggctcactgcaacctctgcctcccgagttcaagcgactctcctgcctcagcctcccgagtagctaggattacaggcatgcgccaccatgcccagctaattttttgtatttttaatagagatgggattcaggctggtcttgaactcttgacctcaggtgatccacccacctcagcctcccaaaatgctgggattacaggtgtgagccaccgtgcccaccatcttatatgcagtccatcatgactaaaatgtcgttatgctgcacatgactgtatttatattgtatacctgaagttcttttttaatgatttatttttcagggtggtcaagacgttaaaaagaaagttcacctaagtgaaaaaattcacccttttatcaggtctgttggaaaagtctccaagcactttaaggtgtctgatttaccggcatgtgcctttagagttaccttgctatcaattttcactgctgggtagcattttataataataatagctatggttaattgagtgcctattttatgctgcagtattcctaaaaggtgctttacagatgttctcattgctcttcaaaaaaaccccacaagagacttgatggtatctccatttatagataaggaaaatgagttttagagagattttataatgagcttggcatcacacgacaagttagttgttaaatttaggattcatgccctggtctgcctgactgtaaagcctactccaatgctttttccactgaattcactacttctctaggatagtggaaaaagccttatattaggagtaaaaattcctattctgccacttactatgatcttgataaaatattgacaaaatattgctgcctccatttccttatctctatgatggggagaacagcatgcactctacctgtctcacagttgtatcaatgattaagtgaaagagtaaatgtgatgcatatttgtaaactgcaaacattatatgattgttgagatattaatacaagcaattcacagtggaaagtgtaggctgcatcccacattctactactgatgtattatggtgtcctgggttggttactttctacccttattgcgtatattaaccttctaagttgtgaggtttaaaaagtaaacatttcttgtatacccattctgtgccaggttctatgtcaggttcttttcccttaaaagtgtctcatttaattatcataaccctgcacagggtagtattcccattttacctagttaagttctgaaaatgtcatgaaaataagcagtagttttccccacaatggcagcaatacctatgtggcatatgtgttactgatagtgttgggactctgttgttattgttgttcttacagaaaatctataaacataataaaaaaatactttgaagaatatgccttggttaatcaagatattctcgaaaataaagaaagctgggataagattttagcccttgttcctgaaaatatcctttcccgtgatcatttctgtgtgagctagttgttttgatctgtgatattataaatgttagacatgtctgcttgtaagttctcatatacttataagtttaatcttttttacacaaaatatctcctgtatttctggattttagtatctctggtctggaacataataaaaaatggggccatgttgcaaatcagttttctcattttggaagttggtcctagaattaacagctaaagaatggtgaattacatagtcaaaatacatgcagaccagggaaaactttacatcataccttatagttattttggcattctttctgttatatcatcactgtatttttacaggggaagatttcaatgatacaactggtgttggtttggtttggggtttttttgttgttgttgttgtttttaagacggagtcttatactgtgttgcccaggctggagtgtgcagtggtgtgatcttggcttactgcaacctccgcctcccgggttcaaacaattctcctgcctcagcctcccaaatagctgggactgcaggcacacgccaccacgcccagctaatttttgtgtttttatagagacggggtctcaccatgtcagccaagctggtctcaaatgatccacccacctcagcctcccaaaatattgggaatacaggcatgagccactgtgcccggccggatacagctgttgagtttaacatttgtggggtgggttgttttgttgttgagatggagtctcactctgttgcccaggctgtagcacagtggcacaatctcagctcactgcaaccttcaccttgcagatttaagcaattttcctgcctcagcctccagagtagctaggattacagatgtgcaccaccatgccctgctgatttttctatttttagtagagatggggtttcaccatgttggccaggctggtctcgatctcctgacctcacgtgatccacccacctctgcctcccaaagtgctgggagtacaggcatgagccaccacgcccagtcaacatttatatttcaagaaatgttaataactactttctgaatatttgtaagacacccttgtggtaatacatacttaaaactaaattgttcattgatgttccctaaatgagtctgttccttaatgacccatcaccaattcatgatgaacttcaacaaagcttccaaaagtctcacaattcacttcagcgttgggagcacttgaagaaagtagccagcagatatcaggtatatgccactgaaatctgtattacagatataataatgcaattcttaattaaattgattgctttgcctagtcagttaaagatggttgaagatcgtttttttaactttctttaaagaaatcttcaacagttcctactgatcctcatgttggccttgtatctgcttttagaataacatcaaaaatgacaaatatggaccctggctggagtgggagattatgctccagtactgttttccacggctggatatcaatgtcagcaaaggaatcaatcatctactgaagagcccttttagtgttcatcctaaaacaggtactacacaaggaaactaaggaaaactaaaagaaaaatgagttgctattggctttagtaagcatggcattaggtctgaatatatataatgtctatgatttaaaggtagaagaattgctctgtcacccaatacctaagtcagttaagtagctaccagatgagtttctactatgtaactgtttttcagttgggtttctgaggttccatattagatttggagaggaccatcaaaatcttaggacaacagctctcattgtacagatgagaaaacagtggcccaagatgtaacccatccaaggtcataaaaaaaaaattgtgtgtgactgtatgtggtagcttgctcctgtaatcccagcacttgaggagggcaaggtgggcaaatcacttgagccccagagtctaacaccagcctaggccacatgtctaaacaccctttgtacaaaaaatacaaaaattagctagacgtggtggtgcatgcctgtagttccagctactcaagaggctgaggcaggaggatcacttgagcctgggaagttgaggctgcagtgagctgtgatggtgccactgcactccagcctgggcaacagagtgagaccctgtctcaaaaaaaagaaaaaaagaaagaaatgaaatgaactctactcctagcactgacaaaaacaaaaaaaaatttttttcgagaaagagtctcactctgtcacccaggctggagtgcactggtgcaatctcggctcaccgatcggctcaagcgatccttctgcctcaccctcctgagtagctggtactacaggcatgtgctaccacagccagctaatattttgtagacagggttttgccatgttgcccaggttggtcttgaactcttgagctcaagcaattcacctgccccagtctcccaaagtgctgggattacagacaagagccactgcgcccagcctcattacgtcacttttgagatgtgttaaattctatatggtatcctaggggggtattataaaagagtagaggaatttctattttatttcctaaatgctttttaaaggtgtctgacatgtgggtatctgtattgatctcaaataaaccaagccaatgtaaatattatagtttcatctattttgttctattttcaggactcactaactctgagattgttctgaacttaaatatggaatatttaaatatactttatttctaaatatagaaataaaagtagggataagagcaactgggaaatagctcaacagtcttcacatttgcttattggtttttgtttttgttttttttctttccttttttttcgagacagagtcccactctgtcacccaggctggagtacagtggcgcgatcttggctcactgcagcctctgccttccaggttcaagcaattctctgcctcaccctcccaagtagctgggattacaggtacccgccaccacacccagctaatttttgtatttttagtagagacggggtttcaccatcttggccaggctggtcttgaactcctgaccttgtgatccaccctcctcagcctcccagagtgctgggattacaggcgtgagccactgcacctggctggttttttaaagagaaataaaaggcatgctggacatggtcattcacacctgtaatcccagcaactcaggaggctgaggcaagaggattgtttgaggccaggagttctgggcaacatagtgagaccccaactcaacaaaaattgaaaaactggccaggccaggagcagtagctcacgtctataatcctagcactttgggagacaactgaggtgggaggatcacttgagcccaggacatcaagcctgcagtgagctatgaccatgctactgtatgtactctagcatgggtgacaaagtgaggcattaactctaaaaaagagtaagggcacagctaatgtgaaagtaatttatatttctaaatactcttcttaacagataagtttaaccctttgtctaagccttaaataaaaattttaaccaaaaataacctgtaggagatgactataatgatttatagtccacaatcatcagtttataacttttgtgtcttacaggtcgcatatctgtgcctattgatttgcagaaagtggaccagtttgatccatttactgttccgaccataaggtatgtttcagatcattgatcactccttgtttgtaattgttgttatgaattttaaataaattgaattagcctccttagagaagtagttgcatgggaatggtatatttggttatggaaaccaaataaggttcaaaggttagatgacgatgccctaatagaacaatacaagattttcacctgctgttatgtaagaaaaagattttaaggtcaagtaaatttaggaaattctgacttaaacagattaaaagtatcttttactacagtatttcacagtctttcatatgataatatgcatgaaaaactccaagaagagatcatggtgtttagaatatcccaaatttagctggccgcataatttttttacagtaaattttatgggattcacatgctattatacactggataatgctgatcagaaaccaacattaaacttctcttgttcgtggtgaggcgcggtggctcatgcctgtaatcccaacactttgggagggcaaagcgcgtggatcacaaggtcaagagatcgagaccatcctggccaacatggtgaaaccctgtctctactaaaaatacaaaaattagctgcgcttggtggcatatgcctgtagtcccagctacttgggaggctgaggcagaagaatcacttgaacctgggaggcggaggttgcagtgagccaagatcgcaccaccacactccggcctggcaacagagcaagactccgtctcaaaaacaaaaacaaaaacaaaattctcttgttctgttacttgcagcttcatctgccgtgaattggatgccatttccactaatgaagaggaaaaagaggagaatgaagctgaatctgatgtcaaacatagaaccagaggtaaggtaatattttgaagcttcactttaaatacagggtttttatatagatatccatctgtcactccagtaattaattctctgattcaactagaatggatcagcatttgtcctggaactgcatacaatgtttgtgtcctttcttcaacagcagcccaagtggtgttattgaatccagtctgattcaacacatatttcctaagtaacttttaatgctaggatctatactgtaagattaaactatcaataagtatgaataatcagtctctgagattcaccacctatttatttaacaactattatatatgcagtactttttttctttgtttctgatgcatataggtgggttttatggtaaacatatgtctaaactgtttaccaagttgtatattcaagaatttgaagaagctggctgggcgcagtggctcacgcctgtaatcccggctctttgggaggccgaggcaggcaaatcacttgaggtcaggagttcaagaccagcctggccaacatggtgaaaccccaactctgctaaatatacaaaaatcaaccaggcatggtggagggcacctgtaatcccagctactcgggaagctgagtcaggagaatcgcttgaacccaggaggcaggggttgcagtgagccaagattgtgccactgcactccagcctgggcggcagagggagactgtctcaaataaacaaacaaaaaaaaagaatttgaagaagctaaggaatttctaaatcttcctgctaatggaaggcaaatctaacacctaagagatactgcaggccaggcgcgatggctcacacctgtaatcccagcactttgggaggcccaggtgggttgatcacctgaggtcctgagttcgagaccggcctgaccaacatggagaaaccctgtctatcctaaaaatacagaattagccggctgtggtggcacatgcctgtaatcccagctgctcggaaggcagaggcaggagaatcgcttgaactcaggaggtggaggttgcggtgagccaagatcacgccattgcactccagcctgggcaacaagagcaaaactccgtctcaaaaaaaaaaaaaaagatgccgcatagcagcgcagcactccccaacctttttggcatcaggtaccagttttgtggaagacaatttttgcacggactgcaaagagagggggaggagttggggatggttccaggatgaaacttttttacctcagatcatcaggcattagattctgataaggagtgcgcaacctagatccctcacatgcgcagttcacaatagggttcatgctcctttgagaatttagtgcttctgctgatctaacataaggcagagctcaggcggtaatgctcgcttactgctcacctcacacctgtaatcccagcactttgggaggccgaggcaagaggagcctaggagtttgagaccaccctgggcaacacagagagaccctgtctctccaaaaaaaaaaatttagctagacatgctggcaggcacctgtggtctcagctactcaagaggctgtttgagcccaggaggttaaggctgcagtaagccttgaccacaccactgtactccagcctgggtgtcagagagagaccttgtctcaaaatgaaaattatgtggccgggcgcagtagctcacgcctgtaatcccagcactctgggaggtcaaggtgggtggatcacctgaggtcaggagtttgggaccagcctggccaacacggttaaaccccgtctctactaaaaatacaaaaattagccaggcatggtggtgcacacctgtagtcccagctattcaggaggctgaggcacaagaatcacttgagcccgggaggcagaggttgcagggagctgaagttgcgccactgcactccagcctgggaaacagagtgagacttcgtctcaaaaaaaaaaaaagtataatttctttcttactctttttaaagaactattatgaggattcttaattccatgcaaacgtaggatactactaaaatccaaattttatgtgaaactcctttcttattctcaatcatattttcccattgggtatcattataggttatataattaaatggatgaataaaattgtatattctttttttttttttttttttttttttttttagagaaagagtcttactctgtcacccaggctggtgtgcaatggtgcaatctcagctcattgcaacctccgcctcctgggttcaagcaattctcctgcctcagcctcctgagtagctggagttacaggtgcccgccacgacgtccagctaatttttgtatttttactagagacagggtttctccatgttggtcaggctggtctcgaactcacgacctcacgtaatccacctgcctcggcctcccaaagtgctgggattataggcatgagccaccgcaccctgcctatattaaattttttgttgtatacattttttaaactattttataaatcaaagaatacttaatgcaggccaggcgtagtggctgatgcctgtaggcccagcactttgggagcctgaggcgggtggatcacctgaggtcaggagttcaagaccagcctggccaacatggcgaaaccccatctttactaaaaatacaaaaattatctgggcgtcgtggcgggcgcctataatcctagctactcgggaggctgaggcagaagaatcgcttgaacccaggaggtggaggttgcaataagccgagattgccccactgcactccagcctgggagacagagcaagactccatctcaaaaaaaaaaaaacaagaatactcaatgtaaaaacttctaataatctccaaaagggcgtgaccagagcctgagcaacacaagaccttgtctctactaaaaataaaaaattagccagctgtggtggcactccctgtgatcccagctacttgggaggctgaggtgggaggatcatttaagccagggaagtcaaagctgcagtgagctgcaattgcaccactgcattctagcctgggcaaaaaagcaagacagtgtctcaaaaataagacatggggccgggcacggtggctcacgcctgtaatcccagcactttgggagactgaggcaggtggatcacgaggtcaagagatcaaaaccatcttggacagcatggtgaaaccccgtctctactaaaaatacaaaaacttagccgggcatggtggcacacacctatagtcccagctactcaggaggctgaggcaggagaatcgcttgaactcgggaggcggaggttcccgagccaagattgcaccactgcataccagcctggcaacagagcaagactcaaaaataaaggcatggaccgggcgcggtggctcacgcctgtaatcccagcactttgggaggccaaagtgggtgaatcatgaggtcaggagtttgagaccagcctggccaacatggtgaaaccctatctctactaaaaatacaaaaaattagctcattgtggtggcgggcacctataatcccagctagtcgggaggctgaggtaggagaattgcttgaacctgggaggcggaagttgcagtaagccgagatcgcaccattgcactccagcctgggcaacagagtgacactctgtctcaaaaaaaaaaaaaaagaaaatatatgtatatatattatatatatatatataaatataaaagacttgtatgaaagagagtatcatatatctcaatttttattacatgcaaaaataatattttagctgggcatggtggcatgtgtctgtaatcccagcactttcagaggccgaggctgggagatcactcgagctcaggagttcaagactagcctgagcaacagagtgagacctcgtctctacaaataccaaaaaaaaaaaaaaaattggttgggcatggtggtacatgcctgtagttatagctactcaggaagcagagatgggaagatcccttgagcccagtagatcgaggctgcagtgagccaagacggaaccactgtacttcagtctgcatgacagagtgaaatcctgtctcagtaataatttcaccttttttaatgtgactaatatagtatttaaaagtatgtatgtttctctcatatttcaattgggcagccctagagaattcttataagaaacttagttgtgttttcatgttattcttgctgccagtatgctaattataatgtacattcttcataatttagattataagaagaccagtctagcaccttatgtgaaagtttttgaacattttcttgaaaatctggataaatcccgaaaaggagaacttcttaagaagagtggtaagacgctatgcctttcccttctatctagttagatcttattattagtagaaatgagcaatttttgagttctagtctttctttgccctcctcccaaaatttacagatttatcttactatccttaatgttttggaaattgaggttccttaattcaatttaacacatagttattaaacacattctaagtatcaggtctataagggagacaaagatgaattaacatcatgcctccttgcccttaagaagtactaacttggccaggcacggtggctcacgcctgtaatcccagcactttgggagaccaaggcagttggatcacttgaggtcaggagttcgagaccagcctggccaacatggtgaaaccctgtttctactaaaaatacaaaaaattagctgggcgtggtggcaggcacctgtaatcccagctactcaggaggccgagacatgagaatcgcttgaaccggggaggcagaggttgcagtgagctgagatcacaccatcgcactccagcctgggcaacagagcaagactccatctcaaaaaaaaaaaagaagtactaacttaatacaaaaaaaaaagtacaaaatgctaagaaagagattttatctgatggactctgagatttcatatgaaaatggtggtatctgaactcctttcagtgtagctgctgtaagaattctaatccctagccgggtgcagtggctcacacctgtaatcccagcactttgggatgctgaggcaggtggatcgcctgaggtcaggagttcaaaacaagcctagccaacatagtaaaaccccatctctactaaaaatacaaaaaattagctgggtgtggtggtgggagcctgtaatcccagctactagggaggctgaggcaggagaatcacttgaacccaggaggcagaggttgcagtgagctgaaattgtgccatcgcactccagcctgggcaacaagagcaaaactccgtctcaaaaaaaaaaaaaaaccctaggccggacacggtggctcacacctgtaatcctagcactttgggaggccaaagcaggtggatcacctgaggtcaggagttcaagaccagcctggccaacacggtgaaaccccgtctctactaaaaatacaaaaattagccgggcgtggtattgtgcgcctgtaatcccagctacttgggaggctgaggcaggagaatcacttgaagctgggaggtggaggttgcagtgagccaagatcgcaccattgcactccagcctgggcaacagagcaagacactatctcaaaaaaaaaaaaaatttctaatccctaatgccaatatactataccataaggtatgagaaggatttccacaagcagaaatatgataagataaagggtatggaggtggaaaaaggccaagggttgttcattcttgaaggaacatcaagagcaaagacagacaggaaagcatccagttactctggaagccatcaagtagtacagctaatctagtatatggtgtgtccagaagtgatgggctataaatccaaagaagcaaactgaatggccttgaattccaagcttatgtgtttgggcttggttttgggcttaataggaagcttttaaaagttctgaggaagggaatgccatgatttgtagtttttatctagaaagataaatctgggcaagacagggactagaatagagcccaagaggccaactgcgctattgccactagaacagtagcactggagatctccgaaaggtgcaaatactggaaccatccttgagacttgctaatgatttagaagtgaagagatgaaagatggaagggaaaatgttatagaagccaggggaaagaaaagtgcaagattatcaagtgtcaggtacagtaggaaactaataaaatcctgctgcatataataactggaaagaaacacaaagaggatagcagtgtcaaatgaagggtactctaaatgggagacatatgagcatatgtataagccaatatgaaaaaaatcagcagattgaatattattcaagagatgaaggctactctagaaaactgtgacaatgttatagcaatacaaattatcttgccacttcattttttatttaaatatgtgatagtttaagcagtagtgcctaagataatgctctactcagtagacactcatatgtgtgattattggatgaacaacaactctgagcttggaaagcctggttgaagctgccattgcaactggccgtattaagtcctttgtatcctcactgttccatactagctcagcctatgatgtggacttcagcaaatgtgtaagcaaatctttgtgcatgatgtgtgttaaatagaagcattaggcaaaaaagaatgtaaaagtaaatgggctttgttttgtttcctttgctgttcttccatatattatctattctattttagatttacaaaaagatttctgaagacagagctcctcaaaccattgtggatatcttctgccttcaaccacagatcaaatacttcaagagccatttaataaatatggcagaactatatatgtgtcttaaacctcaaagtaaattttccttgagaaata

SEQ ID NO: 100 - DNA, 25067 bp, Homo sapiens
  source 1..25067: mol_type = other DNA
gctgggaggccccgccctttccgtagatatctctagaaagccgcgccggagcccaaaaacaaggactgcgcacgcgcggcggcaaggcccgggcattttgctgcgtcaccagccgccgcccggcctcaccacccctcgtttgcacgcacgcacgttcattctccgtcctcgcgccccttttcctacactttcctcttctccccgaccggaggagccgctctttccgcgcggtgcattctggggcccgaggtcgagcccgccgctgccgccgtcgcctgagggaagcgagaagaggccgcgaccggagagaaaaagcggagtcgccaccggagagaagtcgactccctagcagcagccgccgccagagaggcccgcccaccagttcgcccgtccccctgccccgttcacaatgtgagtgcgacaccccgccgagggaaggtcgccgagtgaggccgaggccgcgttgggggctccctggaagcggccccctagcctttctcgcatcggtggtggcagtcgttcctgcctgggggcgggaggtccaggatccttgttccggttaccgttggcgggtggaggacatttttcctccagatgtctgcttcccccacccctgaaccgttccttggcttccccatgccggaaatcctacttttacccctttggctgtctgggttactcgcctctttcggtaacttcaccctaggccttaagctcccggtagctgctcgccatgcggcgccctgaagcgtgaaccttcgtgggtcgcctctcggctgcttgggcgctccggttctgttgctttgtggtcccggggccaggccctgagtcgagtgcacctgtggtgggtgccgccaggtgcctggcggagctcctgggagagccccacgcggacctcgccgtgagctgcaggtactgctaggcaactagaaggaagccatgcccacgccgcaacatacttccctctccagtgtctgggtttcttgagtgtgggtacttccagtccgcctcctaactccagtctcttgaaaacacgggaggttgccaaaactcagccgcttccctggcagcgaggaggagttaccattgagcaggtagttccgcacgtgtcgactttggaaagatacggacattttctgtgtttcatgttctacttgaggtgaggtttcactatcttgttacagtgtaggatgaaataggtatgtagtaggcatttaattaacctacagtcgtcccaaagatcttaaatttgtgtggaggtgaatacagattctatggcagtcttcattttacgatgataaaggaaagccttggcgattttaaccggtaagaattcttggcactgccgcgtacagtgggaactgccggttttacagggtttttttttttttttttttttttttgacgggaggttatttttcaaggtactaactacgtcctaaaaggtatggagaacaattaaggtggaaccttttttttcttttgttttagactccattcagaagagagaagaggggagtgactttatgtctttggaaaagtaataaggatttgcttgattcaagtcatgatactgaggctgagtatattggctagaaatctaaagggatgcgtgaggctgaagcgagtttatcactgggaacaagcttctagagcacagcatgttagaatttttgaaggagccccctccccgaaagtgatacgtaatcggggttttaaaaaatttgaattaggctgggcgcggtggctcacaactgtgatcccagcactctgagaggccgaggcgggcggatcacctgaggtcgggagttcgagaccagactgaccaacatggagaaaccgcgtcgctgcaaaaatacaaaaaaaattagccgggcgtggtggcacatgcctgtaatcccagctactcgggaggctgaggttaggagaatcgcttgaatctgggaggtggaggttgcggtgagccgagatcatgccattgcactccagcctgggcaacaagagtgaaaacccgtctcaaaataaataaataaatttgaatgtatataaaatagtttttgcttttctatttgaaagctctcctaagtaatgtagaagggacatcagtcttaacctttcatactctgaaaatctgtaaggggaaattttttgtcagatgaggcattaagcagcttttaataatagagccaaacaacatatcttttcgcgaaaagtatgtttaaaattggcttgaagtagaagcatttgatggaggccacatgagatatttaaataggtaaggaacggctattactaggaaagtagatttaaaaacttgggtgaaaagtaagtgtaaggccaggcgcggtggctcacgcctgtaatccctatacttgggaggccgaggcaggcggaacacgaggtcaggagttagagaccagcctggccaatatggtgaaaccccgtttctactaaaaatacaaaaactagctgggtgtggtggtgcatgcctgtagtcccagctactccggaggctgaggcaggagaatcgcttgaacccaggaggtgaaggtttcagtgagcagagattgcgccgttgtactccagcctgggcaatagagggagactccgtctcaaaaaaaaaaaaaaaaaaaaaaaagtaagtgtagcagtagagagactattccaaaaagtagcctctctagttaaaaaataaaaatgctactttcatgccgggcggggtggctcactcctgtaatcccagcactttgggaggccgaggcgggtggatcacgaggtcaggagatcgagaccatcctggctaacacggtgaaaccccgtctctactaaaaatacaaaaaattagccgggtgtggtggcgggcgcctgtggtcccagctacttgggaggctaaggcaagagaatggcttgaacccggaaggcggagcttgcagtgagcggcgattgcgccactgtactccagcctgggcgacacagcgagactgtcttaaaaaaaaaaaaaaaaaaaaagaaaagaaaaaatgctaccttcaaaacgagtgattcaatgccacttgaagagtgttgggctgggggaaacaagtgttttgaagagaccagctaaaatattcttttaaaaataatatatgccgtttagtaaattcttcagggactcttaacaagctaaagacttaaattttaaaatgaaagttgtaagtcagttatttgaagtggaagaagcctttaatgggtcgtcatccagtcttaagaatctggctgataagggtttattttgttgataacttgttttaaaagtgttttttttggagacagggtcttcctctgtcacccaggctggagtgcagctgcaacctctacctcccgggctcaagcgatcctccttgcctcagtctcccgagtagctgggactgcaggcaagcaccaccatgcctggctaataaattttttttaagctctggggagagagagatttatgctgggtgtcttaaaggcttgggagtgtgttttctcatttgatttactcatttgctcttcagcgatttcgtagttacatttctttaaatcctaagttataaaagtttgtctcataatttacataaaagctcttaatttcggacctatcttggagaaggctgggatttttaggaccttcccccacttaagattttccgcttaactaaccttgccagagggtgctacttcgcattttctttttgaatcattgtcgttcgaccgattaaaaatagagaaaaagtaaaatgttttatttattttagagatgttggaagttgttgtttttcctgtctaatgtcttgtatataattaggaagttgtccagaaacttgcgtctctgattttggtaaaaatcttcctgtcattcagctgtgtaggaacgaatctccaaaataaaattgtccatctttagcctgcaaaacaaattgtcgtagtgaacatatgctatattgttaattgctataacttgagtatctgatggtgggtggcctttgttcagtattgatttcctgtgcactgtaacctggcaactggatttttaatttttcttcctgtgttcagttagactttaactagaaggcagtagaaactggaagtgaaaaatttcttgagtgcaagccagtgttttattgctaaattaagattctcctgactaattggattttctcggtttaaaaatctacaagctatcatttttgggtcttgtggttagcgattgtctcttttcaggggaaaaaaaacctttgtaaatatcaactgttcagaaccaatctcgctgttaaacacctaagatcatatttacgtgagctcaaaaaatactctagtgagcatattttgctatggaaatagtgtattgaactttttactatttactgtgtggatcggcaattacagttttggggttttttttgtttgttttttttgttttttttttttttgagacggagtttcgctgtcgcccaggctggagtgcagtggcgcgatctcggctcactgcaggctccgccccctggggttcacgccattctcttgcctcagcctcccgagtagctgggactacaggcacccgccacctcgcccggctaattttttgtatttttagtagagacggggtttcaccgtgttagccagaatggtctcgatctcctgatctcgtgatccgcctgcctcggcctcccaaagtgctgggattacaggcgtgagccaccgcgcccggcccatagttttggtttttgtttgtttttttgagatggagtctggctctgtcgcccaggctggagtgaactggtgcgatctcggctcactgcaacctccgccttctgggttgaagtagttctctgcctcagcttcctgagtagctgggattccaggtgcctgccgccatgcctggctaattttttttttttttttttttttttttttgagacagagtttctctcttgttgcccaggctgaagtgcaatgtcacggtctcggctcaccgcaacctccgcctcctgtgttcaagcaattctcctgcctcagcctcccgggtagctgcgatcacaggcatgcgccaccatgcccggctaattagtagagatggggtttctccatgttggtcaggctggtctcaaactcccgacttcaggtgatcacccgcctcggcctcagaaagtgctgggattacaggtgtgagccactgcatctggcctaattttatatatttttagtagcgatggggtttcaccatcttggccaggctggtcttgaactcctgacctcatgatccacgcgcctcagactcctagagtgctgggattacaggcgtgagctactgccgcagccggcaatgatagattctagaatgaggctgcttccctgcttcctcggtatacctttgtaaatttttttttttttcttgaggcggagtctcattctgttgcccagactgcagtgcagtggcgcgatcttggctcactgcaacctctgcctcctaggttcaagcgattctcctctctcagactcccaagtagctgggactacaggcatgtgccgctatgcccagctaattttttgtattttagtagaaatggggtttcgccgttttgctcaggcaatcatcccaccttggccttccaaagtgctaggattacaggtgtgagccaccacgcccggcctttttttttttttttcttttaaatggagacgggatcttaccgtgttgtccaggttggtcttgaactcctgggctcaagtgatcttcctcccaaagtcctgggtttacaggtgtgagctgctgcacccgatccttggtatacctttgaacttgcggttttccgggaatatttcttcttttctgagacactgtctcactactttgcccaggctggagtgcagtggtgtcatcactgtctgcagcctcaaacttgggatcaagccatcctcctgccttggtcccccagtagttgggactacaggtgtgcaccaccacacccagctaacttaattttttttagagacgggggtctcacaatgttgctaaggcttatcttgtctcaaactcttgggctcaagcagtcttccctcctcagcctcccagagtgctggaattggagccacttgctcattgatattttaacttcaccttcagcatatgctcttttcccattttgtattctgaagctgaataaaatgtgctgttggggcttttctgtgcctcaggtgctcattcacatgaagccacacttcatttgatagtgccaatgtcagctgggcacggtggctcacacatgtaatcccagcacttttggaggccaaggcgggcaggtcacttgtggtcaggagttccagactagcctggccaacatggtgaaaccctgtctctactaaaaatacaaaaattagctgggcaccgtggcgggtgcctgtaatcccagctacttgggaggctgaggcaggagaatggtttgaacccaggaggcgaggaggttgcagtgagccgagaatgcgccactgctgcactccagcctgggttacagagtgagactctttttttttgagatggagtcttgctctgtcgcccaggctggagtgcaatggtgtgatttcggctcactgcaagctctgcctcctgggtgttcaagcgattctcctgcctcagccccctgagtacctgggattacaggcgcatgccaccgtacctggctaatttttgtatttttttttttaagtagagatggggtttcgccatgttggtcaggctggtctcaaattcctgacctcaggagatctgccgccttggcctcccaaagtgctgggattacaggcatgagccactgcacccggctgattcttttttttttttttttttttttttgagatggagtctcactctgttgcccaggctggagtgcagtggcgtgatctttgctcactgcaggctccgcctcccgggttcacgccattctcctgcctcagcctcccgagtagctgggactacaggctcccgccacctcatccggctaattttttgtatttttagtagagacggggtttcactctgttagccaggaaggtctggatctcctgacctcgtgatccgccctcctcggcctcccaaagtgttgggattacaggcatgagccaccgcgcccggcctgattcttaaaatacccatttacacagcactaatttgagaatcataaaggggctgtccgaaataggattggggctgtctgaaataggattggggttcacgagatcaagccattgcattccagtctggacaacaagagcaaaaactctgtccaaacaaaaaaacaaaacacaactacaaatggggggaccaggtatggtgactcacacctgtaatcccagcactttgggaggccggggtggatgcatcacctgagttcagaagtttgagaccagcctgggcaacaaggtaagaccccatctctacaaaaaataacctgggtgtgtggtagcatgtatctgtggttccatccaccatggagactgaggtgggaggatcacctgagcctgcgaagtcaaggctgtgtgagctgagatcacgccacagcactccagcctgaatgacaaagcaagaactggtctcaaaaaaaaaaaaaaacttttaaaaaacaaaaactacaagtgggtggagggtgccctacacttatcctgaatcaggaataaacacatatgtattccctcatttgaaaggagaactgggccaggtgtggtggctcacgcctgttaatcccagcactttgggaggctgaagctggaggatcacctgaggtcaggagttggagaccagcctgaccagcgtggtgaaaccccatctctacttaaaaaaaattgctaggcctgacggcacatgcctgtaaccccagctacttgggaggctgaggcaggatagtcgcttgaacctgggaagcaggggttgcagagaggcaagatgacgccgttgcagtccaatcagggcagcaagagtgaaactctgtccccccaaaaaaaaaaaaagaaagaaaattgggttgggtgcagtgactcacacctataatcccaccactttgggggactgaggtgggcagatcacttgaggccgagttcgagaccagcctggccaatattgcaaaacctcatctctactaaaaatgtgaaaacattagctaggtgtggtgacgcatgcctgtagttccatctactcattgtgaggctgaggcaggaggatcacctgaaccccggaagtgaagattgcagtgagctgtgatcgcgccattgcactccagcctgggcgacagcaagactttctcaaaaaaaaaaaaaaaccaaaaccaataaaacaaaaatggaaaaccagcgtttatgaaatctccttttgccttccatgaggattacaccatctctttttctcctattaacatatggagagggctgggtgcggtggctcatgcctgtaatcctagcactttgggaagccaaggcaggtggatcacttgaggtcaggagttaaagatcagccttgccaacatgatgacacctcgtctctactaaaaatacaaaaattagccgggcatggtggcaggcacctgtaatcccagctactcgggaggctaaggcagaagaattgcttcaacctgggaggtggaggttgcggtgagccaagatcatgccaccgttctccagcctgtcactccggggtgacagagtgagactccgtctaaaaaaacaaacccaaaacatatggagagggggctgagtttagctttaactttagcttctaaactaattatactggatttatctctagcctttctgctaacactggctaaactcataaccattgtgtaagactgttaattcattttaatagtaatatccctatagattcaaaactttccacctctgcatacattatgtaaataatctacttaaagcaaaacaacaataaaccccacaggcggacattccatgctttttttttttttttttttttttgaggcagagtctcactctgttgcccaggctggggtgcagcaggggcacatctcagctcactgtagcctccgcctcctgggttcaaccgattctcatgtctcagcctcccaagtagctgggattacaggtatgctaccatgcccaactaatttttgtatcttcagtagagacagggttttgccatgttggcatggttggtttgaactcctggcctccagtaatctgccagccttgggctcccaaagtgctgatattagatgtgagccatcactcctggtctccatgcttctctaagtcagggtcttgctatgtggcccaggctggagtgcagtggtacaaccatgctcactataacctcaaactccttgtctcaagcaattctcccacctcagtgccccccagttagctaggactacaagcatgtgtcaccatggccagcgatttttttctttttggcagagatgtggtctcgcagtgttgcccaggctggtcttgaactcctggcccaaaatgatactctcaccttggcctcctaaagtgctaggattccaggcatgaggcacagtgcccagcctattccatgctgatgtgacaagcatttctaagctcaatagaagggctatatataccaatccaagcaattacattttgcataacctaaaatcctctatagtcctatctaaaaggtctctttgttagccttgaaaggacagagaccgtatttgttcctaaataccataattttaatatgttagtatctggtgagttataactctaatttataaaacactgcaagcacccttcactataaaaaattgatgcaccaaagaagctagatggaaacagtttgctaggaaaagtgtcccagttattttaatccatttgatagttttactatgtgcaatgcacattttattataaaagacaaaacaggctgggtatggtggctcactcctgtaattccagcactttgggaggctgaggcgggtggctcacctgaggtcaggagttcgagaccagcctggccaacatggtgaaaacctgcctctactaaaaaacaaaaattagccaggcttggtggcgggcgcctgtaatcccagctactcaagggactgaggaaggagaactgcttgaacccaggaggcagaagctgctgtgagccgagatcacgccactgcactccaacctgggcgacagagccagactccatctcaaaaataataaataaattaaaaatacctatttgtaatatgtgaggaatgagacatcaaagttctgctatggaaaggaaaaaagtagttcctggagttcataaatggtttttccttcttaggtatcaaacaccttgcctataaatgtctgacaccaagctgtctcccacatactcattgctcagggaaaccgtaagatatttgagatcttctgtaatcagctgtagtactataaaactttctgaataaacctgctagtcctgtggcctgtggctaccaaatcatgtgccaagatgtatcagggccccatggaggaactcacaactaccttgggatattttaaatttcagagtaattcagtgatactcaacataagccaagacactaagcaaactattagtttcaggttgttcagtttcaatatgagattgtactgcaaacccctccattaagtttcatcttctaaaaactgaatttctggtggttgctataactcaaaaaaacacaggtacccaccccaccaaaaaaaaataataataataatggggaacaaggagtgagatgatagaagtcatttcaaagtttgagaagttatatagtatccaaaagccatacacattccattgataggtatggttatataagaaactatatatatttttctttccaataatgtaaattcgtttttccaatagctactaggctgctaagacaatatagttatgttgcttggatacagctatgtcatcaaagcaactgctagttactccttttggcttaagagcacaacaaaactcctcagacaccaagggcactatataccaggaaggcttgtgaacctctgtcctagcgagttattttatgtggtagtttccactctaagatacaaaggtgaaagctgttcaaggtaatgttttatggaaaatgtagcacttttttttttttttttgggtggtgcggagaaggagtctcactctgtcgcccaggctagagtgcagtggcgctatctggcttactgcaacctctgcctttcatgttcaagcaattctcccgcctcagccatcctagtagctgggatcacaggtgtgcaccaccatgcccagctaatttttacatttttagtagagacgggatttcaccacggtggttggccaggctggtcttgaactcctgacatcaggtgacctgctcacctcagcctcccaaagtgctgagattactgccataagccaccgcacttagccagcactattttttttttttttttttttttttttgagtcggaatctcactctctcacccaggctgcagtgcagtggcacgatctcagctcactgcaacctccaccaccgggttcaaggattcttgtgcttcagcctcccaagtagctgggactataggagcgcgccaccatgcctgtctaatttttgtatttttagtagcgatggggtttcaccatgttgtccaggctgacttcaagtgatttacctgccttggcctcccaaagtgctgggattataggcatgaaccaccacgcatacccacttagcacttttctatcaagcaactcttgtggctttccacattccgtcttttgagcactctttttttaaaaaaattactttcttgctttggttttagaccctgaagcattcttcttttaacatccccaggagataaaagaatttttctttgttcaagaaagactcaaggtcaaatatcactctctcactgcctccataacaaattttagactctcaggactccattatcatgttgtcaagtatgcagaagctagtttagattatataataaaacaaactggaagtacagagacatggttagttactttgcaataaaaggaccgctggagaaattattgtccctttttgtgaagtgaaaaaaaataagccttctgtcagaaatgctgggttccaatcctattttggctttttttttttttttggggggggagacacagcctctctctgttgcccaggctgtagtgcagtggcgtgatctcggcttaccgcaacctccacctccacctccccctccccctccccctcccagcctcccaaatagctggtattacaggcatacgccacctcgcctggctaattttgtatttttagtagagacggggtttctccacgttggtcagactggtctcaaactcccagccccaggtgatccatcagccttggcctcacaaagtgctgggatcatgggcttgagtcactgcgcctggtctgcagtttttgtgttgtgttttgagacggagtttcacgctgttgtccaggctggagtgcaatggcgtggtctgggctcactgcaacctccacctccttatttcaagcgattctcctgctgcagcatcctgagtagctgggattacaggtgcccatcaccacacccagctaattttttgtatttttagtagagatggggtttcataatgtttgccaggctggtctctgaactcctgaccttaggtgatgcacccatctcagcctcccaaagtgctggagattacaggcgtgagccaccgcactcggccctgtttgtagttttaatgtgttagccaacttgtataaagggtcagccagtaaatattcagctttgcaggccacaaatatctcttatctcattcacattttttttttttttttttttggtctcattctgttgcctaggctagagtgcagtagtgtgatcttggctcactgcaacttccgcctcctgtgtttttttaaaaatatacatttaaaaaatgtaggaatcatttttggttcatggcctaaccacaggttttgataatttaaatttgttttatctgggacatgatcatatagcttgctaaggctttttttctttttctttttctttttcttttttgagacagagtcttgctctgtcacccagactagagtgcagtggcgtgatcttggctcgctgcaacctctacctcctgggttcaactgattggcctggctcagtctcccaaatagctgggactacaggtacgtgccaccacgcccagctaatttttgcaattttagtagagacggggttttactatattggccaggctggtctcgaactcctgacctcgtgatccgcctgcctctgcctcccaaagtgctgggattacaggtgtgaaccagcactttttttttttttttttttttttgagaccgagtttcactcttgttgcccaggctggagtgcaatggcctgatctcggctcaccgtaacctccacttcccaggttcaagcgattctcctgactcagcctcctgagtagctgagattacaggcatgcaccaccacgcctggcgaatttttttttttttttttttttttttttttgagatggagtcttgctctgttgcccaggctggggtgcggtggcctgatctcagctcactgcaagctccgcctcctgggttcatgccattctcctgtctcagcctcccgagtagctgggactacaggcgcctaccaccatgcctggctaattttttgtatttttagtagagacagggtttcatcgtgttagccaggatggtctcaatctcctgacattgtgatcctcctgcctcggcctcccaaagtgctgggattatgggcgtgagccactgtgcccgcctgaattttttgtaattttagcagagacgagtttctccgtgttggtcaggctggtctcgaattctcgacctcaggtgatccacctgcctcgcctcccaaagtgctgggattacaggcgtgagccaccgcgcctggcctgctaaggctttcataagaaagtatcacacactgggtggcttaaacagcagaaatttatttcttcacatttccacgaggctgaaaatccaaggcgaaggtgtcagcaggattagtttcttctgaggcctttccttggtttgcagatagctatcttctttcttccctctgtgctaatctctttatataggaggacaacagtcattggattagggtctatcctaagacctcatatttacttgtcatttaaagacactttctccaaatacaatcccattcttaagatgtactgggggttaggacttcaatgtattaattttgaggaaactgataaaattctagattgctgaatttgaggaaaggagattgattctcctggtttcagtgaacttaatgtaaaaagtgaagctctgatgtaccagtgttttttgttgttgttgtttgttttgagacagagtctctgttgcccaggctggattgcagtggcatgatctcagctcaccgcagcctccacctcccgggttcaagtgattcttgtgcctcagtcccatccctcaagtatctgggactacaggcctgcatcaccatgcccagctaattttttttttttttttttttttttgagacagtctcgctctgttgccaggctggagtgcaatggcgcaatctcggctcattgcaacctccgcctcccaggttcaagcgatgctcctgcctcagcctcccaagtagctgagattacaggcgcctgccactgtgcctggctaatttttgtattttagtagagatggggtttcaccatgttggtcaggctggtctcgaactcctgagcttaggtgatccacccacctcagcctcccaaagtgctgggattacaggcgtgagccaccgtaccctgctttttttttttttttttttttttttttccgtatttgtatttgtagtagagtcggggtttcgctgtgctggccaggctggtctctagctctcctggcctcaagtgacccacctgccttggcctcccaaagtgctgggattacaggtgtgagccactgcacccagccaagtaacataatttttgataggactagataaacggctaactctactaagcattgtttggtttttaaatctttcctattatgaaattggaatcattctgaaactaaatcttgttagacccataggttttaacttggaatgtagctgttagggtaaaaatgtagtttttgtttaaaattgtaacaaactgccctgaaataatgctataatggtgtcgaaggttagtatgtgaatgtttagttaatgaattccagcttgactttccctactttatccttttgtaggcagcctgcttctgcaaagtggtacgatcgaagggactatgtcttcattgaattttgtgttgaagacagtaaggatgttaatgtaaattttgaaaaatccaaacttacattcaggtaagttaagctttttatccaatgatgtaaaatagtcattcacacaactgaataactttgactggcttgtcttttcattgaagttattattaatctttgtctctttgaagaggcttaattctttctttattattttatacagttgtctcggaggaagtgataattttaagcatttaaatgaaattgatctttttcactgtattgatccaaatgtaagtagtctttatgctttaatccaaattttagttgtgaggaaacagacataccaagtattctttttagcaatgagcattagttctgtttttcttaacagtgaggcaaactatgtatatttacattttgtagaatatttcctccaaaattggtttctgcatactttttgtttttgctatcactgtttgggcttagagtagtatccttgaggctcgtctcatcttttttatttgttttgtttttttgtttgtttggttttgttctttgagactgctgcagtacaatggagcgatcccggctcactgcaacctctgcctcgtaggttccagggattctcctgcctcagcctctggagcagctgggattacaggcacatgccaccatgcctggctaatttttgtgtttttagtaaagaccatgttggtcaggctggtctcaaactcctgacctcaggtgttccacctgcctcggcctcccaaagtgctgggattacaggcatgagccactgcgcccggccaaggcttcccttatctaagaatagaatctttaaaccattctgtggttatatcatttttagttaaagtttttaaggttttattctgtttatcgtgtgcaggaaagaaaaaaatggtaccaggttaaactttaaactttattgttgtgcagattatttcagtaggaaatagaagggaaaaaaaaatttttttttaaatgaaacttaaagggggttggggcagttggatagtttgaagtttttagtagtcaagggcatgtttcagagtccagagaaaatttaggtaaagaaatgagaaaggtgagaaatgacaagctattttctatcatgtagtgatgctggaaagataaatggtatgatggtccttttgtttttaggattccaagcataaaagaacggacagatcaattttatgttgtttacgaaaaggagaatctggccagtcatggccaaggttaacaaaagaaagggcaaaggtaggtttcattttccttttttgaaaagtttgatatttttattttaggtaataaaagatgtacttatttgatgtaaggaatatggctgtgtttttgtttcacagctaagtataaagcctcatgttcatgttttttgtctactcagttttaatacgaagtgtgatcagaatatcagttattaactggtgtagaatcttttgtacttaagagacagactttgcataaattactcagctatcacatgggaggggacaaagcttggtgaaaaaataatcaactgaaaatagttcttactagtaaatttgttttcaaaaggtatgtttaacaattttcagtgttttttttcccccaaaacagggtctctctttgtcacccaggctggagtgcagtggcacgatcttggctcactgcagcctcagtttcccaggctccaagtgatcctccctcctcagtcccccaagtagctgggactgtaggggcatgccacaacacctggctaatttttgtattttttgtagaaaggggtatcacagtgttgcccagcttggtcttgaacttctgggctcaagcagtctccccacctcagcctcccaaagtgctgggactacaggcatgagccacgacaccagcctagtctttttttttaggtagtctcatgccactcatgccagagtgcactggtgtgaacatggctcactgtagcctccacctgggcttaagcgatcctcccacccacctcacctctccaaatagctaggattgtaggaatgtgccaccacgcccaggaaatttgtttttttgttttttccccagatacaggatccactattgctcaggctgtctcgaactcctgaaggattacacaactagtctttccaccttggccacccaaagtgttggggttacaggtgtgagccacctcatttagcttagtctattctttgtgtgctaattacatgccctcctaaaaatacaaagtcacagttcaaaaaatattgttttgccaggcaccagtagcatgtgcctgttgtagttaaaagctactctggagggtgaagtgggagaaatacttgcgcccaagtctgggttgcattgccatatgtcaggtaaccacgctaagttaacatcagtacggtgttgtcccaggaagcggggaccaccaggttgcctgaagagggtaaacaagacccttggtcagaaacggagctggtcaaaactcacatattgatcaatagtgggattgcacctgtgaatgcttgctgcactccagcctgggcaacatagcaagacctggtctctttagaagaaaagaaaacgtagtcttaaggttcatgccaaatgcaaattagcctaatcttagggtgatatttgtattgatttatagcttaattggcttagtgtcgacttcaataattggaaagactgggaagatgattcagatgaagacatgtctaattttgatcgtttctctgaggtaagttcctttaaatggacctctccccattcgaagcacacggtacctgtctatgtagtcaatttaatatggttttgggcacctaatggtattcatgatgcatgttattttatttttaagaccattttgcagtcatagtaaatagatgttaacaatggcaattttaatcctgaagttgaaccattttaatgattttaaaaggaattagtgttagctacaaaagttacaaaagttaatgcattaagacaaactaacacagctagtttgctaatttcatcattgggactttttttttttttttttttaaagcatgattgcagtagttgacttggattttgaagtcataaaataagactataaacttttggccgggcacggtgctcacacctgtaatcccagcactttgggaggccaaggctggcagatcacgaggtcaggagatctagatcatacgggccaacttggtgaaacctcatctctactaaaatacaaaaaaaattagctgggcatggtggcgcgcacctgtggtcccacctactcctgaggctgaaacgggaattgcttgaacgctggaggcagaggatgcagtgagccgagatcgtgccactggactccagcctggcgaaagagcgggactcggtcaaataaataaataaatgcagaacgataaactgttaaacacaagaatcataggctgggcgcggtggctcacgcctgtaatcccagcactttgggaggctgagatgggcggatcacctgaggtcaggagttcaagaccagcctgaccaacatggtgaaaccccgtctctactaaaatacaaaaattagccgggtgcagtggcgggcgcctgtaatctcagctactcagaaggctgaggcaggagaatcgcgtgaacccagaaggcgtgaacaaaattagctgggcgtagtggtgcatgcctgtgattccagctactcgggaggccgaggcaggaaaatcacttgaacccgggaggtggaggttgcggtgagccgagatcgctattgcactccagtctgggcaacaagagcaaaacgccgtctctaaattaataaataattaaataaaactacaaaaaaatagctaggcgtggtagtgcacgcctgtaatcccagctactccggaggctaaggcaggagaattgcttgaacccaggaggtagaggttgcagtgagccgagatcacaccactgcactccagcctgggcgacagagcaagactctgtctccaaaaaaaaaaaaaaaaaaattcatggtgaaatgtttaccatgagatatacaaggaaaaaagtttaagaaagtctgttttctaagatgtcacccaaataacgttgccatggcccaagaataaatgattcatctctatataggcagaatagactttatcaaatgtagtagaataaaactaagtacagaaagaacattagtgtataagtcgaatgcatactgatgaaatccatttcttgttgctatttgaaatttttcattaactagattttgtattttgagaccttaagagttaaataaaaggagctaagtttccagctttatgcaactgcttatttaacagttctccacacgtgactctggcatggtgatttcaacaggaagggaggatgttctattcatattattttttaattgtactttccttacctgtagaaatcggtgccaccatttacctagctgtgcaagccattgtgttgcttaggcaggtcttgaactcctgagctcaagtgatcctcctgcctcagcttcccaaagtgctgggactacaggcctgagccaccacccccagccttataacactgtttttgttttttgttttttgttttattttgctatctttgttgtccagtttttgttgttatctcttacatatctcttgaatatgtacagttttctcttgctgtttatcttaagcacgtagcgttatgcttggtacatttagcatttttcctgcccaaagaaacttaaagtattgagtagtgcttttggaggtagggaaactcccagttactcatttcattcaagatagattgcccaaaatttttatactgaatccttttttgtgtgtgtttaattaattgaggtaagagcacttcacatgaaatctactcttttaacagactatttatttatttttttgaggcagagttttgctcttgttgcccaggatgtagtgcaatggcacgatcttggctcactccagcctccacctcctgggttcaagcaattctcctgcctcagcctcccaagtagctgggattacgggtgcccaccaccatgcccggctaatttttgtatttttagtggagacagggtttcaccatgttgggcaggctagcctcgaactcctgacctcaggtgatccacccgccttggcctcccaaagttctgggattacaggcatgagtcaccagacctggccacgcccagctatcttttaagtgcatgatacagtattgttaactataggcataatgctgtacagtagtaggtctctggaactatgcattttgtgtaattggaatttgatacctatttaacagtagcaactctgcattttccttccccccagctcctggcatctaccattctactctctatttttgtgtgtctgactatcttaggtatcttacataatcttaggtatctcatataagtggaatcatgcagtatttgtcctgtgactggcttatttcacatagcatgacgtgcttcagattcttcattgtgttttgtcacataaggcagatttttttctttaaggctgaatgatacttttaggctgaacacattccattgtatgtttgactatctttttaaggtcctttcccattctaaaatctgggtaatcatgtatttttgaagtttgattttttttccatgcatatgtgattttatttttctaaaatttaaacattacaaaaatggtttaaacttgagaaaataagtttctcatcatctgataatagtttaagtttaaatcatttcttggttcttcacaatatctaaaaccatgatgagaataccaggcctggcacagtggcttgctcctgtaatcccagcactttgggaggccgaggcaaggggatcacttgaggccaggagttcaagaccagcctggccaatatggtaaaaccctgtctctaccaaagatacaaaaactaactgggcgtggtggcatctgcctgtaatcccagctactcaggaagctgaggcaggagactcccttgaacccgggaagcggaagttgcagtgagccgagattgtgctgctgcactccaacctgggcaacagagcaagactccatctcaaaataaaaaaggcttggcatggtggttcacgcctgtaatcccagcactttgggaggccaaggtgggtggatcactacagcccaggaattcgagaccagcctgggcaacatggtgaaaccccgtgtgtaccaaaatacaaaaaattagttgggtgtggtggtacgcgcctgtaatcccagctaccctggaggccgaggcatgagaattgcgtgaacccagaggcggaggttgcagtgagctgagatcacgccaccatactccagcttggacgacaaagctagactctgtctcaaaaaaaaaagaataccttaatacatgttccacctaacttaagatagatagctgtgcaactacaaatgaatcccattcttttccttaaccaccagaggtaaccactactcaagtagaatttttaatgtttgtcaaacctgttgcatgaatagctttgcttttctttagggaaaatttagttttaatttccatatgggtttttaggattttgtataattacctataatcttccttttccagaagggaaagatgcttatatttgcattttgcattttttgatatctgtggcagacttaaggtttattctgaagcatacagcattaataattagggcctaacttaacatcatttttaaaactaatttttacacttcaaatagatgatgaacaacatgggtggtgatgaggatgtagatttaccagaagtagatggagcagatgatgtaagtctaaaaattcttttttctgtttactttcatactattaaatagtaagaaacaacatatttacaaatggttttatatagattcacaattacttcttattttctaaaaaaaaagaaaagggaaaagcaatttttaaaatgtgcccatttttgacgaatgggggtatctattagggaactggttgtaccgtagaccattcctaaatggattagatttccaaagaatcattgtatagagacattatatattaataccgtactcaattataacagtcagtttaggccgggcgaggtggctcatgtctgttatcccagcaggccaggtgggcagagtacgtgaggtcaggagttcgagaccagcctggccaacatggtgaaaccctgtcttaaaaacttagccagacatgatggcaggtgcctgtaatcccagctactggtgagctgaggtgggagaatcgcttgaacctgggaggcggaggttgcagtgagccaagatcacaccattgcactccagtgtgggcagcagagcgaggctccatctcaaaaagaaagaagagagtcagtttataggtatgattttgactaagaaagtaagttaaataggttttatgtcaggattggtcagagaccgataaaacagatggacattgggaggcggagatgggtggatcatgcggtcaagagtttcaggccagcctggccaagatggcgaaaccccatctctactaaaaatacaaaaattagccgggcatggtggcgggtgcctgtaatcccagctacttgggaggctgaggcaggagaatcgcttgaacccgggaggcagaggttgcagtgagccggatctcgccactgcactgtagcctgggtgacagagcaagactccatctccccccacccaaaaaaaaaaaaaaaaaaaagatggacattggaaatctgtaagaggaagatacactaaactacttttctcaacatctttccaaccccagcatcctgttaacatctcccagaaagttatttaatgctatttagaaaaacacttaatattcactcaacagctaggattagagttcactgtcttctatcagtccatttttcttcatattgatccatgttttctctttgaatgccgagataggttaatttaggaatggattcaacgggtgggctaaattgtcaccaaaaggcacacatcattttttataggtagataaatcctctgctgtacatccattcaccttaggtaaacctagtcaagtccaatgactaaatttctaggcttgatatgactacctacctgtgctactttagtcaaaaatatagcacttgaacttttttaggtaaactgttcagttagcaaacgaatatttgatcagctcggtaactttattttccctctttcaggattcacaagacagtgatgatgaaagtaagtgtatataaaaagtatgtttatacagtgatactttgcatcaaaaaacaaactcaaaatagagatgttaacttctttggaagtaaagtaattttttctttatgaccttgaataaataaccaaagcagaaatgtgaataacttgatagcaagacaacctattaattcattgggcaactatgtatttcgatttttggttgcttttcctttaagacagtaaaattggtagattattcacttgtactatatactaatatttttaaaaattctttcagaaatgccagatctggagtaaggaatattgtcatcacctggattttgagaaagaaaaataacttctctgcaagatttcataattgagagaattcctgagttgatagctctaaaggcagatatgctgtatttgcctactttaacccatttttcaacctgtttgttttttaaaaggcttcactaagggttgatatgtaccattgtatggggcaattttaagtcagctaaggcaataaccttatgcatgaacatttcccagactttcatgaagctgttgaggtcctaggcaattaatgcagcagttgcgataaataaaaacatctcacctaagtctccttttcttcataacatagatactgacatgataggaagctctcagcttagggaaagagaataaattttagattatagaacatggattcaaaagtgactggaacaaattggctgacaccttactggtaacctgctattcttctggtgttatccttcaggattgttccactaaaatttatttttcaaaaaatttacttcacattattctatgtaagtgatgacttgtcagtgttccaggtgtatcttagctaaaactagagaatgccctaacttagatggtttttgaagcctatacaattggtattgtttgacccttaagcttttacatctcttagcatggaggacgaagaaagctgtacattgttgcttgagagtctgtacatttagtccagatttgtatttgcactgtcagtatggcaaatgagtgaaaaatgtttaatacactattggattttttatttcctttttttgattcagcttatacccgggctgaaaacctcaatttatgttcatgacagtggggatttttttaaatgtctacattctttctaataaactgttggaagacttcttggctgtccttttaagtgtctggcttactgtaatttttatgtatttaccatttactggaatggagtttatttgaggaagaatttgggattattcctctgtttgaaaaaagaggcttgctgtaatgtcacaggaaaccttttaaaagtggatctgtaatagcatattgtagatgcactttgcagcagttggaaaagaaagtgttgtgtgatttgattgaaataaaactaaatgtgttgtcctcctaaatctttga

SEQ ID NO: 101 - DNA, 13115 bp, Homo sapiens
  source 1..13115: mol_type = other DNA
ggagtctgcttagttctgaggactgcgtgggtccgcgcagagagctcctgctaggcctgcgcgtcccgttctaaattcttaccctttagtccttgtcaccacccccgccgtgggaacggcctgacagtcactcgtcaaaggaagtggctgccggcagctcttgacccggaatcggatcctagtcccaccccctccgctccaggcttccttctgcaacaggcgtgggtcacgctctcgctcggtctttctgccgccatcttggttccgcgttccctgcacagtaagtactttctgtgccgctactgtctatccgcagccatccgcctttctttcgggctaagccgccccggggactgagagttaaggagagttggaggctttactgggccacagggttcctactcgcccctgggcctccggacaaaatggggtctgcggttggtgtcctggcaaaagcagggtagaagggctgcggggcgggcccagaatccgagcctgcagagatgggagcagttgcagtgttgagggcggaagaggagtgcgtcttgttttgggaactgcttcacaggatccagaaaagggtaaggggtcacagccttagaacctgtaacaccgttctccctgtgacaagcaagtgttggacttaaaacaccgtctttcccctcctggtaccccaaagtcggcaaacgtagtccaggaggccccagcccagccagtgtgagtattaggagtggagggggttcacagtagcgtctgaagtctcccatgatcgagagccagcccgggatcctctccctcgggttgagaatgcagtgggaattgctggccttgatagaggcgtgagggtcacatcatatttacctcttattcccaggtgctttggggaaggttgtcaccaaacaccctcacgatttttttctaacagccctcctcggagtttttaagaatacttatctccgggttgggcaagtgaatgtatcccaatcaatttaggcctcctttttattcccttccttcagaaatgcccggcgaagccacagaaaccgtccctgctacagagcaggagttgccgcagccccaggctgagacaggtaggtttccctaccctccttgccattaattaaaattaaccctaaagccatttggtgggcaaaatgaccaaggggaaatacactttttaggaggatggggttgcagctttaccaaggaggatagaccgtaaaattactatcctggagatacttctttagggatttggagtaaaaataatatttttaagattcgtggacgttaaaagtaccctagcttgctttctatgttatgcctgtcgcctcaaaagaagctctcctgtggaacccccacctcacataggaaaactcagcagggaatgggctcagtgattcttacctattggaactagatgacacaggccaaggagcccggagcatttgtgaaactccagccagcaagttgcatcaaggttttagttagcagagcttggcattgtgcctttatcacatgtctggatgagatgtgtgctggtggtaaatgtgtcctactgggccccagagtcgtcctaggtcggataacttgtttatgggttggtggtgctgagatacttctagtgtgctggaatagttcctgcatcattgtgtgaaacccaggattgaaataaatccttttatcctcagcgtcgaaattaacgactgtgaaggctaattttaaattctggttaaaacatatctctgtagaaaacttaggaggaggtaatgaaaagttcttaaaatgatagcctttctgagtcagttgtgcagcgttaaatgaaggaaatcttcaggctgtaattttcattctcacctttttggttttttttaaatttcatttgttatttaagggcaattcctgtccctttttggagttacagtagagttgcttatagttgaaagcataaagtttcttcccacctgtttgattttaacagctgaagggattaatacagctgctaggaaggacaatagggggctctaagctggagtataaacaatatgaaattcttgaagtacaaggggcttaaggaagggaaaaaataaagtactgttctctaaagattctgtaatttcagtacaaaacgagattttagagattgtgtcattgaacaacttaattttacaaatacgaagatttgaaattcagatgaatttagaataatctgattcaagcttcaaaactaatgcatttacttctgaaacagtccttaatgctattaaacgtattcctgaatagtctgagttgcatagtaggcttatattaaggaagtaccaatgataaatacacaaggttttatctgtaatgatagtctattagaatgaagaaggaagctcaaggaattgttgatggtgtcaaagcaagtatttgagtgcttattccatttgaggtccagtcagaagaaaacatattccatgtttttaattctgattcattatgtttggtagcgttttcctgtaatcgttagactttggcctacccactctccaggaaaaactagttgagccaccttgtcttttccatggtaggatgccataagaacttcagaattactggttgagtgaattttgaatttgaattttggtaccacgggcttcccccccgccccccttaacattcccttctaagcattgagcatttgttgatccaattctgtgttacctcctgaatgccagagatactgtcttactgtcatgccaaacattggtgtattttgacataatgaaacacttaaattccaagttaaggagtggggatccagtgtattctcgccactccaattgtcttctttggtttgttttgttttgagacggagtctcaccctgtcacccaggctggagtgcatgcagtagcgcgatcttggctcactgcaacctccacctcctgggttcaagccattctcctgcctctgcctcctgagtagctggtattacaggtgtacaccaccacgcccagctaatttttgtatttttagtagagacggggtttcaccatgttggtcaggtcggtctggaactcctgacctcgtgatccgccctcccaggcatcccgaagtgctgggattacaggcatgagccactgttacaggctctccaattctcttcttccaaaatagcaccacaatctggtttaacaagttaggttacagtttcataatacagtccctacccttgtgagtaagctctctgcctggaggtctaattcatgtctaattcatcttggattgatgtctgaagaattaacatcacctaggaaggtttatagagactattacagtccttttgtggttggttttcttgtttgggttttgtgagtaagtaaactggtaaggtataaagaagctaagtgactttaatacttgatattaaattctgaagtgtttcaactttaggaagaactgaattgtgctgtgcacctccttcccaaaactattctaacagagtcagatgtttcctagcctagtggaagcctgaaagtataaaagcctgtgttttcttattcagttcagattccccatcatcgtcactgctcactaacttctttgttccagttttcagtatcttttctgttcatgatatttgggtggacagagtagcacagctgttcttctcgtgggaattctgttggctgtgagaaagacttgggaatacagtccatttcaagaagtaaggggagggcacaactgggaaaggatagaaagcatgttgttctcaacctaccaagagtctgtgctccccatttagagataggctgctcttagactgttctcctcaccctaaaatagttggtttactttggtagaacttggggaagtgtgagaaattaggaggggaatgtcttctcacttgaccactgaaaaatgtttggggaaggttgttgttgcctgtcacctttatctaatcctgcgtggtgacttagactgtcagattttaaactccagtgtttcctaggaggcatgttgtaccaagttgggctgcataactcaccttttttctcctccccctccccctttctttatctccttttgcctttctccagctgtgctacctatgtcttcagccttgagtgtcactgctgccttagggcagcctggacctaccctcccccctccttgctctcctgccccacaacagtgccctctctcagctgctaaccaggcttccccattcccttccccctctactattgcctcgacccctttagaagttccttttccccagtcatcctctggaacagccctacctttgggaactgcccctgaagccccaaccttcctaccaaacctaatagggcctcccatctccccagctgccttagctctagcctctcccatgatagctccaactctgaaagggaccccttcctcttcagctcccttagctctggttgccctggctccccactcagttcagaagagttctgcttttccacctaaccttcttacttcacctccttcagtggctgtagctgagtcagggtcagtgataactctgtcagctcccattgctccctcagaaccaaagactaatcttaataaagttccctctgaggtagtccctaatccaaaaggcacccccagccctccatgtatagtcagtactgttccttaccactgtgtgactcccatggcctctattcaatctggagtggcctcccttcctcagacaacacccacaactaccctagccatcgcttcccctcaagtcaaagataccaccatttcctcagttctgatttctccacaaaacccaggaagcctcagcctgaaggggcctgttagtccacctgctgccttatctctttcaactcagtctcttcctgtggtgacctcttctcaaaagactgcgggtcccaacacccccccagattttcccatttctctgggctctcatcttgcacctttacatcagagttcttttggttctgtccaacttttaggtcaaacaggtcctagtgctttgtcagaccctacagtgaagaccatttctgtagatcattcttccacaggggcctcttatccttctcagagatctgtaattcctccccttccttccagaaatgaggtagttcctgctactgtggctgcctttccagtggtggctccatctgttgacaaaggtccctctaccatctctagcataacctgcagcccttctggctccttaaatgtagctacctctttttcattatctcctacaacctctctcattctcaaaagctctcctaatgccacttatcattatcctttagtggcccaaatgcccgtttcttctgttggaaccaccccacttgtggtgactaacccctgtacaattgctgcagcacctactactacctttgaggtagctacttgtgtttctcctccaatgtcatcaggtcccataagtaacatagaaccaacttcccctgctgccttggttatggcacctgtggctcccaaagagccttctactcaagtagcaaccactctgaggataccagtctctcctcctctgccagaccctgaagacctcaaaaatctccccagttcagtattggttaaatttccaacacaaaaagacctccaaactgtacctgcctctcttgaaggagcccctttctctccagcccaagcaggactcaccaccaagaaagaccctactgtattaccgttagtccaggcagcccctaaaaattccccttctttccaaagtacatcctcttctccagagatacctctttctcctgaagccaccctagcaaagaaaagccttggggagcctctccctataggtaagccagccagcagtatgacctcccctctgggtgttaactcctcggcctctgtaatcaagacagattcttatgcaggcccagactctgctggtccgcttctcaaaagttctctcattaccccaacagtggctgcatttcctttggaaagtgctgaccctgccggggtggctcccacaactgccaaaggtacctcaacttatacaactacagccagcccttttctagaaggaactgtctctttagctcctaaaaaccacccagttaaggaaggtactcttactactttacccttggttcctacagcttcagaaaattgccctgtggctccatccccccagaatacctgtgctcctctggctaccttagtgctggcccctgaaatcccaaagtctgtgccctcaccctctcttcccccagctgggactcctccaggtacaaaaaaggttgatggtatttctcatacttcagcattggcacctgttgcttcctctcccaaagagtgcccaactgaggactctggtgcttctgctactgcatcttccaaaggaactctgacttacctagctgattccccatctcctttaggggttagtgtgtctcctcagactaaaagacctccaaccaagaagggttctgctggccctgatactcctattggaaatctctcatcccctgtttctccagttgaagcttcatttcttccagagaatagtctttctttccaaggctctaaagactcaccagccacgacgcattctcccactcctccatcccccaaaggggcccctactccctcagctgtgactcctctgtctcccaaaggagtaacactaccccccaaagagacccccactccttcagtggtgaatctgcccttccccaaagagggtccagctactccagcacccaaacaggctcctgctctatccatgacttcttcctcccccaaaaaggcccgagcaactccagcccctaaaggaatcccagcttccccatcccccaaaggggcccccacacccccagctgcaactcctccctcccctaaaggaggcccagctaccccatccccgaaatgggcccccacacccccagctgcaactcctccctccccaaaaggaggtccagctactccatcccccaaaggggcccccacacccccagctgcaactcctccctcccccaaaggaggtccagctactccatcccccaaaggggcccccacacccccagctgtgactcctccctcccccaaaggaagtccagcagctaccccattccccaaaggggcatccacacccccagctgcaactcctccctcccccaaaggaagtccagcagctaccccactccccaaaggggcccccacaaccccagctgcaactcttccctccccaaaaggaggtccagctaccccatccctcaagggggcccccactcccccagctgcgactcctccctccccaaaaggaggcccagctaccccatcccccaaaggggcccccatgcccccagctgcaactcctccctccccaaaaggaggtctagctaccccaccccacaaaggggcacccacaaccccagctgcaactcctccctccccaaaaggaggtctagctaccccacccccaaaaggggcccccacaaccccagctgcaactcctccttccccaaaaggaggtctagctaccccacccccaaaaggggcccccacaaccccagctgcaactcctccttccccaaaaggaggtctagctaccccatcccccaaaggggcccccacaaccccagctgcaactcctccctccccaaaaggaggtctagctaccccatcccccaaaggggcccccacaaccccagctgcaactcctccctccccaaaaggaggtctggctaccccatcccccaaaggggcccccacaaccccagctgcaactcctccctccccaaaaggaggcccagctaccccaccccccaaaggggcccccactcccccagctgcaactcctccctccctaaaaggaggtctagctaccccaccccacaaaggggcccccaatcccgcagttgtaactcctccctctccaaaaggaggcccagctacctcaccccccaaaggggcccccactcctccagctgcaactcctccctccccaaaaggaagcccaggtaccccaccccccaaaggggcccccactcccccagctgtaactcctccctcccctaaagggacccctactctcccagctacaactccctcctctaaaggaggcccaactactccatcctccaaagagggccccactcccccagctgcaaccccctcccacaaaggaggtcccgctatgactcctccctcccccaaaagaggaccagctatcccatctcccaaaggggaccccacttccccagcagtgattcctctctcccccaaaaaggctccagcaactccagtcaccagagaaggcgcagccaccccatccaaaggagatctcactcccccagcagtgactcctgtctccctcaaaaaggccccagcaacttcagcccccaaaggaggcccagctaccccatcctccaaaggggatcccaccctcccagcagtgactcctccttcccccaaggagcccccagcccccaaacaagttgccacttcttcctctcccaaaaaggccccagcaactccagcccccatgggggcccccactctgccagctgtgattccttcttcccccaaagaggtcccagctaccccatcctccagaagggaccccattgccccaacagcgactcttctctctaaaaagaccccagcaactctagcccccaaagaggccctcattcccccagctatgactgttccctcccctaaaaagaccccagcaattccaacccccaaagaagccccagctaccccatcctccaaagaggcctccagtcccccagcagtgactccttccacttacaaaggggccccatcccccaaagagctcctcattccaccagctgtgacttctccttcccccaaagaggcacctactcctccagctgtgactcctccatcccccgaaaagggcccagcaactccagcccccaaagggactcccacttccccacctgtgactccttcctccctcaaagactcccctacttccccagcttctgtcacatgtaaaatgggggccactgttcctcaagcatctaaagggcttccagcaaagaaaggccccacagctctgaaagaagtacttgttgccccagctccagaaagcacgccaatcatcacagctcccactcggaaaggtccacagaccaaaaagagttctgctacttcacctcctatatgcccagatccctcagctaagaatggttctaaaggacccctttccacagtggctccagcccctctactccctgttcagaaagactcttcaaagacagcaaaaggcaaagatgcttctcattccccaaagggccccttggctcctcctgagtctaaggcgtccacccctctaacagcagctgcctttgagaaggtccttcctaaacctgaatcagcatctgtctctgcagcaccctccccaccagtctctctgcctcttgctccctccccagttcccactctgcctcctaaacagcaatttctgccgtcctctcctgggctggtgttggaatcaccctctaaaccccttgcccctgctgatgaggatgagctgctgcctctgattcccccggaaccaatctctgggggagtgcctttccagtcggtcctcgtcaacatgcccacccctaaatctgctggaatccctgtcccaaccccctctgccaagcaacctgttacgaagaacaacaagggtatttgccttggtttgccgtgtgcatggtgtgtctgtcgtccacacccctcttgggcgctacccaccaatactaaccctgtgatgcgccgctttctccagtgaatctgcttgggtttggatgtagaacatagaatgataattttaaatgcaaaagttctaggaatatgaaaccaaatcttggttttcattacttcagatagatacatagtacattgtgtatcatttttgtgtaatgtggcccggactaccctgagcctgccatgccatctattttacctaattgatctgacattgaaaaccaagacctgccagaccttttcatttgctctaatccctaccacatcactaactaaccttgtccctgggcctgagatttggtaaaattattggagaattgaactatttgtatttatttttccattattagacttagtaatgaccagttgcccagggactcccttttcataaaaatgtagaaatctgtttttcctagcctgaaaatggtgcaggtgtatgctttttttcctcagtagtctttactgatgcttggcctttgaattgaaagaaatttatgtgaattatgtttggaaaaactagagatataggtcatcatcattgagaatcttctaattatattgattagatcacattgctggggtgaatggtttgaaaatgaggctgaatatgtgtacgtgtctgcttttgacttcctccaacccagtttaaaagttgaggggaaaaccacccaacctgttgtgcctccacggtgtgattttggttttttcacttaagtgtatctgggggcaccttctgacagaactttacagggataattggactattgggtaaaattttagagtcatatgggtcattatttgcctgtgccaagaaacaaagaccttgagggaaagaaagcagttacagtatattaaactgctcagctatttctagtgattagtcctcatttctggggttagggctgggtctttactagatgtgtacccgctagttagtgactaagttaggggctatcaagctgacttcacacaagccagttggtttacatttaacattcttaggtctagcatgaggcattcacctctagtccagggcaggctgtggtgaagtaccttctcttataatttctactataaagcagtaaaagttgtttctcatcttagggtctggaacagaatctgacagtgatgaatcagtaccagagcttgaagaacaggattccacccaggcaaccacacaacaagcccaggtgggtattctcttactaactggtattgggtcaaagaagcagggttgatcagggcaacttttgtatttggaactgtgaaccttcataaaggaaaacccacaaggagattgtgctatccagatcttagattctggttaactaatagctgttttatcttcttagctggcggcagcagctgaaattgatgaagaaccagtcagtaaagcaaaacagagtcggagtgaaaagaaggcacggaaggtaagatttgaaaaggatttcaggatcttatgaagcacctttatacagagtggaactgtttatttccataggtttttggggaacaggtggtattttggttatacaagtaagttctctagtggtgatttttgagattttggtgcacctgtcacccaagcagtatacactgaacccaattcttagtagtggtagaatcccgttgaaagtaacagaagtagctaggttggtggctcacacctgttatcccagcacactggaaggccaaggcagatggatcacttgaggtcaggagttcaagaccagcctggccaacatggcgaaaccccatctctactaaaaataccaaaaatatatagcagggcatggtggtaacgctcctgtaatcccagctactaaggtggctgaggcacggcaattgcttgaacctgggagacggacattacattgagccgagattgcaccactgcactccagcctgggcgacagagcaagacctgcctccaaaaaataaaaaataaagtaacagaagttactacggcagaaaacccattctctattcttgtatgaacttttctcagcctggggaaaggctttgctttggatgttgtattatgttccttgcttctttaggctgcttctaaagaggttgaaaacctgatactattttctcttctttaggctatgtccaaactgggtcttcggcaggttacaggagttactagagtcactatccggaaatctaagaatatcctctttgtcatcacaaaaccagatgtctacaagagccctgcttcagatacttacatagtttttggggaagccaaggtgagtaaacttttcttgggcattgttccagaccagggtttctcaacctcagcactgctgacattttgcgtcagatagttctctgttatggaagggctatccattacatccagttttgattacccaaaaactccattgccatatatctcctgggagacctaactaccccctagttgagaaccactgctctaaacctaaacaactactctttctactgtgagggcaagcagtttaaagctgtacaataagttacctgaatgggtttacagagagttgtgaaactatatgatttatttttcaaagactgctaatctactcacatggatctgtattttctaccctgtagatcgaagatttatcccagcaagcacaactagcagctgctgagaaattcaaagttcaaggtgaagctgtctcaaacattcaagaaaacacacagactccaactgtacaagaggagagtgaagaggaagaggtatactaggaaatctttcataatttaactctcgccgtatagcattgtgttcgtgttggtgagctatattaaaaactagattcaggagactccaaagaactgctgaaattgttcttgcctttaatttactgctttttccctctcatctctcaggtcgatgaaacaggtgtagaagttaaggacattgaattggtcatgtcacaagcaaatgtgtcgagagcaaaggcagtccgagccctgaagaacaacagtaatgatattgtaaatgcgattatggtaagtgttcaagcctttgttccttgactccctctgccctgaccaattatgagtgactttattttgtcttgctaaatatcagccaattaaggaacctcattccagagcctcttctgagttgccgtataggttttagtggcctaaattctcctgatttgcctgtaagagttttagtgacctgaattctcctgatttgcctataagaaccgctaattatcttttctctgttacaggaattaacaatgtaaccatatggaagcaactttttttggtgtctcaaaggagtaactgcagcttggtttgaaatttgtactgtttctatcataaataaagttatggcttcttgttggatgaattc

SEQ ID NO: 102 - DNA, 15607 bp, Homo sapiens
  source 1..15607: mol_type = other DNA
ctgagccaggaggaagcagcggcgaggtctgcgggaggcatggcgggagctccggacgagcgccggcggggccccgcggcaggggagcagctgcagcagcaacacgtctcttgccaggtcttccccgagcgtctggcccaggggaatccccagcaagggttcttctccagcttcttcaccagcaaccagaagtgccagcttaggctcctgaagacgctggagacaagtaggagccatgacctggaggctgtggttccacagaatgggtctgagaccgggtgggcgaggaagggcctgggcaacacctggccaggggcttcaggttcagcacagagtctagacagactgggcatcatgggggctgggttgggagcctgaggctcagtttccccactagaggtggcgctgagacccttttcgtcgctgtttttggcttgtggaatgaatttgtctgcccttttttgtcactcactgttgtgacagatcctccgatttcttacataagttatgcagccacactgtgacttcagggtaagggtgaggccaagttttaaagtgccagccaggttaattaaggcacacaaaggctgtaaaaatgtaaaaatgtaattaaggcataccaaggctgtaaaaatataaaagcagttttgcaaacctaccgttccttggaagtggttcatgcatgaatgggcttcagagcgtagaaatccctgaaatggtctgtgaaatcgtgtgtatgtgtgtgtgtgtgcccctaagtgcattttttttttttttttgagacggagtctcgctctgtcgcccaggctggggtgcagtggcgcgatctttgctcactgcaagctccgcctactgggttcacgccgttctcctgcctcagcctcccgagtagctgggactacaggcgctcgccaccacaccctgctaattttttgtatttttagtagagacgggttttcaccgtgttagccaggatggtcttgatctcctgacctcgtgatctgcctgcctcggcctcccaaagtgctgggattacaggcgtgagtcactgcgcccggcccaaagtgtatttttttttggtcgggggagagagttaatagcttcatcatattctcaaagaggccaacgaccccacaaaggttaagaactgctgtgggttaaacagggacacaactgcccattgacaaatttctctcccgtcccagagacattgcactagagaagatttcttaattcctttacattgacatagacttcttaagtttactttcagatacattcagaaaattagtcttaaacatacttgtcccaaagcaaggttactatttcatagctagtcagtcacagttcaaaagtcaaccaccgaaagattttccaaccttcttgggattacctgcttgtagagactcagggaggtaggaggaggaaggggagttgagggtaaaaggggagagaatgatgatattgtatttactgtacaaatatgtattgagtgcctcccaggttctggtgggggaagtagaaagatgagttagcaccctgccttgaaggtgcttcaaagtggaatagagtggaaagagtatgggttgcagagttagatgtgggttcaaatgcggatccctttcctcaggtgtggaaggtgacttaacttctctgatcctcactatccttattgtaaaaaaagagaaggggaaaataccttttttagggttgttgtgaagaatagattttatggggctgggtacggtggctcatgcctgtaatctcagcactttggggagccaaggcagggggattgcttgagctcagatgtttaagaccagcctgggtaatatagggagaccctgtctctacaaaaaataaaaaaaattagctggatgtggtggctcatgcctgcagtcccaactatttaggaggctgaggcaggagatttgcttgaacccaggaggctgaggctgcagtgagctgttattgcatcactgcactccagcctgggcaacagagcgagaccctgtctaaaaaaaaaaaaagtactgattttatgaatgtaaagtaccagcatatcaggagctgagctgaataaatggtagctgtttttacagtggaagggccacacagtggaggaagagtggaaatagataggatgtgaggaaggtggggtgctgaacatgagccccagtaggaatcaatggaccttgatcttccaagggcagggtggctgggagggtcttttggtggtattaaagtgtcaacctgcagctttaaaatgctatccctgggtggggcgtggtggtggaaaccagacctcatgggagtctcttttttttttttttttttcaccaaagcaattttattctaaatattgctgcaggtcctttttgaagtactaaaccatggttttttttttttttaagtacaaggactacagacttttgaaactgttttaattttgtaaaattctcctagttgcatgaataataatgtgcttaatatggtgcctgctacctggtattcactcaataatacgtattgttaacaataattattctactgtgaacactcttgcaaggggcaggttggtaaagcagtaacctatacctgactttctcatctcacatttctttttctcacctatttttgccttcaacattttttttaaaccttagtttctttttcactttttttgggttacatcatataattggctgtgcatttatattctcagacaagatgcctatgtgaaaagttaatatcagaggcatttgggctccttgtactttcctgtagtagtcacgggcccatagagtcttagatgtggaagggccctcaggaatcgtctaggcctccccgtccccttacagggaaacctctgtgctattgctggccagatactctacagacctctcctggaatacagttacctgttccttgaggctctttcaatctactgtctattgtttcaccagctttaattgttggagaaaaatcctttctcatactgagctgaaatctgccacatgtaacttccatactttggtccttgttctgccctttgaagaaatattaactgaatctagtcccacatggcaccccttcaatacttgaaagtagtgtggtcctagttaagtcttctgtctcctttccaaccccccaaatcctttcttgcttcttactggaaatagtctgtagtaccctagtcaccatcccctgtggaagagcttcagtggcaggtccaatttagaaggtggtagtactcagcatgggacatggtattgccggtatgatctgatcaggacagaacagtgtggctactggcttcctcaaatctaggtactgtgctgttgttcacttctaagaatgtggccctagattccctcagtcttttggtatataccgtaatacaacgtgtttgatcatttaactaaaaatgaactttaaaagcatagttgatattgtctaagatgcttagtagtaccatcttggtatttgtattagtgttttatttcagtacaaacttgctttgatgttgatttaagcttggcctctcatgtcaatttttaccaattttaagataacattactttttttttgagacagagtcactctatcgtccaggctggagtgcagtggtgtgatctcagctcactgtaatgtctgtctcctgggttcaagtgattctcatgcctcagcttcccaagtagctgggactacaggcgtgtgccaccatgcccagctaatttttgtatttttagtagagacggggtttgccatgttggtcaggctgggcttgaactcctggcctcaaatgatccacccgcctcaacctcctaaagtgctgggattacaggcatgagccactgcatctggcctgtgagttactttttgataatatcttacactgctatttgggtagtttaattggtgctacttttccaattacttaattaaatcaatatcttttttagatccatatgtcaaacttctgcttgatgctatgaaacactcaggttggtaagtaactctttttgaagtgctgctctgaggtctggctgctgaaaacaaaaaccaagttctcttcttaagagaactgcttaagatttctctgaggtcacaaagtcttttccatagggtaaatagaggtaattggctgcattgtctccgggctggccttgttctctttggacattttctgccctaactcatgtttttttttttttttggggatagagtctcgctcttgttgtccaggtgggagtgcgttggtgctgtctcggctcagtgcaacctccgtctcccaggttcaagcaattcttctccctcagtctcccaagtagctgggtttacaggcgcacgccaccatgcccggctaatttttgtatttttagtagaaatggggtcttagcatgttgaccagactggtctcgaactcctgtcctcaagtgatccacccacctcggcctcccaaagtgctgggattacaggtgtgagccactgcgccagcccagctcattttctagttcttaccattcaccttgggtgattaataaagacagtactcaaaattttcttgtaagtaattaccaagcctggcctttctgctacaccagcctgagcactgtttttaatggaaaagaaatctcagcttgttatgtaggaaccttgcagatgttgtataactttgaggggtttaaaggaagtgacttctgacatccacttcttaacattctggcccaagggcaggaactccagcatacttgcaatatggccataatcagttgaacaaattttttttttttttttttttttttgagacgtagttttgctctttttttttgcccaggctggaatgcagtggcacgatctcggctcaccgcaacctccgcctcccgggttcaagagattctcctgcctcagcctcctgagtagctgggattataggcgcccaccaccacccggctaattttgtatttttagtagagatggggggttctccatgttggtcaggctggtcttgaactcccgacctcaggtgatccacctgcctcggcctcccaaagtgctgggattacaggcgtgagccaccgcgcctgggggacaaatgttttatggaatcatatctatagaatttgaactagaatggattttgtgtacaacctccttattttacaggtgagataacagtcctgaagatgttgtttctttcccaagatttcctatgtgttagtagtagaggggatttactatatggtggagggtctcctgagccctggcccagggctgtttgccacatacacactgtttctggacattgtctccttttcttgccttttagtgctgttaacaaagatagacacttttcttgcgaagactgtaatggaaatgtcagtggaggttttgatgcttcaacatctcaggtaggcattattgccaaattgtttccttccctttaatcctctctctttatattttttgagcatcttccacatgctcggcattctgtttggtagactttatgtaggactaaaaaagtgaattagttatccttactctaaggagtttactcttaaaatctcttaaggagtttacagccttacaggaaagataagacatgaacacagataattataaaatgaggcaagctaaaccattttaggtgggcttggttaccacaatggaacagtgatgtgatcgattgaaagatgccaacagattcgactagaggatataaagcctccttaggggcagagcagggacagagcaggggcagcatgagcaaaagtgcatgctacgaaactgcatggcatgtgtagggaatggcatattgtctagtttatctggagggcaggaacatgtggggaatgagggaaaataggattggaaggaaatgtaagccctatggtgggaggttttgaatgctaaattaaagggtttttacctttacgtggtgagaattgatactgcctgtgaaaattttttattaggggagttttctaatctgtacaatttgggcaacgattgtatctattttatggaatgattatgagaattaaatgagatatctcttatagagttgcttatcttagtgcctggcccatagtaagcattcaataaattttattattagttttaagtcatcagagagtttcgacagagtcttggaggtggtagataatgtcatgtgatcagggtaaatgatggtgttataagtaactgtttcccacttgaatgtataattcatacttaactacacttaactgtttcctgctggataattttgtatgtatttaggttatttatagcatttttacagtaatcatgtgaagtggcaatatagaacaaggatgagaagtctagattttggagtcagacttgagttcaaatcctagtttccttgcttattatctgtggggcttgggcaagttatttttcttcttctcagtttcctcatttgtaaactggtaatcacaatacctatagctctcaaaatggctctggataagttcactcccttctcggtccccccagggttaaacagagtgcacatcttgaactttcatcctaattctcagcagtgttgaacacagttgggcaccctctccttttattttattattattttttaaattattattatttttgagacagagtcttactctgtcacccaggctggaatgcagtggtgcaatatgggctcactgcaacctctgcctcctgggttcaagtgattctcctgcctcagcctcctgagtagctgggattgcaggcatgtgccaccatgcccagctaatttttgtatttttagtagagtcagggtttcaccatattggccaggctggtcttgaacccctgacctcaggtgatccacccatcttggcctcccaaactgctaggattacaggcgtgagccactgtgcctggcctatttttttaaatgaaaatttttattatgaagtatctcattcatacagaagagtaaaacatctatatgtacactttcagtaataataaagtgcacacctatgtaaccaccacccagactagagaaaaagaacattactaggacttcagaagccttcgtggtcctcttgaatcaggtccttttcccttccttatcctgacttttgtggtaaccattccctgcttttctgaatggctttaccatctacatatacaatccaacagtgtgttatttagttgcctgcttttgagctttatacatgttatactttgaattttatgtagcattttgtagtattatgaaattgtacagtatatagtctccaattactttccaccttcagcatttgtgagattctttcttgttgttgtgtgtacctctctggtttatttcgtttccctgttatatggtatttattccgttgtgtgtttatactatagtttactctaatattgattgtttccaactttgttattatgaacaatgctgctatgaatatttttgaccttcgctactggtgcacatgtgcaagagtttctctaaggtatatgctcaagagcagaattactgggtcatatagtttgtatacacttgacttcagctgttaatgccaaacactttctttggtttctagtatacagcactcttctggttgctcctttgctagcttaccttcctctactagcatttaaatgtcaaagtccctcaatccttggtcatagagccccttcttttcttactctgccaaggaggtctcatcaattttctggggtcaaagctcacttttaagaactccacattccatatatccaagtgcccatttaacacctctacttgagcatctttttatttatttatttatttttatttttaaggaaaaaaagtttttttgggacagggtcttgctctgtcgcctaggctggagtgcagtggcgcaatcatggctcactacagccttgaactcctgggctcaagcaatcctcccatctcagcctcctgagtagttgggactacaggagtgcatcactggacccagctaacttttaaaattttttgtagagatgaggtctcactatgttgcccaggctggtcttaaactcctggcctcaaatgatccttccatttcagcctcccaaagtgctgggattacaagtgagagccactgctccccacctacttaagggtcttaaggacacttcagacttgaaatgtgtaagtccaaattcatgatttttaccatcccccatctccccactcaacccagtcttttagttttgcatatctcagtggatggtgctaccatcgaccctattagccaagccagaaatttatggatcatctttgatacccctgattccttccccgtattctatcaacatattttgtctaatttacctcctaaataactcttttggcttccaccaccattctagctgaagtgctgttctctcttgcctagaatattagccttcagctaatttctctgcatccagttttggccatctcctgcctattcttccaactatagttaaaaggataaaagcaaaataaaacaaaagcagtcttctgtttcaacattccctttatcctgagagcttcccattgctcttagggtaaagacaaggtcttcagggatttggccccccgacctcaccagccgtatctgttgcctaccacccccaccgctgtgcttcaactctagggctctccttttagcttctcaagcattttcttccgtcaaccctccctctacgctttgcataggtttttctctctgcctagaatactcccttcccctccacacctcaaatttcacttctattcctccattagataccagtttaaccattccttccacagagaaaccttcccccacctccagagtaggtcaggcattctttctttttcttttttttttttttgacacagggtctccctttcttgcccaggctggagttcagtggcgtgttcctggctcactgcagcaccaacctcctgggctcaagtgatcctcctacctcagccttccaagtagctgggactataggcatgtgccaccatgcctggctaatttttattttatttttttatagagatggggttttgctctgttgcccaggctggtcccgaactcctgggctcaaggaatctgcctgcctcagcctctcaaagtactgggattataggcatgagccactgcacccaacctcattgtatatgctcatgacaacctgggtttttcttcatgacaactgtcattgcatgtatgtaaacattttggtaaatatttggttagtttctatctccatcagtagattataatctattattaggtctcaataagtattagttgaatcaatggatgttgaatgaatgtatataaatatctggcacatatcccagtgtctggcagtagtacacaatcaatggcagctattactattaggatcccttgtgtctttcttattcttatagggtcctgctcagtgtgctgttgtgttttgcacttctttctgaaggtctttctgatgagttttccctggcatttgccctcattctagtaaaatgaggacagtggtggtcattcctttttcattcaatgctcattcagaaacttgataagaagtattttacatatattctcatttaattctcacagttctatgaggtagctaccctaattatctcctttttatagttgaggaaattgaggtacagagagattaagaaacttgcctaaggtcactgagttagtaaggggtggagctggaatttgaatctgtgtgcttcattccaaagcccactctcttaaccataatgctgtggagtccgagacagactagtacgatcagcccagtaaggatggtgtgtgaatacgtgtccttaatctaagtactgctgtagtccagagagaggagaagggagaagttagtcactgggcgaggcaattggagcatgtacacttaggactaggacttgtcccatgggtagatgtgtggccaatgaagaagagtgggtagagatattccaggcaggtgagcttgtgggggagaggtgaggtcatgtgggagagaagatcgagtctatggaaggagattttagaatcactgaacttcttttattttggtgtctcctagatagttttgtgccagaataatatccataatcaggcccatatgaacagagtggtcacacacgagcttattcatgcatttgatcattgtcgtgcccatgtcgactggttcaccaacatcagacatttggcgtgctcagaggtgagttttattgtatttttctccagaatactctatgcttgaatattttattcaagtgtaatttatttaaatgtattccttttcttactgtcatagttctaccttagtcttgaatttcggtttataactaacattgaataccatttttgatatacagttagagaaatttaaagtgtatttttagaattctcttaactatatcctgtaagtcctagtaatagtgatgactgactttaataagctattaattttttcctatggaatatattttataatgtattccataggagacattaataataaaaataaaaataaaaaaataattaaaatttactgagggctgtgttccaaacactgttctgtttgcacagattcttatttaatcttcacaataacctactgagatagatattatactattattgtccctgttttacatatgtggaaagtgagacagttgtttagattccaaagttagtaagtggtagaggcaggattacaactagtgtttttaactagcttgcccagctgccttccatagagctccttgcttgccctagagtaaaacatgctcttttcaaaaatacaacataaaaagatatttattactaagcacgttggattgctcttggaatatgctcctagagagagcgtattctgcatatgcatatacttggatgtcattaattgaagagttaattaaaataatctaaatctcaagcctatactatataacttcgattatttccctttctcttgaaattaatatgtagccccctgcatctaattataattccaattatttggagaatagactgaaacctgaatttttaaataggtctctttcttgggtactgtgagaattaatgccttttagctagttaaagtgtgttaagtactttgagctcctcagaggaatgaggccataatattgaagaaggaacaagaagtgggccattctgttagcaatgaattagcaaaaatgtggtcaagctgcctgtagaatctatgtgggtagttctaagactttttcattcattgaagtatagtaaatctgaaaatatgtcctaatttcaggctgtcatgctcatagcgtgaccagtttggaatgttcttgattctttgtgttttgtattgcttcatttttcataggacaatcaagtccctagaggaaggtcatgaacttatataggtttgagggaagctccaagggagattcgggcaagggttgggaggggcatattctcaaagtgtctcagatattaatgcattcagttttaaggtcacattgaaactcagtttatttcaagaatgctttcttgaagtacttttggcaatttctacaagtatttgtatcttgtagagtgtgtagtttaactctgaggtctagctctctgacttttggttccaaaagaaattagttctgtcagtaaagctacgcataaagtttagaaaatttcctttggtaggcgattgaacttttccccatctctccagtgtatttggcattgtctagcatagctcatagatatttgctctcgttgtcaatagagtttaaaaagtcctttaagaagaagtgtcacaaatactcttttctcagacaaagatgctaattttatattcttttctaatttttaaaaattggttgatatcataaagatatatagagcatgagcgtttatttctttttatttgtcttctgtgtgataggttcgagctgctaaccttagtggagactgctcacttgtcaatgaaatattcaggttacattttggattaaaacaacaccaccaggtaaaaactaatatgaaatcacttcccctccagagtgttacgagtggaaataatgaataaagaaatgaaaagtacattcagtatttgaaatttgaaagaacttcgtatgtgaaaagaatacaaagtatgtaccatttaaacaaagtagatggaatttagttctactttgtaattatgggcaagctatgtgactcaatgagtgtgtgagatagtctaataatgaaaagaggcctggtgcggtggcttatgcctcccagcagtttgggaggccgaggcgggcggatcacgaggtcaggagatcgagaccagcgtggccaacatggtgaaaccccgtgtctactaaaaatacaaaaaaattagctgggcgtagtggagcacacctgtagtcccaactactatggaggctgaggcaggagaatcacttgaatctgggagatggaggttgcagtgagccgagatcatgccactgcactccagtctgggccacagagtgagactccatctcaaaaaaaaaaaaaaaaaaaaaggagctaagatcttgcatctgggatacttttcgatgggggtggataaggaatggaagtgaaatcacagcatgtcttactgttattctaacaattcttgacttctattttgaatctaccatagcattctggagacaaaagatgtaatccctttcagaacagagagtgtgttgctgcacaagttatggctatgtgtcagtgtacctgtaaaggctatataatgtgatagaaaacctttggcttagcacagacttgagtatgatgagcttagctgagagggatttgtgtgaacaaaacaaaaacaaaaaacaaaagagagctataaggcaagattatcctggtagaaaggctttgagatctgtattaggtggacgtggggaaagaaagtataggactcatggattgataatgaatgtgagcagttctgcctgggcctgtgtccacatttaggagaaaggctggtcagtcattttctacagtaagagcctgctgagtcagtttgtgaagtatatgagcatcacgatatcagttccaactagatgaaaaaagataggcttaggacaacaggaaggcccttggttttctggagaagagagtaactcaactctggagtggggggtggaaagtcacagtgagctactcagaaattgtgaacttagtgaatgggagggagaagaaaagccttctgcctggaaagggtgattactctagacagtgaggtgttcagcctctgccaggtcagcttagtgatatgccagtgacttgtcttgtgctgcatgttttctgtgcccttgagtccctgcttctctggtgaattctgtgtgttctggctgtcagtggagagggtggaagcagggtacacatcagcacgcccctagagaagagaataatgtggttaaagcatgtgctggcatagcttatggatatctgctcttgtcaatagagtttgaaaaattccttaaaaaaaaaaactattacatatactctgtttttagaaaaatatgctaattttatattcttttccaattaaaaaaaaatcagttgatatactaaagaaatagagcatgttttttttttttttaattcaccttctatctttgtgataggtttgtgatgcacacaatctttgaaagaggaagttttcctctttttaccattgggtagcagcagcagaaaacaaatagaaacagcaataggacagaaaataagtggaggtagtaggaatctggctgagggagaagagtcttagagaatggagtccctgcttttgtacagcatgtacccaggaaatagaaacagcaagtacagttactgattgtaaaattgcatagtcatatctttattttaacagaaatttattatgtctgaaaagaagtaaatctgtggtctacacttgtgtctcccaaccctgtggcttcaggagacaaatttttgtaccttttttccctggaggggagaaatttcctctctttttagcaactgttgttttggcttcacatggttcttccttttcttgttcctttatgcctggggtttattttttaaaatcagcgtttagtaaaattcaggttgagaaacactatattccaatgttagtgaatatctccagcttgagcacactgaccaggccaatgaaaaactgggaacatgtggagaaaacggatggctgtcaggatgcacagccatccaaaccagtgtttgattatttttaggaaaaggtcaaatgccattcttttgagttttagattggtcctggggagaaataaatggattaaaagctctccaagaattggaatggcagggccttatatttcttaaatatttaaattagagtattgagaaattctagcctattactatgaaatgttaggtaaattattatcttagaactttaatatctgtgtaaagaacaatcaggaaaaaaaagttgtttaatttccacaccccctaaaaaattaaggtacattccaagttcgggtggatatgtgtatggtttcctgttgcctccagagaggacttacccttctcaaaggaaaagttatctagcattggtcaactgaaaagaaagagaggtacagaagtgaagtatattttaaatttaattaaattttatcaaaaagtcaatcaggactttatagactttttttttttttttggcgagtttgcaaattgggagatattgtttggcagacactgccaagaatttctgagaatgacatctgcttatatcagtgggaaagatgagaaaatggagaaggtcttacttatgcctaaataattttaggttgagctaaaaatactccttaagtgttatggatctttgttcattttgttttcttctttggaatgacagaaattagtaaaataatatgaggaaattaattttaattaattcagacattagataaaatgtattatttcgtgattaaatgtttatataaaattagagcctcatacttttccttctttttagacttgtgtgcgagacagagccactctttctatcctggctgttaggaatatcagcaaagaagtagctaaaaaggctgttgatgaagtttttgaatcttgtttcaatgaccatgaaccttttggaaggatcccacataacaagacttatgcaagatatgctcacagagactttgaaaaccgtgatcggtattattcaaatatatgagcacaatgacatttttatattacagagcttccatcatcatgaagaaaaaaaaatttggttctcaagtgaacaaacatataaaatgtaaacaatccctacaatccagataaaacagagaagactgtgattctagcatattatcagaaaaagtaactatggcaaaaaatgaaactgctttaaactccaaggcagaaattgtatctttatagctaaccatttagtaaataaatacattacatttttgtattttagtcatttgtttttattacatgtgattattttaaaatttgattatgaaacctgtgaagtgtgctcttccatgatgttgataggtgaccactgttggtatttacattaaatgtaaagaaatgtgtactga

SEQ ID NO: 103 - DNA, 29755 bp, Homo sapiens
  source 1..29755: mol_type = other DNA
cgtgtccggggcggggctgtaccgggcgctgggcggaggagccttggctggggactgcctggaaacgggctgggcctgcctcggacgccgccggtgtcgcggattctctttccgcccgctccatggcggtggatgcctgactggaagcccgagtgggatgcggctgacgcggaagcggctctgctcgtttcttatcgccctgtactgcctattctccctctacgctgcctaccacgtcttcttcgggcgccgccgccaggcgccggccgggtccccgcggggcctcaggaagggggcggcccccgcgcgggagagacgcggccgaggtaggactgggtcggcggcttccttccggctctgcgctcctggctggggctgctgggcggctggggccgggtccccgcacccggctctcaagtccgggattacccgcagggcctgagaagcgctttgccccctacagcctctcgagccagcccttggctcggaattggagaatggtcctcattcttacccagatctcacacgccgtccccgctcccgatcccagggggtgacaggcgcgcacgcctttcaaacacgtgttaaaatccaagacgtcgtctcaaatgccagagatttgcgggaatgctcctggaaggcctcaaaatcgccgcaaggtttaagacatccgtttccatgttgaaacaaagccctctctaatcctgcagtgaccataaggcagactttacctccaaattctggtcccctgtcctgtgttttaacttgtgttaagatcagactcggctttctctttccctttattcagaattttgcacgatagtatctaagactggtgaacactacactctgaagtcagttttttgtgcataggttacctgtatacaatggataaaaataattgcaaaagttaagcttgtaacttgatacatattatcctgttatttttaaaggttttgtgttggggaagagaattttcctgtctcaaggtagcattttatttctaagacttttcagagtaaaaaaagttcagtaaaaaaattgctgattttcttttttgttttcattgtgtattaccagtttaaattcagttgctgtacctctcagaaattaaagttaggatgaaattagaactaacacttaatttaaatgatttgaatttacctacaactgcaataataccttactggtaaacacttactctttttaaaacagaacagtccactttggaaagtgaagaatggaatccttgggaaggagatgaaaaaaatgagcaacaacacagatttaaaactagccttcaaatattagataaatccacgaaaggaaaaacagatctcagtgtacaaatctggggcaaagctgccattggtaagttaatacgtagaaggaagacatgtaaaaagcattataaaatgtattttattgatatgaaattcattttaatataatttatttcataatttgttaattaaggcatcatgatatattttttcgctttttgtcaataattcctttctccttccaattagacaacatctgtttgtaaatgtacacacatacatattccactgttggtctttagcagagcacagcttcatttattgatacattgagtaggctgtatagtgtcattagattgcaatgcatatgtcaactgaattttcatgaatctgtgtattttttggacacttgatacacaagtataagatgtggcccctgcccttgatggccaaacacatttgggaaacactgaagagtacaaagttaaacaaggttcttcattgcaggcctttctcaagagcctttaatatgacaatgttcattgtatcagcgaaggaatatattatagtatgtagttgattaaacttgattgaccacagaagcatttttgctgtgaatatcatgagagtgtagtgttctaagatatatattatgctcaattagagaatggggccctgagggtttaaagagtcacaaagaatttagtgacttagaaagcgctttatgtggcctttgaacatgagttgggtttatgtacaataaggcatatggatagaaagtaccagatgagaggaaaatgtacagagcatagtgctctgctcatggtatttcataaattcgttcatacttacatacaagtatatatcctagaagattactaccaacctctaaatttcaagtacctgaaaccaggccttcaatcatcaagttctagccattattttttaaataaagtctctaatattgatttcttcttttaaatctcagattttcatttccagacttctctcttttcaatctgataagtgcaaagtggccaagtgaatttcatcaaatgctaccttttttttttaacacctctgctagcaggaaaaatgctactttgatcagcctattctctagacacagttataaaataccgttatagaaattcccattcaaaaggggagaaaaattgaagtaaaaaagtgtcactggtccaagcaattttgaaatctaaatttcatctaaatggccagctccattagatgatattgcaggcctaggaataatctataggttgtacagctttgccctctggcatctcagccacactcttgaagtcatcttttcctttttcataaaaagtagcacaagtttgcagcttcgtaattttatcagcctgttgacagctggtaaaattttcagagcccatcagccttctttcattgtgacctcttgctgtcttttttagtccaagctggcagcgtttctgctcataaaacattctgaagaaccttgtgggccctctgtgtatgtcacaggattcactccattagatgggaagctcctctgcagatcttttctgagtaatcccatctccatttctggcttctgctgagatggctgaggagacctgtaagtcacatgtataatctcttcaaagagccctttgtgtgaatgaatattcagatcttctgatccttctgaggcactagcaaaaggttgtgcagccacatccttggtcttgtttctggaacacccttttcaggcagcaaatctaatttttcacatcttttgcaatcttaatggtccgagaatttcccaaatcatcaaattctggttcccttttgcttaacagtttttccttctatctcttttttcttatatttcactaatcaccaagaaaccagtccacacctttcactttgcttggaaccctccagctaattattaaagtttatcacaagttctgctttccatgtaactgcaggatacaatccaactaagctttttactgttatataacaaggatcctcatccttccagtttctaataacacattcctgattttcttctgagccctcaccagcaatttctttaatacgcatattctaggcatggcgtctcacgcccgtaatcccagcactttgggaggctgaggccggtggatcacttgaggccaggagttcaagaccagcctggccatcatggtgaaaccccgtctgtaccaaaaatacaaaaattagccagacattgtggcacgtgcctgtaatcccagctactcaggaggctgaggcaggagaattgcttgaacccgggaggtggaggttgcagtgagccgagatcatgccaccttactccagcctgggcgacagagcgagactctgtctcaaaaaaaaaaaacattgcatattcttaccaacaatctgcttgtgatcatttagatatcctctaagacaatacaggttttctctactctacctcactttcttgagtcttcactagctgagtcattaacatccatatttctatctgcaggttattcaaggcaatctaatctaggctttttaaaatcatgtcctcacagttctctcagcctttccccattacccaatttcagagacacttccacatttttaagtatttgttacagtagcacctcatttccaggtaccataatcttaactgtataatccatagcatcctattgcagccataacaaattaccacaaatgcagtatcctacctttctgaaggcagaactctaaaatgtgtggggtctgtgttactttttgaggctctagaggagaacctgtttccttaccgtttagagtttctagcggctacccgtattccttcatttatggccccacatcactctgacctctgcttctatctttatatatcccttgcctcactctgacactcctgcctcccttgtgtgaggactcttgagattacatagggcccacctagataatctataataatctcttcacctcagcatccttaacttaatcatatttttaaagtgtcttttgccatgtaaggtaacatattcatagattctaaagattagaatatggacatctttgctggtggggcagagggacattattcaacccatcacatttggaaagcgttatctaattggccacattttaaacgtggtggcttgcgtttcctttagtaccagggtacaatgagaatggaacaaaaacctctttgagtgtaaccaaaacagggtgcccagaggtggtgtatggtctccatagtgcctcattgagtaacactgctctcctctactctcagagctttcattcaggtgaaatcatgataaaacatcaggggctgccataaggagaaaagatgcaatgacatttgtctgtgaggggatcatgcattcagggatatgtgttcaagtgaggaggaggtaatatccccttgacatattgaatgtattaatatatgtacatacatgagctcctctggctccatttggcacaaaatggcaactcccccaatctgttataaaagcagttctaaccacatagtatagtttactttgtaatataatacatttcatttcagaataagacaggtggtaaagatccatataaattaggggtttctcaaatctagagtaggagaggtctttaatattaactcacattttgccacattttacacactaacagcttctgagctctgtctctcattagctgccatgttgatgatttggagctgttgcttgatagcactgcctgccaacggcccaaaggagaggcattctggttttatagtcaaatgagtaaaagaacagaacgtaaacttgtctcatgcactaaagtagatgagacagtaaattgttttgattttgtttttgttgttaattaccaggcttgtatctctgggagcatatttttgaaggcttacttgatcccagcgatgtgactgctcaatggagagaaggaaagtcaatcgtaggaagaacacagtacaggtattggttgtattagttgtgcaacattaacctttgatgttttgctctgcaatattttctgtaaatactaaaagaaaaataataggaaaatatatttataaaaatacttctatttcaacttgtaaagaatagagaagtaaatctcatgaatatgtattcataattaagcttacttggaccttatgaaattgtatattacagaatactcctttttggcatcatatgtctgttttatttttacctaattatatagaaaagttcatactccacatcttacagcgtttgaatggtgacagccattgaaaacattctgtatcttggaggaataatatgtaaacctaaaagtattttcatttttctctttcatgtaatagtcatgttcactttttaaaatatttaggtgatatcaaagctcttgctgtcactttgtagatttttgtttattaaaacaaatttgatgagttctatcaggatttattttttattttagatttaataaagccaatgtattgcttagacttttttggcctttttatataactcttttctatgactgcatattttctgagtgtttttaagtatattaggattattttatttaggaaaactataattttatcatatgaaatgctattttattagattttgctttattgaaattaaaaataaaaacattatttttaaatgcttattttatataacagttgtattattgggggaaaatgtgaactaaagattctgctttgtattggaatttcagtcttttctacagaaatcaggaaaggaaaagctatagttaacctcaattttgttctaatttttactacagctttaattctttatttactttatatacacttggaaagcagttttattgcatgtatcttttcaaagttaaaaagtaaacaggtttttaaaattatcattggtaatgattatttttcctttcatcttcatgcttctgttgatctaatcccattcaagagcttaaatagacttacaatggttggatttgggtgtgtgaaagtaaatgtgtattatgtgtataaatctaatattttggtatttgaaaagtaaatgtgtgttaggaatattagtctaatccataatatataaaattttcagaaaagttattaaaaattcataaagttagcatctttaaggttaaaattatacattgttactataataatagtgaaagatttgagcaaagaacattaactcccaaaagaaagccaaatgtatcctttacttctgaaatatttgtgggagattttacaggcatcctctagagatactgcgtgttcagttccacaccactgcagtcaagcaaatactgcaataaagcaagtcatatgaatttttttattatccagtacatatgaaagttatgtttacactgtactacagtctattaagtgtgtaatagtattatgcctaaaaaaaaaaaatacgtaccttaagtgaaaaatactttattgctaaaaaatgctaacagttatctgacccatcagcaagtcatctttttgctggtggagggtcttgcctcgatgttgatgtctaatcagtgtattgatgactaatcagggtggtggttgctgaaggctggggtggctgtgacaatttcttaaaataagacaacaatgaagtttgccacatcagttgactcttccttcacaaaagttttctctgtagcacatgatgctatttggtggcatttttacccatagaacttctttcaaaattggagtcaatcctaggccggatgcagtggctcatgcctgtaatcccagtactttgggaggctgaggtagctggatcacttgaggtcaggagttcgagaccaacctggctatcatcgtgaaaccccgtctctactaaagatacaaaaattggctgcaagtggcagcacacacctgtaatcccagctacttgggaggctgaggcaaaagaatccttgaacctgggagtcagaggatgcagtgaggtaagatcatgccactgccctccaaccccgggcgacagaatgagtcaaagaaaaaaaaaaattggagccagtcctctcaaaccctactgctgctttatcaactacatttttggaatattctgaatcctttattgtcacttcaccaatgttcacaacattgtatcttcaccagaagtagattccatctcaggaaaccactttctctgctcattcataaaaagcaactcctcatctgttgaagttttatcatgagattgaagcaattcagtcacaccttcaggttccacttctaattctacttttctttccatttctaccacatcttcagtgacttcctccacttaaatctcgaacccctcaaagtcatccatgagggtttaaatcagcttcttccaaattccttttaatgttgatgttttgacctcgtcccatgaatcatgaatgttcatggtatctagaataatgaatcatctccagaaggttttcatttactttgcccagatccatcagaggaaccactgtctgtggcagctatagccttatgaaaagtatttcttttgttgttgttgtttgttgttttttttttgagacagagtcttgttctgtcatccaggctggagggcagtagcgtaatctcagcttcctgcaacttgcgcccctgggttcaagtgattctcgtgcttcaacatcccaagtagctgggactatgggcatacgccaccacacccagctaatttttgtatttttagtggagatggggtttcaccatgttggccaggtctcctgtctcggactcctgtccccaagtgatccacccgcttcagcctcccaaagtgctaggattacgggcgtgagccatcgtgtctggccaaaaagtatttcttaaataagacttgaaagtcaaaattactccttgatccatgggctgcagaatagatattttgttagcaggtatgaggacatgaatctcctgtacatctccatcagatctcttgggtgaccaggtgcattgtcaatgagcagtaatattttgaaaggaatccttttttctgagcagtacttctcaatagtaagcttaaaatattcagtaaaccatgctgtgaacagatgttgctgtcatctaggcttttttccatttatagggcacaggcagagtagatttaggatagttttaaaggtcctaggattttcagaatgataaatgagcattggcttcaacttaaagtcacccagctacatttagtccctgataagagaatcagcctgtcctttgaagctttgaagccaggcattgacttctctctagctatgaaagtcctagatgtcatcttctgctgatataaagctgtttcatctgcattgaaaatctgttgtctagtgtagccaccttcatcaatgatcttagctaaatcttctggataacttgatgcagcttctacattagtacttgctgcttcaccttgcatttttatgttatggagatggcttctttccttaaacctcatgaatcaacctctggcaacgtcagacttttctcctgcagcttcctcacctttctcaaccttcatagaattgaaaagagtggaggccttgctctggattaggctttggcttaagggaatgttgtggctggtttgatcctctatccagactattaaacctttctccatatgagcaataagactatttcaccttcacatcattcatgttgttcactggagtagcacttttcatttccttcaagaacttttcctttgcattcccaccttgactgtttggcataagaggcctagcttttagcttgcctcagcttttgacatgccttcctcactaagcttaactatttctagcttttggttgcaagcttctccaacccaccttattttattgttgttgttctgttttgttttgtcttaggcttttagcagcctgaagccatggcttttagtttctgtctttagtaataagcagaaaagagggataaggaaggggttttactggcccaaccagaaacagaaactaagaatccatgcctatattctctcccttggacactcctgaaagtgagagacttgcgactcttcctttcacctagagggcattcattatagggttattaattatagggaacacttagagggcattatagggttaataattggcctaatagtgttgtgtctcagggaatagggaggcccaaggagatggggagaaatgggggaatactggttggtggagcagttagaccacacacatagcatttatctattaagtttgccatcagatcttgtgagacttattcactatcatgagaacagtacaagaaagacctgcccccatgattcaattacttcccaccgggcacctcccacaacatgtgggaattgtgggagctacagttcaagatgagatttgggtggggacacagccaaaccatatcaccatctcatagtgagcacatgctgttggaaaatggtaccaatagaattgcttgactggggatcaccacaaactttcaatttgtaaaaaactctttatttgcaaagtacaataaagtgaagcacaataaaatgaggtgtgctggtattatggccaaagagtaataccgtttcctcttaggatttaagagaactatattcaagaaaggtcaccattgtatgagattttttttaaacagcttattaaagtgttaggttcatgaaaagtagcgtacataatttatccaaaattaataaacttttatgcaattgtaagtcttcagttgaaacaactacatgggtactaacttaagtgtttccacacattcaccatccttgtttgaccaaaagtgaatcagaagtaacggctcaccttgaagatattggaagaatttgtaagtactgttaagatacttgttgaaaataagtgtaaatatactttgtttaaataaacaaacgagcttatatcatttaattgtagcctcgagacaattctaagacagaagtagaaaggatatcatcagtgttgcagggctcatcaggctcaggaatgctgattttcatcaacacataggcccaaagaatgaattccagcataccaaataaatgatatagaatggaaagagagctgtcagtcaggccatgtgtttgtattggtttgactgacacattctttccatacaggcaggctacaattgataaccaattatttgagggttgattacataatggaaccatattatgggatttaattatatgtagtgcttttaactctgtttcagaaagaaagacagaaatatgactcctttttcaccactgaatcggtaacatcatccataggctgtgctcagaatatgaatgcatgaatacatacagggcaaactgaacttctggatgagcctgatgaagccctgtcacctctgggcagtgtagcatgtgactcagttattgagagtacagactctggagccagactatctttgttcaaattcttttatttttttcagacagagtcttgctctgtcacccaggctggagtgcagtggcgcaatctcggctcactgcaacctccacctcccgggttcaaacgattctcctgcctcagcctcctgagtagctgggattacaggcgcccatcaccatgcccaactaactgacctcatgatccacctgccttggcctccaaaagtgctgggattacacgtgtgagccaccacacctggcctagttcaaattcttgttctattactttgctgtctgaccttgggcaagtttcttaacctctctgtttcagtttcctcacatttaaggcaagtagtagttcatatttcacaggattattccaaagattaaatgtgttaataaattacagggcttagaatagtatctaacacacagtaatcactatagaagtcttgttgctcttttattttagtgttccttaactaagtactgcaacatcttcctacaagcagttctcctttttctgtttccattactgtctcttacccctccgtcatgtacctgcccacaaatgccttattgatacattctttatattaatatgttcaattaagttttaagctagcctgagacccattctgtctcttgaaggaactttgcctaccactactcatagccatcatatgttgatttatagtttaatctcataggacaattttatttttaatttcttaagaggaaccttgattctgctcatcgtgacttttgctcatcccccaaagactgccttcagaatcctatcatttctatgtatagtcattaccacaggctatataaatgtctacccatttggtaaaacaaaaggtagatcataaattattaattgttatcaagattcgattataacatcttcagtgagcatctgctacttatgaaagagttgaacttatttccaaagatcatgatagaataaaacatgtcagatggcatttttagaatttccagactacttttgtaagaagttagctcactatgaatgaaagcatttatagataacgttaatggttactgacatgacatttatttaggtcaaatgctggagcataaatcaatggagatcccaaataaaattttcattggtaaacaaagacaaaacagtatttcaaaatgccacatttattcttttaatgttaaaatatcctttaaaaaatagtagtgatagtgatggcccatgcttataaagagcttactatgcgccaaacagttctatacacttaataacttttagtttgtttaatccttaccacaaccctatgaagtatcattgtttacattttgcaagttaggaaactaagacaaaagagattaaataacttccccacaactgcaaactagtaattataacaaataacatctaacatttacatagctcttactatgtgtgagacactattctcagtgctcacaagcatccatgaggcaggtactgtgcttacctcgtttgagcactgaaaggctaagtacctggcctaaggttacatacttctaattagtgggtaaagccaaaagtcaagcactacactcttgactaagggactattttgagtaagaggcagtcaggggatttttatttttaatgtcttaagaagttggtgattctgtattggtccctaaagatcattttcagttttttgtagtaaatggaatcttgaaatctaagaactgatgagctaagcagtgtcctagagtagcaactctgagttcacaccttatccagtgtaatattagaaaccttgttttaaaaatgcactattttgatatatttttggtttgacagaagacagctgctgaaactctttctctctcatcactcctgttcagccgatgtctcacccaagcccatgtagtcaacataaagaaatgagaaattgccagctcttggctcttatgcctcttcaaagattaatgagcattcaggctgcttagaaggcatccagctgtgggtgagatgggcttccagcctggcagagtaaacactgaggcccgcagtcttgtcccagctctgctgctggcgtgctatgagatttcccagccatctggggtcttattgtcttattttaaaatggaaagaatcctgagtcaacagcaacatatgaagtggttgctgtgttccaggggcttttacagatattagctcagtgaattttaatcctcagaaccaccctgtgcagctggtggtattactcccattttgcaatgaaaaccttgatgttctgagagattaaatgactagtaaagatgggattgaaccatggtcctccctttaacatgatagattagtccacatcatctacaagtcacctccaatattaagtatattcaattctataatttcatgttgaattctttttaagagatgggggtcttgctatgttgcccagactggagtgtggtgactgttcacagacaagatcatagcatactacagcctctaactcctgggctcaagagatcctcctgccccagccttctgagtagctgggaatataggtatgcaacactggcccagcatcattctgaattcttaaatggggtcatttttagaaattcttatctatgctttgggtctagactttttttcctaatctgctacaacccagttataacctcatcttgacttttaaatgtttttagattttaatatcctctttatagtaatttaattacaattttgccataatctctgttaactatgatttaacttttgcacatctaatgtgcccaattcttgattatcttttaatgtttttaatttttttaatcgtgtgatttttcagggttatgtttactacttagtgaattttaggcacagggtgcacagtgcatgtatacacttgaagggttctctgatgcttttgcttacacaaactaaattaatagccccccttctgctatactcataattatgaaaaaaagagtgaagtgctgcaataaaagcatacctgatgcatgaaattataatagaagcaaataaaaaagaaaactttttctcccctaaattaatatataatatttctacaatagaaattcatctcttggtgatacatttaggagattttatatacttaggaaactaaaattgcctttagctacaggtaagctgcctaaatagtagtagaaatggagagaagtggggtgaaaaacaaatatttatgaccaaaaggaataaaaacttagctgtctttgaaaagataaatttgattcacataggatagtattatattattttctcttcagaacacaatttgtcatagaatggatcatagtctgaatgaacactgaataatttttttaggttaatcgcccttacctaaaaagaactttgggatacataaaaattagaacatcaagtaaacaacttcttacaatactgaagcctacttaataagagaaatgccgttgcttgaatcagccatcggctgatgactcatctcttaaagtaggcctcaactaccgagcaaagagatccttgcttggagggttatgtataatataagagaaaggaggttgccatcttgtagcctttaagtgataacttttcgtgttactggtacactccagtaggattctctggggccagctaaatccacctggcatgaatttcaaaatgccccatcataaggtagtctattcacagttggaggtctagcccttactcccatttcctctctctattgatgtgtagctgttgtaggacactcagatctctattatagtccactgtggtctgttcattacccaaggaaatggtttctccacagttcttgttctcagtttcttactaagttgtcagtcacattgcttaaaactttgaccaccaaaatatcattgctccctagctttggaaaatgtatttataattcttcaaaaattaaaatattaaataaattgagagatccattaattcatttctaccaaataattgttgagcacctcctaatgtttaatttctcctttcctccttcctagtctacggaaatgggcattagtgtctccttgcaaactcagacaaactaatagctgaagggggtagtggatttatttgtaaagttattaatttatgtactgcttggagcaacaaaagtaatatcttattcctaaagggccttttgaccgggcatggtggctcactcccataatcccagcactttgggaggccaaggcagcaggatcacttgagcctaggagtttgaggtcagcctgggcaacatagtgaaaccccatgatttttcatttaaaaaaaaaattaaaaataaaacagagggccgttccatagttttcattgtagcagaataaataaatatctaatttgtcagcaaaatatgtgaaagcaagatcttatgataacctcacctgggaagtaagaaatatatgtattttggtatgttaatgtatgggtgacagaacaagctgcagaggagactaataatttatttttaaaatatcaaaatataggctgggcatggtagctcccgcctgtaatcccagcactttgggaggccaaagcaggcagatcgttttgagctcaggagtttgagaccagcctaggcagcatggcgaaactgtatctctacaaaaaacacaaaaattagcacctgtcgtcccaggtacttgcggggctgaggtggaaggatagcttgagcctgggaggtcaaggctgcaagtgagctgtgatcacgtgactgcattcctgcctgggcgacagtgagaccctgtgtcaaaaaaaaagaagaagaagaagaagaagaagaagggccaggcatagtggctcacacctggaatcccagcagtttgggaggctgaagtaggaggattgcttcagcccaggaattcaagaccagcctaggaaatatggtgaaaccctgtctctacaaaaaacagaaaaactttgtgcgtggcagcacaaacctgtagtcccagctactagggaggatcacctgagcctgcgaggtcaaggctgcagtgagcctagatcacaccactgcactccagccggtgacagagcaagaccctgtctcaaaaaaaaaaaaaaaaaagtattaaaatataaaagttgggctatttctgtgtttataacacctttccttaatgagaggtgaatttataggctgtgtcttcaaaatgtataataattgaacccaatattaaatataataccagactcatttctcctctatttgagcatttatctctatgaactttaatctatagccatttaaactgctaatatttaaatatacccaaattatttcctgtaaaattatgggaaattattgttttttaatattttaattttttaacttgttctttttgaaataattttagacttaacaaaaatattgcaaaaatggtaccaaaaaaatccattacacctttcatccagattcctcaaatgctaacatcttacataattaccgtataattatttttttcaggaaaataacattgatacaaaactgttatctaatttacagatacacacattcccactactgtccattttctggcccagtttccaatccagaatcacacggtgtgcttggtttcatatctctttggcttcagccagtctgtgacagtttctcagtctttgttgaccttgtgacttatgaagagtactgcccatgtattttgtagaacgtcctttagtttgggtttgtctgatgtttccttacagttcagttcaggttatgtattttggttccgaatacctcagaaacaacatcgtgtcatcctcagtgtgtcatatttgttcccgttactgattatgttaactttgatcacttggctaaggtgcagtctgcctagtttgttcactgtaaagttactgtttttttccattgtgatatttactaggagattctctgggaccatgtagataacctgtttttcaatatgattacaaggtcccacagtatctccctttcacccacaaatgttagcatccatataaatacccaaagacaaataaagagataaatgccattcattgaatcagtcatcagctgattattcatctcttaaattaggcctcatcttcagagcaaggagtaaaatgtttagtagtcttaaacgttttgattttaagaaacaaaagtaaaaggagcacatcatttgaatatgatgaattattttggaacaaagaattaaattgtttgttatatgcaaataaatacataaaaaacaaccaagaaaacctcataaaaatccccagaatcactggataaaaatttaaaaataaagaaagtgcaatcccaataagactttaatgttgaccattcattaggaaaaaagcctactgcaatagtcctgtcgataaaaaaaagaagaaattgagaaaataaaaaagccaactattagaagaatttagggcctaaagaaaattatatttctttttctttttcttttttttttttttttttgtgacagagtcttgctctgtcatccaggctggagagcagtggcacgatcttggctcactgcaacctccacctcctaggttcaagcaattctcctgcctcagcctcccaagtagctgggattacaggcacctgccaccatgcccagctaatttttgtatttttagtagaaatggggtttcaccatgttggccaggctggtctcgaactcctgacctcaggtgatccacctgcctcagcctcccaaagtgctgggattacaggcgtgagccaccatgcccagcctcataaattattttcataccatatagaaagcataatgataagaatatgcatactctaccatgtttattgttatggaaatacagaagaaaggcaattaactcaatctaagtagagttaggggtgtggggcctatcaacaaatgttttctaaaggaggtgatagctgagcagtctttaaaatgagtagaagttagcaaggcagaaaaaagattatattcccagcagaagtgacatcagaggttcataagtgataaacttgggtttatgcatggaattgcaaaccaatcaatattcctagagcatgaagaaaaggtaaggtagctgagatggggaggattgagcaagggccagatcatggtgggccttgtatgtaccacattaaggctcttggactttattctagggtagtgaaaagcaattgaggatgattaagcaggatagtggtattgtcatgtgtttatgtgtgtagatttctttagcagccatgggggaaagtgatttgaaggagacagctgggtgcaggcagaccaagtaggagattggaagtatcccacagagataaaactaatggatgaaatagggaagtggtagtgggtcagagccagggacaaatttgagaaatatttaggagcaaaatggtcggaatttagggattaattagatgggaagatgagagagggaaacaaatctgagaagtccctagtttctagtttgcatgagtaggtagctaatgtgacacaaaaatagaaaatacagaaatagcaaatctgtccactcttctctagcccaccacccaacatctacctatctcctctttctcagcagacaaccctgcctcctctttcatcaggaaaattgaggacatcataattatctctcttaactagctgctgtaacatgtacctactctctgtctggtccctcacccatccttatctctttccaagctctcaaacattgagtgatctttcctggctcaaggttaaagcccaccacctgtgcatcccacctgcttctaggaccttgttccatgcattacttccttgctttcctttattctccacttcattcattattgctttatcaccttctcttcaaaactttcagaatccttgtctatactcactgtaatcacttccttacttctcaacccattgcagtttgactaacaaactttccaacacacatatgtacatacatacatacaacccaggtatctgaatcaaatgaaattttttgggcccttaaagtttcttcttttagatctgtggttccttgacggaggcactgtgggacatcaccaaatattttaaatatttatgggaaacactgatacttgatatctttcaggccctatgcaaactgcaagttcaaagcagtacagtttcaacattagattaccctgcatttatttgaacaatatcaggactttgtgaagctgggttttccatggttgccgtgataaaatgcacgcactgcacaaaaatgagtgtggaacaggaaatgacactgacagtgtccactgattccaaggtttgagaagttctatagtgctcaacaggtgcacacatgctattaaatatttgtgattagttaagaatgaaataggaatatgagtttttctttcagtgtctgtgtatttttttaagtcacttttaagctgttaggacatagatacttattaggttgtttagacctaatgactttaaaaattgaactgttaagcatttcttttagcttgggagacactgaaaaatttacaggaacactaaaggtgctaagaatctctgacctacaccttggcttcgcagtattgaccccatggctttcaccattaccaaaacacagggagttgtggacatccaagaccaagacagtataaatgtgcccttgaatgaatcatacttcattttgttaatttgtgtggatcactaaaattagaaagatattcctttcacatgaaagttacatttgagaatagcttcatatattttattttaatacattgactaaaacctactttgtttttcttttcttttcttttttttttttttttttttttgagacaacgtttcattgttacccaggctgaagtgcagtggcgtgatctcagctcactgcagccttgacttcctgggctcaagtgatcctcctgcctcagcctgctgagtagctgcaccaccatgcccagctaatttttgtattttttgtagagatgggttttcaccatattgtgtaggctggtctcgaactcctggactcaagcgatccgcctacctcagtcaactaaagtgctgggattacaggcatgagccaccacacccagctgtatggcactctgaaattgtttgggcacatgatatatatggacttaatgtcaaataaccaaatttgagtctgatctgtaccatttcctatctagtgtcagctagctttatgcaagtcatagaacctctctcaagatttccttttttttccttcataaaattggcctaacatggggaaggaggactggaagactttctcatgctcttaagaattatacctgcttatatttctaaaagagaaatacaaagtattcgtatgctaccaataataaatattttaaacataccataattatcatcatcattgctagtttttctagcccctcagattctgcatattgtcttaaattactaggttatcactgaatcattagtcattgccagtgctagatactgtccaaggcaaacatagtcctcaaaacatagtcctggtccctgtatgttatataattttagaataatgtcatataaatcatatggtacatgcacacatagtaaaatatatttttacgttttgtgctttaactaatatctgtttagtatttgttaaccatggagttatggaaaaacttaagctctgaagtgagacagaactttgttgagaactcgtcattgccattacaagctgacagctaaagtgcaatttcacaaatgccaatgagagaataatgaactcctcagagttgttgggggggttaatgatgacccatgcaaagtgcttatgtatcatgtatataaaaggcgttgaacaaatgtttttatccccagcagtaagaagcaatgaaagtaggctttgggtatatttgtgctgaaaattagattctatcaggatataaagaaatggtttaagcaagttgtaaagaatctaggataagagtgactaattttaagatgaattaaatggtacttgttctatttaatacatactagtgaaaatatttcaatggtactggttgttctaggcagcacttaatatgaaaaaaatgagttatgatacatgtctattcctttaatgaaaactttttaaaaatacagttaaaaagagagtaggctgagcacagtggctcatacctgtaatcccagcacgttggaaggccaaggcaggtgaatcacttgaggtcaggagttcaagaccagcctggccaacatggcaaaaaccctgtctctactaaaaatacaaaaattagttgggcatggtggcacgcacctgcagtcccagctactcaggagctgaggcacaagaattgcttgaacccaggaggcagaggctgctgtgagctgagatcatgccacagcactccagcctgagcaacagactgagactctgtctcaaaaaaaaaaaaaatggtaatacaacacattcccatttactcaccattcaaaactaacaaatttcagctctctgtcatatttgcttcagatatttaattttcctgttaaaaaaattaaatactttcaataagggtaaagctccctttgtactgttttctagtccctttcatcttccttcctcctcagatacaattgctatcataaatttgatgtggatcctcccattcaaatttttatatttatactgatcctaaatatatatgtgtaaataatttttatgactgtactttcaagtttatgtatattttgtgagtgtcctaatccttgctttttttaacattatatttttgagatataacattcatggaatgtttataatgccattcttcgtttcttaatttgtcagcactttctcatccattgagtcagatgaagagtgtaatagcagctcacaccataaaagggttgagaactactgactttaaatgcctttctggtttgaactaaaccattattttacagagttccatgctattcaattatatttctttgcttaagagtttaaattctagccagcatttattttcagtgtggttaaaacaacaacagaaaaaaaggtcaggcatggtggttcatgcctgtaatcccagtactttgggagactgaggtaggtggattgcttcagccaaggagttcaagaccagcatgggcaacatggtgaaaccccatctctacaaaaaaatacgaaaaattacctgtgtgtagtggtgcacacccgtagtcccagctactcgggaggctgaggtgggaggatcacctgagccagggaagttgaggctgcagtgagccaagattgcaccactgcactccagcctgggccacaagagttgagaccctgcctcaaaaaaaaaacaaaaaaacacaaaactatcacattttgtattatcatatgcaaattgatctgcctacagccaaagcttaccattaatctacagctatgccccatcattcaaacttgttcaaaagattgtattatagaaattttacttctagatagaatgtggattaaatctcattgtagattttgtataaaatgatgaatttctgataccacatacctttgttcaggctttgtttgtctcttgtttttgttgtgttgtttttaacagcttcatcactggtccagctgtaataccagggtacttctccgttgatgtgaataatgtggtactcattttaaatggaagagaaaaagcaaagatcttttatgccacccagtggttactttatgcacaaaatttagtgcaaattcaaaaactccagcatcttgctgttgttttgctcggaaatgaacattgtgataatgagtggataaacccattcctcaaaagaaatggaggcttcgtggagctgcttttcataatatatgacagcccctggattaatgacgtggatgtttttcagtggcctttaggagtagcaacgtaagtacaaaatatgattaaacatttttaggccctaacacctgaatttctgaaccaggaagacttattcaaaattgtaataaatttagttcttctgggattattgaggccaggtacagtctttctcagagataaaaacagggtgtggtcgcatccttcaataacaattatgatgtttttaagagtattttattctttaatgaggagatgagttactttttttcttttaaaaccccaaggcatagaatggatttttcaagcttattaggagtgccataaaaatatatttagcagagaaatggcagatagatttttttaaaaacaatgatagtatctatatatagtaaaaaaaggcaatattattatatcaggaatataccgtaccattgtgtttgagactggctgaatttatacaaatctcttctataaaaggagggattaattaaatgatagctaaggtttctcaagatacagtcttttaggccaggcgcagtggcttactgcctgtaatcccagcactttgggaggccaactaggcagattgctcgagtccaggagttcaagagcatcctgggcaacatggcaaaaccctatctctaaaaaaaaaaaaaatcaaaaattatccgggcatggtgacatggactcctgtatggcgcctctagtcctagctactcatgaggttgaggtgggaggatcacttaagcccaggagattgagctgagattgtaccactgcactctagcctgggcaacagagtgagatgagactgtctcaccaaaaaaaaaaaaaaaaaaaaaaaaaaaaaagatatagtctttctccagctataaaatggaaaacatatatttttatctttctgttaataggatgtttttaattaagagcaagttgactttaagataagttgccactagtatataaacctcctgagagcagggatttttgtctcttttgttcactgttctatccacagagcctaaaacagcacctgcagagtaggtattctgtatttgttgagtggataaattatgaaaaatctcactgacatgatttttgaatcatacattcattattcatcattctgtccctggttgcgggatgtggccttagactgctgcctagttagcgacacagatgtcactggcacatctgtgccagtaatgagatgtattcccaagcctactcctataacaccctaactcagtaggtttggggtaaggccagacaaaaaggttcttgttaagtaaagccaggtttaagaccctcttaaaaatctattttttgagcagagcctgcatttgtaaaatgttttcatatagtataagatggaacctcttggtaatcatgatgttgttgcactaggccagtatatttcttatataggtctgtggttctcaaccaggggcaattttgcccaccgggaggcatttggcagtgtctggagacttttttttttttttttttttgagacgaagtcttgctctgtcaccccagctggagttcagtggcacgatcttggctctctgcaacctctgcctcccaggttctagccattctcctgcctcagcctcccaagtagctgggattacaggtgggcatcaccactcctggctaattttgtattttttatagagagggggtttcgccatgttggccaggctggtctcaaattcctgacctcaagtgatctgcctgccttggactcccacagtgctgagattataggcatgagccactgtgcctggcctggagacgtttttgattgtcacaactggaggaaagaggttgtcacaactggtatctagcagatagagcccagggatacagctgaacaccccacaatgtataggacagcctccacaagaaaaaattaacccaaaatgtcagtaatgctgaggctaagaaaccctgttatatacaaactgttaggtaaaattttgttctcgtgtgaaagttacatttcaggtacacagtttaatccctggtatttccaaatgctcataaaaataggtaacttttcctgtatggcataccatggttttatctgtcagtttgttttaatctacttgaaaagcccttgggattaatttttcagagccctttgcaatagcaaaatatataatctttccttttttttaattgacaaatagtaatggtatatgataatggggtacaaatgatgttttgaaatatatttacaacgtagaatgcttaaatcagactaacaaatccgtaaccttatatacttaacaatttttgtggtaaaaacataacatctgctgttttagcaattttgaaatatacagtgcattattatttattatagtcaccctattctgtgtgatagatcactaaagcttattcctcctgtccaactgaaacttcatacccttcgatcaacatcttccttttccccatccatctccctcccctggagtattctgtaatcttttcatcacctggttaaaatgttgcttaaatcgtgatcattatgaatagagaagagtctttatactttgaaggttttgaatgtaacatgcctaacagctgcagatgagtaatgcaagttaaagaatgtcaaaaacaaataactttaggcacaacatctctgtaacacttttgtaagagatgtcagtgtgaaattcaatttttttaagtcagtagattcagggagttttccaaagtattcatggaaaattacaatttgagatttagaaatcacattttaaacctcttctgtatacttcttgctacctaagagattgggttatggggaatttttgccaattctatatcatatgttaattcatgtgtatttatttttatagatacaggaattttcctgtggtggaggcaagttggtcaatgctgcatgatgagaggccatatttatgtaatttcttaggaacgatttatgaaaattcatccagacaggcactaatgaacattttgaaaaaagatgggaacgataagctttgttgggtttcagcaagagaacagtaagttctatgcttatttaattcattcattttgttctccagtctgagagttgctttatgtagaaacacaggtttccaaagaggcattgttaactctatttgtaccaatctttccccagaagatacattagtaattaaaactgtgaaaagactgggttgtacacatttagaatagagagaaccgcctatgactgtagtccatcttgaagaggaacactggtaactgtcatttgcaaatttcagttgttagggtttcctcaataatatttgttagtcacacaggagattatagatgctaatgagatacttaggttcatcactgagatgttgtgcagtggaccaattcagtgttccaagaccggtgtgcaggtctcacaaattcaggaattcaggaacctgacaccatcttcaggacatggaccttgtattcttctgtgaatccccagatctaacataggaccttgcacaaagtagacctaggataaatggtgagtggatgaatggttggatagggagactcaatagggttaaatgtcttcttttatgtagtaaccaggaaacaggtgttcatgttgtgaaggaagtaaatttgcaatcatttattttgtttttaaatagacaaatcaagttttcaaataaacaaagcataatgcagagtcatcagggaagtaatgccttaaaaatgtccagttaggtctggaattttactttttaaattatagcaggtactctttattgctaatgtaaccatatcatattcgttcagtcagtgtttaccaagcaattgctctatgccagaaacttgtttacccacagtaaatacagcagtgaacaaaacaaagtccatgccctcctggcacttaaatgcttgttggagtagacaagcaagtaaaatatattgtgtgtcagaagatgataaatgccctgtaaaaaattaagcagaagaatggcatagaaagagcttgggtgttggtggtggagcatttgctattttggaatagccaagaaaggcattcattagaaggttacatttatgcacaggccttaagaatgtgcatgggtgagtcttgtgtatatttgggagaagactattccagacgtagggaagagcaaaggccctgaggcaggcaggaatgtgcttactatgttacaggaacaacagggccagtatgtctggagtggaatgaatgaggacagtgtaaaataacaaaggttattatgggaataattcttgtaactcctctcataccattgagccagaggtttgagtagatgttttccttgtttctcattgttgcttctagactattctcccctttccctccctaataatcccaattttgaaactcatgtcagcagacaaaaccatccatcacccttactctctgaaatcatgcacttacccttgggtttctccccctacttcttcgaagagtttagctcctggtactctctagctctgtctgacactactctgttctcaattcttagtgactggcaaatctacatagatggtctttctgtcattttggtctttgcagttccttcacctcccctcctccaataatctgggcttccacctgacctcagccattctctctcatggttatttcctagactttgtcattacacatactgcaccttctgaacatgatctcaagtcccagcatctctttctacaaccaccatcatctgtcattccagctcattccgtgtaataatctgactctgacaattcagctggcacttagaatctattgttcctactacccttttgttgtccttcactcccctttcttcattttattcttcacctaacttaaatttcattgtcaatcataattgcctataccttcagctccctaattccctaatctggcaaaccataactctggttaaatccagctctctgcctactccatgcctgcacccatgcaactacacataattggagaaaggtgctaattgacctttatttaaacacgtgactttgaacctcaggtgcccagcagtcttatatttcccttgtccatatattctcccactctcctagaaggctgttttataccttcttctctcctacactctaacacctccgcctttcttactttatgaccctattgcttatttcactgagaatagtcaggagaaagcatctatctttttttttttcttttgagactgagtttcactcttattgcccaggctgtagtgcagtgacaggatctcggctcactgcaacctctacctcccaggttcaagcgattcttctgcctcagcctcccgtgtagttgggattacaggtgcacgccatcacgcccggctaattattgtatttagtagagacggggttttaccttgttggccaggttggtctcgaactcctgacctcaggtgatccacccgccttggcctcatgaagtgctgggattacaggcgtgagccaccgcacccagccgcgtctatctttctttactgatctttcagtttctacccttgcccctgtacagtccattctcaacacaatagccagattgattctgatgaaacctacatcacgtcatgtcaccccatgatcaaaagcctgcatgatagagtcccgtgtgaccattcagactttatcttctgcgcctgttccctcagttaccctacctcagccaccctggcttccccgcagctccttgaacatgccaggcacatgctgtctcatggccttcactcttgcttgctcttttatcccgccagatctacgtggcttgctccttcatccccaactctgtgctcagatgctgccgcagtaagacagtccctcatcacttatttaagattgcaaccctacccccttagaaactcctgctctacttactcctttgctcttttctcacagtattctaccccatctaaataatttactgacttcacttggtcactatccatctccaccactagaactagaatatatgctccatgagggcaaggtagggaagagaggacctagcactcccaaagtatcggttgaattattattatccattcagaagtgttacggtgactcctagattttataaatgtacaactgtaaaatgttccaattcttcaacatttttaagaaatctgtttgggccaggattttggatatctcttatgcctatcatctctataaagtttcaccatttcctgaaactgattttattaaaagataaggtatttttgttcacaaactatatacttagtaaagtgaaaactacagttgtttttctgattttctagctggcagcctcaggaaacaaatgaaagtcttaagaattaccaagatgccttgcttcagagtgatctcacattgtgcccggtcggagtaaacacagaatgctatcgaatctatgaggcttgctcctatggctccattcctgtggtggaagacgtgatgacagctggcaactgtgggaatacatctgtgcaccacggtgctcctctgcagttactcaagtccatgggtgctccctttatctttatcaagaactggaaggaactccctgctgttttagaaaaagagaaaactataattttacaagaaaaaattgaaagaagaaaaatgttacttcagtggtatcagcacttcaagacagagcttaaaatgaaatttactaatattttagaaagctcatttttaatgaataataaaagttaattatctttttgagctaacatgtgatttttaaaatcattttgactactgggtgtataaatgtgtttgtgtgtgtatgtatttatagatgttctttaaggtacccttgaaaactctacattatgtatgccacataatgacatttcagtcagtggtagactacatatatgatagtggtcccataagattataatggagctgaaaaatttctatcgcctagtgatgtcatagcctagtgatgacatatgtattgcaatacatcactcacgtgtttgtggtgatactggtgtaaacaaatctattgcactgccagtcaagtaaaagtacagcaattatgtcctgtacataatatttaataatgacaataaatgactatgttactggtttatgtatttactatactatactttttacaatttgtattagttcttgcattgctatgaataaatgcctgagattgagtaattta

SEQ ID NO: 104 - DNA, 32744 bp, Homo sapiens
  source 1..32744: mol_type = other DNA
ttttagggacagactgcttccgggtcgaagggcttgcttccggagagcgggaaggctaaaacgcggtagctaaactgcagccaactttggttgtgtgtggaaaaggctttagccatggacaggtcagtactgatggtggcagctgagcccgaagtcttgcccgtctcgcctgttggcgaaacgaaataggtgaaactagactcccagaagaagccaaggaggtcccgggtgcttcccctaaggctccttccccatgccgggaaatttggccacaaatggggaaaaagccgcttggcgtgcgtcggggtggggtacagatcataatagtcccttactttcccactacgttctgcgatctattcggcgctttggggcagcaacactgttcgctcctggggtgggcggggtaggtagcgcggcgttcgaaatgctaagtgaccagcctgagatcacaaagccagtcagtgaagatactgggatctcagcccagactttctgattacaagtgccagcatcagattctgagttccctctatgatctgggtactgtgctagccgcctacaacaaagatcagttattcaagatccttcccctcggggaattagttgtgtaatggagacaaccaagcagtgtaaagtggtaagtgtttgggggcgattaagtctccttgtcactgtaactatcaggaagacccctcaaagaaggtaactttctagctggtctttgaataataagagtacattattcgtactccaaacattgagtacctactatgtgactgccattgttctaaaggcgttgaatatatattattagcttatttaatcttcagaacaagaaaaatcctatgagatgggtactgttatccttttttcatatataacactgagactaaaagaggttaaggaacttgctgaaagttcggaagctaataaatacaagaaccaaattgccaacctgcatctgtgtgtctccagcctacctgaggctctttgaggagtaagtagttgttgaccaggtgctcaagggggcaaatgtaggtctttgtaaaagaagcatattcagaggtgctaggatatgaaaaaaaagtacgtgtagctcagtggtcacatgcagtatacgtttaaagtgatgtttgtggctgaatagaagactgaacccctaaactggggtcacattgtaaatatcattttaggaaatttttacttctatagaccagagagctatctgaaggtttttttttttgtttttaattttaattgttaaacgtttaaaattgtttctatgtggttgtttcccatactttcctgctgaaggaatatctgaaggttttaagtggaggaaaagcatattagattcttgtcttaaacacaggccttttagtccgcacaatttagtttctagacctttgagtgaaactgacagggagtgttgtgatgggacaggagacctcctgggttgaaataacttgaagggtcattttgctccaatttaccacaattcttttacttacccttctatctcacaagctctgtttgttgttgttgttgcaagctctgtttgttgttgttgttgtttgtttgttttttaatagtacccatggtttaaagcattttggagactgcagaaaatcttttaagagagaattcctgcagttaggtaactcctcaatccaacaagggaaataagattcactttcatgaagcaattatctaaaacagtgttataatatagattccaagtgttgaaataattccttaggagaaaataacatagtgagtactagaaagtcagagaagtctttgtgcaggtaagatttgagtaaggctttgaagaataagcaggatttggagccaggagtgcgttctcaacaaaagatctaagacttggctactagaatgactataccttaacttactcagggtcctttactccaactgtgatgataaaattctttataaatgctatattctcgtttcacttatataagcttgattatactactttaggagtggctttggagagatatcatcccctgtaatccgggaggcagaggtgacacggactgcacggaaacagagtgctcagaaaagagttttacgtatcctttgcgatttaagcatcattataaaaattgtaacatgtttggaatcagtgttgtagaattttctttttataagagtattaaatggtagctataataaaatcctgtagaaactttttttcactccacagagctgtcatttggtaaatataatgcaaaaatttaatgagatcgtatttccctaaaaataaagatatttcttactgctgacagcttctgctgagattagatttctttttattatttgaaaactgactaaaaacatttagttcagtgtgtagttatctaagactgacatctgatcatttaaatggcagaagcaatgaattatttaccctttgcattgaaaaatggtagccctaaaatacttgttcttgaaaaatgtattcacataatttgtatagtaaaaagatggttaattctcattttagtgatctcttttctacatggaaaacttttcttaactcgttgtacagttcaggcatctcaagatgaaaattttggtaatactacaccaagaaaccaggttatccctcgaactcctagctcatttcgacagccttgtaagattttttgcttttaaagcatttaataataacggtaattataatagcaactaacatttattgtaacataattagtatagtatttggttacgatatcaataagcactaataataatgattgcagttattattcgtttgaactcttgccatgtacaaggtactgtactttccataaacacacggtaactatgacatgggtattgttggccctgttttaccaaaactgaaagtgagacttagagaagttaactaatatatacaataagtatgtaaataggctggatgcagtggcccatgcctataatctcaacactttgggaggccaaggtgggtggatcacttaaggccaggagttcaagactagcttggccaacatggcaaaaccctatctctactaaaaatacaaaaattagctggcgtggtggcacatgcctgtaatcccagctactccggagggtgaggcaggagaattgcttgaacccggaaggcagaggttgcagtgagctgagattgtgccactgtactccagctggggcgacagagcaaaaaaaaaaaaaatcccagttccattatttacatactctttttttgttctgagacagaaaaaaaagagtatgtaaataatggaactgggattcaaacaatgatctgtttactccaaagtttatgcccactacactgcactgcctcagtatgccttataaaattaaaatatgaagaatccgttgactgattagtgtctttaactgctcagttattctataatgaaagcatctgtaattgcagtaaaatgtttcctgttaggctcagtagtacctacagctcaaatttagaaaaataagttaaatccttgtatcatggaaatgttaacatttaaagtatttatttggttagagtctaaataatggaaaactgaaaaatttattcttcattgtttgtttgcttactttgttttgataatgaatgctcacgcactttaggttctttctaccaaccttttgtttatagttaccccaacaagccgaagcttactaaggcagccagatatttcctgcattcttggaacaggagggaagtcgccccgacttacgcagtcttcagggttctttggaaatctctccatggtatgtagaaaaatagggctaagaactccttttgggtcgagtgtggtggctcacatctgtaatctcagcactccctgaactcctgacctcaagtgattctcccgccttggcctcccagaagtcaggagtttgagactagcctgcttagcatgataaaaccctgtctctactaacaataaaaaaattagctgggagtggtggcttatgcctgtaatcctagctgctcgggaggctgaggtgtgagaattgcttgaacccaggaggcagaggttgcagtgacctgtgattgcaaaagaaaaaaaaaagagaaaaaagaacttctccctttttataaaaatatgatatttgatgtaaaagtcttttaacaaatattgagtcagaatcatcataacagtaactttaggttatatggattgaaataattagacagtaaaaaaactgaaaaccttatgcatctgatatcacagatggaaactgtgacaccagcaacctttagatgaaaataagatgttttaatctgtcagtttgctgaccagaagaagtacatgctgtggttggttgctgatggctataaaatctgatccctgttttgaagcatacaagagtaggaatcagaggttaacagatgaagaatatcttaaggaagagataaaatgtattaaaggggataaaagagaaaattggaaaaagtaggtgagatactctttaggaatcactatggaacagtattaaaaatagcaaaagaaatgttatgtaagctgtgatgcagaatgacttcacctaagtattaaaaatacactatagtagccgggcatggtggctcacatctgtaatcccagcattttgggaggctgaggcaggtggatcacatgaggccaggaatttgagaccagcctggccaacatggtgaaaccccatacctaccaaaaatacaaaaattagccaggcgtggtggcacgtgcctgtagtcccagctacttgggaggctgaagtgggaagatggcttgagcctgagaggcaaaggttgcgttgagccatgatcgtgccactgaactccagcctgggcaacagatccagaccttatctcaagaagggaaaaaaaaaaaaaaagacgcatacatacatataatttttagaaaccttatttgtttttaaagtatccactcagtgacaataactccatcacttttctgtatttttacttttttgtttttttttaaggttactaatctggatgacagtaactgggcagctgcattttcatcacagcgttccgggctgttcacaaacacagagccccacagtataacagaagatgtaactatcagtgctgttatgttacgtgaggatgatcctggagaagctggtaaaatggcattgagctttgtgacaagtagcttttcactttagcaagatgaaggaaaccatttcttcctgtttctgaacgtcattatgtttttcttttctttctttctgtctttttttcttgagagagtagcttaaacaacagatttttgtgtgtgtgttttttgagacaagagtctcactctgttgccgggcgcggtggctcatgcctataatcctagcactttgagaggccgaggcgggcagatcacgaggtcaggagttcaagaccagcctggccaacatggtgaaacctcgtctctactaaaaatacaaaaattagttgggtatggtggtgcacacctgtaatcccagctacttgagaggctgaggcaggagaatcgcttgaacccgggaggcagagtttgcagtgagctgagatcgcaccattgcactccagcctgggctacagagcaagactccgtctaaaaaaaaaaaacaaaaaaaaaaacagtcactctgtcacccaggctaaatgcagaaatgcagtggcacaatcatggctcactgcagccttaacctcccaggcttaagcaattctgcagcctcagcctcctgaatagttgggactgcaggcatgtaccaccatgcctagctaattttttttttttttttttgagatggagtctcgctctgtcacccagactggagtggagtgatgggatcttggttcactgcaacctccgcctcccaggtttaaatgattctcctgcctcagtctccagagtagctgggattataggcgtctgctaccacacccggctaatttttgtatttttagtagaaacggggttttgccatgttggccaggcttgtctcaaactcctgaccatgggtgatccacccgccttggcctcccaaagtgctgggattacaggtgtgagccactgcgcctggccgccagctaattttttatttatttatttatttatttatttttttttttagacggagtctcactctgttgcccagactggagtgcagtggtgcaatctcggctcactgcaacctctacctgctgtattcaagtgattctcctgcctcagtctcctgagtagctgagattacaggtgcccaccaccacgcctggctaatttttgtatttttagtagagagaggtttcaccattttggccaggctgatctcgaactcctgacctcaagtgatccgtcctcctcagcctcccaaagtcctgagattacaggcgtaagccactgtgcccagcctaattttttatttctttatagagacagggtctacaaagaccagcccaggctggtctcaaactcctggacacaagtgatcctaccgcctcagcctctcaaagtgctgggattataggcaacaacataaatttattttctcacaattctggagcctagatgtctgagttaaaggtcttggcagggttggttttctctgaagcctcttctcttggcttacagatggctgtcttcctcctgtgtcttcatctggtcttctgtctataatatatttttccttaagctaattagttgtggttatggcaatggtatttgatacagtatcactagaaggttgagaacctcaccttggttctcagtctgagcagcatcttgccattttatcttttaatgtaaatagcagcctgttacgttattagacaagtctcatattgtaatttttttcttatttgtgctgttgaaagagcatctctttctttaggtttagttcttaatctaacattgttgatgtgttttgttttctcctggaccgtaatgctgttattttttttcagatagtgttatgaccactgtacaagcattaactcatgtaatccttatggtggtccattaaatagttacaataattattcccattttagagaaaaggaaactactgctcaaagtggttaagtaacttacctcaaaccacctggctaggaagtagtggtaccaggatttgaaactaagcagtttagctccagagccctgctcttaacactttggtaactactactttcttgtagtatctgtcaaaaacaggtactcgtattaagtgactcaaaatactttctacttaggccaagtgcctgtattttcccagagtggaacatgccatttagtatgtattataactttctccactactttgtaatggtgtgcttaaaatataattcagatatttttaaatctggctcaatttcttaagtaattgtttataaaataactagtatatctttgagatcttaaaagacctttaggtatcaaaagaaaaaatagataaattgggctacatcaaaattttaaacttttgtgcacgaaagaatacaatcagcaaagtgaaaaggcaacccacagaatgagagaaaatatttgcaaatcatatatctgcttaggggttaatatccaaaatgtataaaaactgctacaactcaacaacaaaaaaacaacccaatttaaaaatgagcaaagaaatagaatagacagaggctggacgcagtggctgatgcctgtaatcccagcaatttgggaggctgacgcgggtggatcacctgaggttgggagttcgagaccagcctgaccaatgtggagaaaccctctccctactaaaaatacaaaattagctgggcatggtggcgaatgcctgtaatcgcagctactcgggagactgaggcaggagactcgcttgagcccgggaggcagaggttgcggtgagctgagatcatgccattgcacctccatcctgggcaacaagagcgaaacttcatctcaaaaaagaaagagagaaagaaagaaatagaatagacactgttctaaagaagattcacaaatgaccagtaagcacatgaaaatatactcaaatgtcactaatcattaggaaaatccaaatcagaactacagtgagttacaagatactgccttacacccgttagtgtggctactgaaaaacaaacaaaccaacaacaagaacaaaaacccagaaaataacaagtattgacaacaatgtggagaaattcaaatccttgtgcactattggttggaatgtaaaatagtacagctgctatggaaaacagtatggcagttcctcaaaaaattaaaaatagaattaccatatgatccagcaaacctgcctctgggtatatatccaaaagattggaaagcagagtctcaaagaaatatttgtacatgcatgttcatagcatgattcatagtagccaaaaggtagaagcaagccaagtacctgttgatagatgaatgggggaaacaaaatgtgatctatacatacagtggaatattattcagccaaatatgaaggacattctgacacatgctacaacatggatgaaccttgagaacattatgctaagtgaaataaaccagtcacaaaagggcaatactctatggttccacttacatgagatatttagaatagtcaacacatgtagggacagaaagtagatggatagttgtcaggggctggggtaagtggagagtggggagttaatgtttattaagtacagagtttcagtattacaagatgaaatagttctgtggatacatagtggtgatggtagcacaacaatgtgaatgtacttactgacactgaactatacacttaaaaatgattaagccagggatagtggctcatgcctttaatcctaccactttgggatgctgagacaggagttagcaagaccctgtctctacagactaataaaaaattagctgggcatggtggctggtatatacctatagtcccagctactggggaggctgaggtgggaggatcacttgaacctaggagtttgaggctatagtgagccatgattgcaccactgtactccagcctaggtgacagagcaagatccccctctcttaaaaaaaaaaaaaagaaaaatgattaagataaattttatattatgtgtatcttgccaattaaaaaaaattttgaggctgggtgcggtggctcacgcttataatcccaacactttgggaggccaaggtgggcggatcatgaggtcaggaaatcaagaccatcctggctaacacagtgaaacctcgtctctactaaaaatacaacaagttggctgggcatggtggcacgcacctgtagtcccagctacttgagaggctgaggcaggagcaccgcttgaacctgggaggtggaggttgcagtgagctgagattgcgccactgcactccagcctgggtgacagagtgagactctgtctcaatttttttttttttaatatagcagtgaatttataaaagacttgtagccatttaaattttcaaacaggctgggtgcggtggctcacgcctgtaatgccagcactttgggaggctgaggcgagcagatcacctgaggtcaggagtttgagaccagcctggccaatatggtgaaaccccatctctactaaaaatacaaaaattagctgggcatggtggtacatgcctgtaatcccagctagttgggagggtgaggcaggaggatcacttgaacctgggaggtggaggttgcagtgagctgagaccgtgccattgcactccaccctggacaacaagagtgaaactccatctcaaaaaataaataaacaaataaatacattttcaaacaaacggaattacctagaagtacgtcacttaacttttctttattcctttttttttttttgatgtgttctagcatccatgagtatgttttctgatttcctgcagtcttttctgaagcactcttcgagtacagtttttgatcttgtggaagagtatgaaaacatctgtggtagtcaggtaagctaatttcactccgtcgttagtcaaacttcagtatttttagttttcataaacagcattaacctaattttcatagtgtttaagggaggtgtcttaggggaacagtggcaggagtggagggaaagtcaactagagcatccctgcgtcttacatattgagggcccatacaagatttctttgggagaaaaaaggattctgctgctttaaaaaaggaaaatccagccagatgcaatggctcacacctgtaatcccaatgctttgggaggccaaagcagaaggatcacttaaacccagcagttcaagaccagcctgggcaacatgggaaggccttgtctctacaagaaatacatttgccaagcatggtgctatgtacctgtgattctagctccttgggaggctcaggtgggaggattgcatgagccgcagagtttgaggctacagtgagccatggtcacaccactgcactccagccagggtgacagagtagaccctgtctgaaggaaaatctaaaatatacgaggaatatttagaactcaacaataagaaatgagggtggggggagggagagcatcaggaagaatggctaatgtatgctgggtttaatacctagttgatggattgacagatacagcaaaccaccatggcacacctttacctgtgtaacaaacctgcacatcctgcacatttatcctggaacttaaacaaaataaaactcaacaataagaaaatgaacaatctagttaaaaaatgaacaaaagatgggaacaggcacctcaccaaagaagatatacagatggcaaataagcatataaaaaatgctttggccagacgtggtgactcatgcctgtaatcctagcactttgggaggccgaggtgggtggatcactgcaggtcaggagttcgagaccagcctggccaacattgtgaaaccctgtctctactaaaatacaaaattagccaggtgtggtggtgggcacctgtaatcccagctacttaggagcctgaggcaggagaatcgcttgaacctgggaggcggaagttgcagtgaaccaagattgagccactgcactccagcccgggcgatagagtgagactccatctcaaaaaaaaaaaaaagaaagaaaagatgtttcacattgtatgtcattagagaattgcaaattaaaataatgagatactacaacatacctattagaatgatgaagatccaggccagtgctgtggctcctgccagtaatcccaacactttgggaggctgaggcaggaggatcacttgaggccaggagttcaagaccagcctgggcagcatagcaaaaccccatctctgcaaaaacaaacaaaaaaagaaatagaatgatgaagatccaaaagacaccaccaaatgctggagaggatgtggagcaacaggaactatcattcattgctggtggaaatgcaaacaactatagctactttggaagacagtctgcagtttcatacaaaactaaacatactattgtcatatgatccagcaaactcattccttgatatttacccaggtgagttgaaaactgtatacacaaaaacctacacagacgtttattacagttttattcgtaacaacttgaaagcaaccaagatatccttcagtgggcgaatgaataaactggtacatctgagcagtgaaacattattcaatgctgaaaagaaactggctatcaagccatgaaaaaacatggaggaaccttaaatgcatattgctaagtgaaagaagccaatttgaaaaggctacatattatatgattacaactatatgacattctggaaaaggcaaaacttggaaacagtgacaagatcatcagttgccaggagttagttgcgagggagcaatgaataggtagaacacaggatttttaaggcagtgaaaccactctttatgctataatgggggacacatgtcagtatacatttatcataattcatggaatgtacaccaccaagaatgaatcctaatgtaaactatggactttgggggataatgatgtgtcaatataagttcctcagttgtaacagatataccattctagtgttagatattgatggtgagggaggctgggattgtgtgggggaagagatatttgggtactctgctttctgccccattttgctgggaatttaaagctaggccaggcacagtggctcatacctgtaatctcagcactttgggaggccaagacaggtagattaccttaggtcaggagttcaacaccagcctggccaatatggtgaaacctcatctgtactaaaaatgcaaaaaaattagtggagtgtggtggtgggcacctgtaatcccagctactcgggaggctgaggtgggagaatcgcttgaacccgggaggcagaggttgcagcgagctgagattctgccactgcactccatcctaggcaacagagtgagactcctccgtctcaaaataaaataaaataaaactacactaaagaagtctatttttagaaagaggaaaagacttcaagaaaatactgcattcagtaataattgaaataatagtaatagacaactttttatcatttaatgtttcaataattgacctctgaattgttctattataaatgcagtagcttcattaaataacacttagtgaatcactggagtcaggattccagctgagaatgtaatgaatgaagtacagataacacttttatgaagtactagtcttaagacagtagtaacattactttgtgaatacttattaaggggtgggaaaacccattgtggtgttctgaatgagagcagtcttcttccttaattcatcttgacaagataatgaggtactgttagtaacctttgagaaagattttctttaccctgggtcgttaaacctcctgataaacaattgtgtgtatgtttctagggggaccattcatgccttttattagatttttacatgtgcctcagtcctgaaaaggtgtttttgtttttgtttttgtttttttctccccagagtctcactctgtcgccccagctggagtacagtggcaggatccctgctcactgcaacctctgcctcctgggttcaagtgattctcctgccttagcctcctgagtagctgggattataggcacacaccaccatgcctggctaattttttatatttttagtagagatggggtttcaccatgttggccaggctggtctcaaactcctgacctcaagcaatccacctgtctcggcctcccaaagtgctgggattacaagcgtgagtcaccacgcccagcctctgaaaaggtttaagaccactattttggaatgaggaaggactttggtgatgttttgtttagaaatgataatgtttttggtgccaatcttaggaaaatatctttcttgattagttacctgatataaattttcaaacacaattttaagataactttttaaattttaattgctaaaatgttggcttatgttatgatttttccaggtataggtttgatttaacttatcctctgggtagatatacagggagaaaaaaatatatccatcactgccactgttggatctgaaatcaagagtatgttagacttatatatatactcagataaacacaccttgttccaaattagatccatttctagtgggaacattacattacatttaatttaaaaagacaaaatagagaaggcaattttataatatatacttattaaatacaattattttagcactctattcaaatacaaacttatcagtgactcaaaattgtagaaaattaacctctttacatctgtgttttttattcaggtgaatatactgagtaaaatagtgagtcgagcaacacctggacttcaaaaattttcaaaaacagccagtatgctctggcttcttcaacaggagatggtcacatggaggctgctggcttctttgtataggtaatggcgtctagaattcataagtgaaataaacataaggtaataaaccaacaggcaaattaatttaaaagttagggtaggtcgtgcttggaaataggttttgctatttttgatgcttatcatttcgaataccttagttgtcaagagtgagtcaagagggaagaggaagatatcagatcataaggctggtagttaccaaaattggatgtgtgtaaagacttaaggaaagtactaaaaatagtgcaatacttaggctaaattaagaaaagagctgaaagttagacttcatgtaatatggaagtttgaaagaagttaaccaaattttccagaaggcgaagattataccatgtacatatccttgaatctaggaattttatgcctagaaatttaacctaagaaaataatgagaaatatatacaaccacatatgaataaaacttttaaatctcaaaaaattaaaaactactactaaggaattggctaaatgaattacagcagctctgttagaaccagaataacttgcagccattttaaattagcacttgtgggctgggcacagtggctcatgcctgtaatcccagtactttgggaggccaaggtgggtggatcacttgaggtcaggagttcaaaaccagcctggccaacacagtagaacgctgtctctactaaaaatacaaaaattagccaggcgtggtggtgggcacctataatcccagctacttgggaggctgaggcaggagaatcgcttgaacctcggaggcagaggttgcgagccgagattgtgctactgcactccagcctgggtgacagagtgagactccatctcaaaaaaaaaataataatttaaataaataaataaataaccatttgtgtatattcattgacatggaaagatattcatgacatattgttatatgaaaactggatttcatattaatatataaatgatgtcccctctgccatttgttttgtttttgaaaaagagtctcactctgttgctcaggttgagtgcagtggcacaaccttggctcgctgcaacctccgcctctgaggttcaagggattctcctgcctcagcctcctgagtagctggtattacagatgctggccaccatgcctagctaatttttgtatttttattttatttttatttttgagatggaatctcgctctgttgcccaggctggaatgcagtggtgtgatctcggctcactgcaacctccgcctcccaggtttaagcgattctcctgtctcagcctcccgagtagctgggattagaggcgcatgccaacacgcttggctaatttttatatttttagtagagacagggttttgccatgttggccatgctggtctcaaactcctgacctcaagtgatccacccacctcggcctcccaaagtgctaggattataggcgagagccaccgtacctggcctaatttttatatttttagtagagacagggtttcactatgttggccaggctggtctcgaacacccgacctcaggtgatccacccacctcagcctcccaaaatgctgagattacaagcgtgacccaccgtgccctgcctaactttttttatttttagtagagacggggtttcactctgttgttcgccaggctggtcttaaactcctgacctcaagtgatctgcctgtctcagcctcccaaagtgctgggattacaggtatgagccagtgtgcccggcctgttgtcccatttttgtttacaaaaatacagatatacatatttgaaaaaataaataataaaaaatttttaaaaagaagttagccaaattttccttctctcagatgctcagtggcaagttcattatattcgtgtgaaataaggcttttttattttgtcttatttttccccagagacagaatacagtctgcattagaagaggaaagtgtattcgcagttactgtaagttttatattaattttttcttttataaatacatacaaattaaaatgttactaataggattttttttttttttgagttggagtttcgctcttgttgcccaggctggagggcaatggcgtgatctcggctcactgcaacctctgcctcccgggttcaagtgattctcctacctcagcttcctgagtagctgggattacaggcgtgccccaccacgcccagctaattttttgtatttttaatagcaaacggggtttcatcatgttggccaagctggtctcgaacttctgacctcaggtgatccacccaccttggccgcccaaagtggtgggattacaggcatgagccactgcgcccagccaggattttattttcagccttccatcttgagtttcttcattttaaaaattttacaagtaaataaaaagttcagtctcataaaataatcaaatattgatttatattagagagttagaggtaaaagtccctttttatcccactgactatttagtgtaacagttttggtatgtatcctaccagacatttttctatgcatctttatagatacatacatatatataaacatacactcacatacttgtatacacacacacatttgttttttaacatataatatgatttcatttatacattatactgagagtttgtttgttttttttttttgaaatgaagtttcactctgtcacccaggttggagtgcagtggcacgatcatggctcactgcaacctccgcctcctgggttcaagtgatacttctgcctcagcctcccgagtagctgggactacaggcttgtgccaccacgcctggctaatttttgtgtttttagtaaagatagggtttcactgtattgaccaggctggtctcgatctcctgaccttgtgatccgcccacctcagcctcccacagtgctgggattacaggtgtgagccactgtgcccggcttatactgagagttttaaaattattatttcttagattttttaaaatttatgtaggtttttaccatattttttcatagtatgtcagagtataaatgtactgtaattttttgagacattcagccggacatatttaggttgttactggtatttttgctgtagccattaataatgcagtaaatagtttggtgtagaggcacatgcctgtggtcccagcaacttgtcaggctaaggccagaggatcacttgagcccaggagttcaaggctacggtgagctacaaccatactactgcactctagcctgggcaacagagtgagatcccgtttctaaaaaataaaaaaaaagtgcagtgaatgtttttcttcatacatatatatgtgtgtgagagaaattctggacaagtaaacaccattcttttgcccttaggattcaatgctgtcttctacagcctccaggcctgggatcctgaaaggaccttgggtggtaaaactggccttggctggattgagggtttggggaagaaacatgcaaatagcctcagatgttttttaaatgcagcaagtaacatttctggatgagacttatttccaaaataaaccagctatatctgttttgaaaaaatatgtacacatatatgcctgttaaatcatcaagatcagatgcctttttggggtttaacttctttatattttctgtttttaaaagtaattcttttttttttttaagagatagggtcttgctctattgcccaggctggagtgcagtggcgtgatctcagctcactccaacctccacctcccgggttcaagcgattctcatgcctcagcctccctagtagctgggattacaggcatgcaccaccacacccggctaatttttgtacttttagtagagacagggttttaaccatgttgtccaggctggtcttgaactcctagcttcaagtgatccacctgttttggcctcccaaagtgctgagattacagacgtgagccaccgtgcctcgcccaaaagtaattcatatttgaagcaagtatatatagttaaaaaaggagataatgtatatttataataaatattttatgtatatctgttagactgcttttttttttcttttgtttctttttcttttttggggggtggccagcacggcggggacatggtctcactttgtctcacaggccagagtgcagtggcatgatcatagttcactgcagcctcgaactcttgggctcaagtgagcctcctgcctcagcctcccaagtagcgaggactacaggtgtgtaccaccatgcctggctaatttcttttttatattttatagagatggggtgtcttactatgttgcccaggctggtctcaaactccaaggctactttttcacttaaaatattttttaatatctttccaatcttttaatttgtttatcccacaaatacttcattccaaatgcacatgtaggaagactgtcatatttggctatttattgagctcacttactagttttaataggtttcctctggttttccaggcaattctgttatctacaagtagtgatgactttgactgtttttccatactttttgctaacttaattcttttcctggttttattatgttagttagacttttcaaagtaaagttgaataataatgaactcttactcctcatcttctggattttaaagggagtatctcactttacagttaagtatagtcagccgaaattccttatatgtgggttccacatccatgaatttaaccaactgcagatcaaaagtattctttaaaaaaaaaaaaaaaaaaaagaatcaccaagaagcagcttctctgttccttctcgaatctccgcctagctcagcctgcctgccttcactcctgcctccaccatgtccatcagagtgacccagaagtccttcaaggtgtccaactctggcccaagggccttcagtagccattcctacatgtgtgggcccagtgcctgcatcagctcctcgagcttctcccgaatgggcagcagcagtttccggggtagcctgggtggagactttggcagggccagtggtaggggaggcatcaccccagtcacggtcaaccagagcctgctgagcccccttaacctggaggtggaccccaacatccaagctgtgtgcacccaggtgaaggagcagatcaagaccctcaacaacaagtttgcctccttcattgacaaggtacagttcctgcagcagcagaacaagatgctggagaccaagtggaggcccctgcagcggcagaagacggctcagagcaacatggacaacatgttcgagagctacatcaacaaacttctgctggcagctgtacactctgggccaagagaagctgaagctggaggtggaacttgataacatgcaggggctggtggaggacttcaagaacaagtacgaggatgatatcaaaaagcatacagagatggagaatgaatttgtcctcatcaagaaggatatggatgaagcttacaagaacaaggtagagctggagtctcacctggaagggcttactgaagagatcagcttcctcaggcaactgtatgaagaggagatccgggagctgcagtcccagatctcggacacatctgtggtgctgtccattgacaacagtcgctccctggacatgaacagcatcatcgctgaggtcaaggcaccgtacgaggagatcgccaaccacaaccaggctgaggctgagagcatgagatcaaatatgaggagctgcagacgctggcttggaagcatgggatgacccgtggtgcacaaagactgagatctccaagatgaacaggaacatcagtcggctccaggatgagattgagggcctcaaaggccagagggcttccctggaggccgccatcgcagatgctgagcagcatggggagctggcagttaaggatgccaacaccaagctgtccaagctggaggtgggcgggccaagcaggacatggcacggcagctgcgggagtaccaggagctgatgaacttcaagctggccttggacatcaagatcaccacttaaaggaagctgctggaggatgaggagagccagctggagtctgggatgcagaacatgagtatccatacgaagaccaccagcggctattcaggtggtctgagctcggcctatgggggcctcataagccctggcctcagctacagcctggactccagctttggctctggtgcgggctccagttccttcagctgcaccagctccaccagggctgtgattgtgaagatcgagacccacgatggaaagctagtgtctgagtcgtctgatgtactgaccaagtgaacagccgtgacagccccttctagcctaccccttctgcggctgccccagagaggctgctgtccagaggagcacagggaacaggagacccacctgaggctcagccctagccctctgcccacccgtggggggagtttactgcctggggtaccccccttgcccatgcctacagctacaaaacaatgcaatttttttttccaaaataaaacctcagctagctctgccaactgtcaaaaaagaaaaaaaaaatggtccaggtgtggaggctcatgccggtaatcccaacactttgggaggtcaaggtggaaggctcagtttagcccagagttcaagagcagcctgggcaagatagcaagacccagtctctgcaaaaagtgacaaacttagccgggcatggtggtgcatgcctagtcccatctacatgtgaggctgagatgggaggatcgcttgtgcccaggaggtcaagaatgtagtgagctgtaattgtgctactgcactccagcctgggtgacagagcgagaccctgtctcaaataaaagatcattgggtttgtactgaatatgtgcacatgtttttaatctttattccctaagtgatataatataacaactatttacatatgtagcatttacattatattagatattatacataatctagagatgattttgttgttgttgttgttcattatttttttatcacagccaggtccaatagagatgatttaaaatatactacagcattttggctggatgaggtggctcatgcctgcgatcccagcactttgggaggccgaggcaggtagactgcttgaggccaggaatttgaaatcagcctggccaacatggtgaaacccgtctctactaaaaatacaaaaattacccaggtgtggtggcaggcacctcccttcttcttgggaggctgaggcatgagaatcacttgagcccaggaggcagaggttgcaatgagctgagatcaggcccactgcactccagcctggatgacagagtaagactctgtctcaaaaaataaataaataattaaataaaatatactacaacattttatataagggccttgaacatccacagattttggtatccacgaggggtcctggagccaatcccccatggataccaagggacgactatatgtttgctagaggtttcagttagtctaacttatgaggatatatatattttttacatcaaaatggcaaggtaaaatttatgaagatatttttatgaaatattctggtacctgtcaagaagtccatgtagcttttctcctttaacccatggataaaatggattaattaattaatttgacccattcttgaactggtcacaatatattatccttttaatatactgcttagtattacttgctaatatttgtattaaattgtcttttaaagtcagttgtaagagccttggattgctcttagcttttattacttatcaacttctatatagactataaaggattttaacgtttttaaatgtttagtttctaacatgtaacagggctgtattcagccctgtattacagtttttttttttttattttgggatggagtctcactctgtcacccaggctggagtgcagtggcgtgatctcagctcactgcaacctctgcctcgtgggttcaagtgattctcgtgccttagcctccgagtagctgggattacaggcttgcgtcaccacgcccagctaatttttgtatttttagtagagatgtggattcaccattttggccagactggtctcgaactcctgacctcaagtgatctgcctgcctcggcctcccaaagtgctgggattacaggtgtgagccaccatgcctggcctattaaagttttttgtttgttttattttgtgtttatttttccccaaaacaccatctctgggaaaatggaattttaaatttcaagtgtaaagaatcaatataccaggtaagagcagctacaattgatgtagcagtttggaatttacacaatagatacctttcaatgatgaatatacagatttactatgtggtaaaatgtttatgtatagatgattaactgtacttgtttcatactggctttttatctttctattaaaataatatttcttaacagcatcttcttttcattctgtttatccttttaatatttttcataataggctgttaatgccagtgaaaaaacagttgtggaagcgttatttcagagggattcacttgttcgacaaagtcaggtatgactagaatttaaaatttttttttatgaaacatggagaaaaggttaatgacatgcaaagtactgaagtgttttttaacttaaaactgttttctgaattttttttctacttgatctttttatttgcaattaaaaggaattagaaaccttattctttgatttttaagtaatagccctagtattttcaggaatagcctgttaaaaacgattattcctatagaaaattttattcttttgccataatatttatttatcttaaagtaaaaatagtgtttggaaaaattgttacttgatatttttaaaatcagaaacttcacgcctgtaatcccagcactttgggaggccagggcaggcagatctcgaggtcaggagatcgagaccatctggctaacagtgaaaccccgtctctactaaaaataaaaaaaaaattagctgggtgtggtggtgggcgcctgtagtcccagctacttgggaggctgaggcaggagaatgacgtgaacccaggaggcagagcttgcagtgagccgagattatgccactgcactccagcctgcacgacagagtgagactctttctcaaaaaaaaaaataaaaaatctgaaactgtttgaattaagggtagtagtaccactacaaataaaacacaaatagatttggtagttaacactaatttatttttttctttctttcttagctggtggtagattggttagagagtattgccaaagatgaaattggagaattttctgataatattgagttttatgcaaaatcagtatattggtaagttaccaaactttaattcttaaggtcactcaatgttgatattgttcattcatctttcaataagtattattcagtttttactttgttcacactactttgttcacactactttgtttggtgtgtgagcaaaacaaataaaggctttgcctttatggaatttataattgtttaagagagttagatagctgatttgcaaatatacagttggccctctgagtttgtgggtttcgcatccatggattgaacaaactgcagatcagaaataattggaataaaacaagccgggtgtgatggctcacgcctgtaatcccagcactttgggaggccaaggtgggggatcacgaggtcaggagttccagaccagcctgaccaacatggtaaaaccctgtctctgctaaaaatacaaaaattagccgggtttggtgacgcacacctgtaatcccagctacttgggaggctgaggcaggagaatcgctgaaatccaggaggtggaggttgcagtgagccgagttcatgccattgcactccagcctgggcgacagagcaggccgtcttaaaaaaaaaaaaaaaaaacagaaaagaaataattggaataaaacaataaaaataacaagataaaaaaagtaatacaaatttaaaaatatagtataatagttatttgcataacatttacgttgtattaggtattctaagtaatcgagatgatataaagtatatgggagaacatgtgtaggttatatacaaataatacaatattttatgtaaaggatctgagcacccttggattttggtatccaagtagggtcccctatggataccaagagacaaatgtatattctgttgggtattccgagctttggggaaaaaaatgaattagaggctcggcgctgtggttcacacctgtaatcccagcactttgggaggctgaggcgggtggatcacgaagtcaggagatcaagaccatcctggctaatgcggtaaaacccatctctactaaaaatacaaaaaattagccaggcgtggtggcgggcggatcacgaagtcaggagatcaagaccatcctggctaatgcggtgaaacccatctctactaaaaatacaaaaaattagccaggcgtggtggcgggcgcctgtagtcccagctacttgggaggctgaggcaggagaatcgcttgaacccaggaggcagaggttgcagtgagccgagattgcgccactgcactccagcctgggtgacagagtgagaccctgtctcaaaaaataaataaataaataaaataaaagtaactcagaagggagattgtttttaaagtaggagatcctgaattctgtatttaaatactgatatgacaggagcttgaacctgggaggcagagcttgcagtgagccaagatcgctccactgcactccagcctgggtgacagagcgagactccacctcaaaaaaaaaaaaaaggattagaattaatggatagatacgacagggagtcctactttaaattgaagagaaggcttttctaaggtagtaagagacttttatgaaataaaggcagccagccatgcaaaaatctgggggataactattctgagcaggaaaacaaactggaatgacccagagaacgtaaagtgtttgcacaaagaagccagtgggaacacagcaaggaaaagaatggtagaaaacaagactggaggaagccagatatagggcttttacaggcagacaaatgtaactattctggactttattctaaatgtgatgggaaaccttgagaatagaagaatgacatggtccaatttatgttttcaaacaatcacctgcctgcttttttcttaataagattattgatcatatcagaagatgatcttctgattgtcaagaagacacttctgtcctgttttcagctacttgtgtgggtttgttttgttttgtcttgcttttgcttacactcttcagtacttctaaattattataggcccttgaagccagaaacctcccctaagttaaagggacagtttattttaagtcttgcaaaagatttttaaaaggtcagattgtggctgggcatggtttaagacttgcaaaagatttttaaaaggtcagattgcgggcaggtacagtggctcacacctgtaatcctagcactttgggaggccaaggcaggtggatcacctgagatcaggagttcaagagcagtctggccaacatggtaaaaccgcatctctactaaaaatacaaaaattagccagtcgtggtggcgggcaccagtgagccaagatcacgccattgcactccagcctgggtaaaaagagcaaaactccatctcaaaaaaaaaaaaaaaaaaaaaaaaagtcagattgccagattgcctttgaattcagtaatatgtgtacaaagtctgtaagtcaattatatattttctctgcttagctaggaaattactgctactaagcatttgttaaaaattaaatcttaagtggatgtgattttttttctgaaaggaagttttcattttcagaaaataagtttttttttttgttttttgttttttgttttttttttttagttaaaatgccctgttgggtttttacaatttttaatgagttaatctccttttttttgctgatcagcggaacagaacagagaaccccacaatagattcacactgatatggtcatttggttttcaacaaggacatcaaagcaatccagcagggaatggaatgccttttttacaaactgcagaaaaatgatatctatgagaaagaagattaaccttgatggctccctcactccatacccaacaattaattcaagatgtgtcatagtcctaaatgtagaagctaaaaaccataaagcttttaaagaaaagcataggaagatatcctagtaacttgagaatagatagatgtatcttagctcatagaaagcaataatcaggcaaaaaaattggtttgactttatcaaaattaaaaatgtatcattaaaaaaacaccattggccagacatggtggctcacacctgtaatcctagcactttgggaggctgaggcagaaggattacttgaggccgggagttcaagaccagccaggggaacacagtgagacccccatctctacaaaaatattaaaatgttagcagggcatggtggcgcgtgtctgtagtcccagctactcaggagactgaaatgggaggatcacttgagtccgggaggtcgaggctgcagtgagtcatgattgtgccactgcactttagcctcggcaacagagcgagaccctgtctccaaaaaaaaaaaaaaaaaacccaccattaagaaaataaatgggagcaagccacagactgggatgtgtagttcataaagaactataactcaatagtagaaagataatcctagtaaaaagggcaaaaatttgaactgatacatcacgaaaccagatagatgaatggccaataaggacatgaaaaagccctcaacaccattagtcatctgagctaaaatgtacttctgtattaaggatttttgcatgtttttactgggattgtagtctgtctttcttcctttgacttgatttgattttttaaaaatagacctattaaaattacctcttaaaaaatttggtacttattatttctttcagggaaaatactctgcataccttaaaacaacggcagctgacttcttacgttggaagtgttcgtccgcttgtcactgaattggtaaatgttctttgaaatgaaagttgccttcaaagttaactgattttttttttcaggctgagaattttttctcgtggatctttgttttgctcttctaaaggtttgcacacactaacattttactctaaaacaactaagttgcattggaatctgatggaatatattgaaacatatccgtgacctttgaattgtaagtaataagttgtggaaagtatacttaacttgacagcattaaaaacaaattaattttggtcttatcttaagatttgactgcctatataaggtagtgactgacctatgaaagctcttttatgttgaaagcaagtgaaaaaaaactaaagccttattggtttgaggttagaacggttatttgaaaagtggatttgaaaagaactgaagctgaattattctaaaaacaaaggaatgaagctttatgacagggcacgtgaaatgtttatagtgaaaagagagaaataagtaacaattgaaaaaaacttctagaattccatttagtaacaaagaggtttttgatgaaaattgtttgggaaaaagaaaaagaaaattgtttggaaactactcttaacagcttaaaattgattatagctaaattacattgtagcaggcaacagctgaaaatcgtttaatcttaccagctggaaagtggtgatttccttttgccagaaagagaccatgttccaaaattgaattatgtgtttgcaaaatatttatgaaagtagtgaattgatctattatgtattccattttctgaattgatattcatattaccatacactaagtaacatgtggagtaagaattacttcctttcttgagtcacattaaaattgttttccattggaaatccatcatgtagatcatgtgtgctgtttgctgctaaagtgagaacaatatattatcctaaatgcttagaagcacatggaaaaaaggtaggtagaaataactgttttgggagatttgtacttatttattagaaatctgtttaaatttttttattaggcattggtgttttttatgtggcattaatcccaaaataggtcttaataggccctcttcccatatgttctcaaaaagtaccaggtaagcactttgtagtcacagaacagaaggtttttgctttgtgttcttcttccatctaggtctaattctatttaaacttgaccatgtagctgctgtgatagagtgaaactcaagtcatcttctagtgttacctgggctgggataggctagtagtatttctgccttgcctgactgaggcatgccctttgtgggccaactgagtatgttttaagtagggaagcagatgactatgtggctatttggaacacttgtaatcttgtgagagcttcattccctttgttacttaattaaattgaaacaatttatttcagccaggcgcagtggttcacgcctgtaatcccagcactttgggtggccgaggtgggtggatcatgaggtcaggagttcgagaccaatctggtcaacgtggtgaaaccccgtctctactaaaaatacaaaaattagctgggcgtggtggcgtgcacctataatcccagctgctcgggaggccgaggcaggagaattgcttgaacagaggagatggaggttgtggtgtgctgagatcgcgccactgcactccagcctgggcgacagaacaagactccgtctcggaaaagaaaaaagaaaaaatgaatttatttgtgtataaactcaggataggtttatcatctcttgatgatgtgtaaaatgtatgtaagtacaaaggatttatggttgatgatgacttttttttcttcttacaggaccctgatgctcccataagacagaaaatgccccttgatgatctggatagagaagatgaagttagattactcaaatatctctttactctaatccgtgctggaatgacagaagaggtcagtcatgtatacccttcttgtctaatttcaaaaagtcatagactctttgagttggaagagatttttgtggctgcctagtaagccttcttaatgtagtaattccattcatggtatttctagatctaacttcctgttcgaacatttccggtgataaggcacatgtaacttgagaaaacaatgtaatctagtttgtacaactctaattaatagaaaattatttataacaagtcatacttttcttccccatattgcactgcatactctaggtatatccccattatttatttttttgttccgtttgagatttttgtttttgtttttgttttttttttgagacagtgtcttgccatgttgcccagcgtaatctcaaacttctggccttaagtgatcctcccgccttggccttaaaaagtgctgggattacaggcatgagacactgcacctggcccaatctccattcatttttttttcctttttctttctttctttctttctttctttctttttttttttgagatgggatctcactgtcgcctagactggaatgcagtgatataatcatggcccactgcagtccttacctcccgggctcaagccctgcctcagcctcctgagtaactgggactacaggtacacgccactatgcccaactaacatttttattttttgtacagacggagtcttactatgttgtccaggctgatcgtgaacacctgggctcaagtgatcttcctgcattggcctcccaaagtgctgggattgcaggcatgagccactgcacctgacccaatcttcattatttctaattctgatttttcagagtttagaataaacctaaccctaattctaggtgatactatttaggcacttgaaggctacaatggccctcaaacttcttccttttaaccttaccttttaaaaatgtgggtgatagttaatatcttatatgtagaatgataagtatctaattggacagtttaccagatgcctctttaggtgagatagtgtgatgtgtaggagtttggcttcagtattatgttgtacttggtttacagtactttttgcaatggtctttagacagattctatgtcagttcaaagtgttgtttgttttcttctgtgctatcaaccataagcatatattaatttcttatgtaatttctttttttttttgagatggagtctcgctctgtcacccaggctggagtgcagtggcgcgatctcggctcactgcaacctccgcctcccaggttcaagcaattctcctgcctcagcctcccaagtagcttggaatacaggcacacgcctccacgcctggctaattttttgcattttagtaaagacgtggtttcaccgtgttgcccaggctggtctcaaactcctgagctcaggcagtccgcctacctcagcctcccaaagtgctaggattacaggcgtgagccaccacacccggccatgggatttattttaaaaaacaaaaatacaatcatattattgaaggctcaaaaaatagaaattctcaaggtctcactagctttataaaaccacagatagtgagtgttttgtatttacttatagccctttttctttggtcttcctttttaaggtagttgcagtcatactatacattcaagttttttccctcttttttaatagcaatttgagataaaatttacataccatgtaattcacccatttcaagtgacaccattcaatggttttggtatattacattattgattttgtgaatcgtataatatatattattatattatataacaaaatgtgccattttaatcatttaagtgtgcacttcatggcattcattacattaacagtattgggaaaccatcaccactgtctgtttctaaaactttttcatcaacccaaatacaaactgtaaccattatatgcagtaacgcctcattctcttcttccctcagcccctgtaacctctaatctacttactgtctctatgatgtataggtagaatcatacaatgtgcttttgtgactatcttatttcacttagcataatgttttcaacattctatattgagtttttatcctgcctttttaagataccatatcaaaatagttttccatgttaattcttacatagctctcatagattttaaaggctataagttcagaatgatgttaggggtatgatattctttaactagttgtatcaatcaggctttctgggttcaagtgatagaaacccaacctaagttactttatgcttacaagaggagaattgattggctcatggaagtgggaagtatagaaggtatatctggctttcagcaggatccaggaactccaaagatatcactaggatactgtctgtgtccaagacccatagctcaaccctcctctctgtgccttcattcccagaaagctactccccatgttgtatcagagatggatacaagaagctccaagcttacatggagctagcaatctcagtaaaaggagtatattttctttcccagtatctccaccaagagtcctggtggtgaatcttgttagctcacatccctaaccttagatttctggaatcggatcaggcctatccaaaacacaggagccaagaatggggaaaaggtgattccctaaagggatgatggaacaaaaacatgtatttaccttactggtatataaacacattgacttactgacttattggtcaagttgaacatgcagtatcatcagtggagtaaatgagcagtaacaaccttgtcattagagactgtttttttaatagtttttcataaatcagaggtcatcaacctctttaaccccatttgtttctagcagaattaaatgccagtgggtgccgtgggaacgtattgttaagcctaaagtcaaacagaaaagggattttttagaaataaaaacagggccaggtatggtggctcatacctgtaatcccaacacgttgggaggctgaggtaggggggatcccttcagtccagaagttcgagaccagcctgggcaatataatgagactctgtctctacaaaaaaatttaaaaaagaaagaaaaataaaggcagaggccacagaaaggcatgcatatgttttaaaaatagaatgccattatgtatgtatgtatgtatgtatgtatgtatgtatgtatgtatgtatttatttagtttttgagacagggtctcactctgtcatccaggctggagtgcagtggcgcaatttcggctcactgcaacctctgcctcctgggttcaagcgatgcacctgcctcagcctcccgagtagctgggattacaggtgcctgccactgcgcctggctagttttcctgtttttagtagagatggggtttcaccatgttggccaggctgatctggaactcctgacctcaggtgatgcacttgccttggcctcccaaagtgttgggattacaggcgtgagccaccacgcccagccagaattccattattaactgtctacatccatcccttgtaatgggatggatggaacatttgttccataagttatctaagcttgtcatatattggttatactttactataaagcaccctggttattggactgactgctctttcttgttttctaaggcacaacgactctgtaaacgctgtggtcaagcatggagagctgcaacacttgaaggctggaaactgtaccatgaccctaatgttaatggaggtattttagtagattttattctgacagttgaggacaaaggcatttcgctctaaatgccaatctttgtgaactatagcttctctttttagaaagaattgtaataaggtcttattttaaaccagaaattttcttttgctattttataggaacagaattagaacctgttgaagggaatccatatagacgcatttggaaaataagttgctggagaatggcagaagatgtaagataaataaaatattcagtgatactgtttttaactcc

SEQ ID NO: 105 - DNA, 31160 bp, Homo sapiens
  source 1..31160: mol_type = other DNA
cgttgcgcctgcgcgcggtgcggccgtcgcccctcttttcgcggcgttctccacctgcgcgggcctgaatggccttcaggagcacagtcggcctgaggagttgacggttactcaccgccgtgagcccaagtaactcgccctccttcggctagaaaccctccgcctgggcccgcgcgacaggagcgcggtctctgaggggagcggcgaccccgccagccccggtctctttccctggcggcggcggcttcttccgtgggacaatatgttcaagagaatggccgaatttgggcctgactccggcgggagagtaaaggtcagtgcccggaccgcccctcttccggggtggctctcccgcctcggttcctccctgcgcggcgcggggagggcccactgggtttcctttcgcgccttttctcctcgggtttgaaccgtggtttcaggttggagagcgagtcagagccattgagcgaaaaaccggcgttcattgggccccaacttcctcgcgtcactgccaactcccacccccgccaaaaaacaaacagataaatggtggcttggggaaacccggacgtggctgccaaggaaacgggcgactccgagggctgggaaagctcagcttggtgcacattcgctgccaatctaggttattggtgaagcggtgacgccaccctcctggtgtgaggataacaataactgtagcaaacagtcgctgagcgcttacccgcagtatttccaagtgcggtaactgagacaccgaggcatacgaaagctaagaaaatttgctggagttcatggtgttcacaaagcctcaaagcaagagcataacactgtgcctggcacatggggaacattcagtaaatgtcaacttcttttgtttttgatgaaattaccatagaccctagcgtaatgtttgacattgtaatatttatttccctcacacagcccctggcacgttaatttttttttttttttgagacgaagtgtctgtcttgttgcccaggctggagcgcaatggcacgatctcggctcactgcaacctcggcctcccaaagtgctgggattacaggcgtgagccaccgcgcccagccgtggttcattctttttaaagaaaaatttcctttcctttataaataaaaatcagaaggggtacaaatagttgtttttatcaggagccagtgggtcctgccttaaaaattaacgtgcagggccgggcaaggtggctcacgcctgtaatcccagcactttggaaggccgaggagggtggatcacctgagatcagaagttcaagaccaggctggtcaacatggtgaaaccccgtctctactaaatatacaaaaattagccgggcgtggtggcgggcacctgtaatcccagctactagaggggctgaggcaggaaaatcgcttgaacccgagaggcggaagttgcagtgagctgagatcgtgccactgcactctagcctgggcgacagagcaagacaatgtttctttaaaaaaaaaatagcaataattagtaggttttaaaatacttatgtgtgtgtgtgtgtgtgtgtgtgtgtgttttgttttgtttttttttgagacggagttttgctcttgttgcccaggctggagtgcactagcgcaatctcggctctccgcaacctccacctcctggattcaagcgattctcctgcctccaagcgattctcctgcctcagcctcctgaatagctggaattacaggcatgcgccaccatgcccagctaattttgtatttttagtagagacgggggcttctccgtgttggtcaggctggtctcgaactcccgacctcgggtgatctgcccgcctcggcctcccaaagtgctgggattacaggcgtgagccaccgtgcctggccgcttttcttcatttttattgttgttggttacattcactcagcacttttcacatgtggtaaatcttgctcattgttcttcagatacatttctgtaactgagccattggtttcagattcatgtgcaacattcaatattttcacttcaattgaaattttttatctttccaacataatctgtcaatacgcactgcctttgcacttatcagatataagaaatatgtatgttaaactaaggacaaatgtagcaaacatgtcatcagccactatttaccaagcttcagtcatccaagtgactcttggccatttttgccatgtctgaattcaactgtaatatttattgtaacatttacatttaaatcagtttattttttaaaagcctctttctaagcgttaatgttttttaaattgtagggtgtttggttgtttttttttttttttttttttggagacagaggctcgctctgttgcccaggctggagtgcaatggtatgatctcggctcactgcaacctctgcctcccaggttcaagcaattctcctgcttcagcctcccaagtagctgggattacagatgcacaccaccaagcccagctaatttttgtatttttagtagaggtggggtttcaccatcttggccaggctggtcttgaacctctgacctcaggtgatccacccaccttggtgaaattgtaggttttaatttctagttacagttattactattttttaatactgattaaacacgtaagtaaaaaagtgaaaaatgtttgacctttattctacctctcacaaattactcctaatatttatactatactttgggaaacactgccacaggctaggtgataaggacattgccacaggtgatgccagtcagaattggccatttttatttcaatgcctagctttcaggtgtttaagaaaaggccttttgcatttcttttaacaacactctaaaagcgctttacatggtaatttaaataaaagcattttcaaagagggaacattgtaattattctggcgttttttgtgttaatatgaaaggatgtgtctgaaattgatttgagagaaatccatattataagcaaactatagattgttagcctgccattctttaaagcaagttttcagagctcttattctgcatatttagctaatggtacaatattcatttattttaaaattatttttcttttagggtgttactatcgttaaaccaatagtttacggtaatgttgctcggtattttggaaagaaaagagaagaagatgggcacactcatcagtggacagtatatgtgaaaccatatagaaatgaggtaggcactcgttttttctgtaactgttttacttaaagttgtctgtaatttgttttgcttaaagacaacctgtagttttttttttttttttttttttttttttgagatggagtcttgctctgtcgcccaggctggagtgcagtggcgcgatctcagctcactgcaagctccgcctcccgggttcacgccattctcctgcctcagcctcccgagtagctgggactacaggcgcccgccaccacgcccggctaattttttgtattttttggtagagacggggtttcaccatgttagccaggatggtctcaatctcctgacctcgtgatccacccgcctcggcctcccaaagtgctgggattacaggcgtgagccaccgcgcccggccgacaacctgtaattttttatagtaactttctgattataaaattggtccgttgtaggaatgttgtcaaaaagtttttgaaaaaatagagaactgtcatcttcatatgatactagaaatcaattttccaaaaatgtttcctaattaaaattaagataacaagaactatttatgctataaatacagtacaagtacatcttcctaacatcatatctaagttaacatagtatttaatcaggagtttcaggaataagcagctaatccttaaagtaataatgtggtaataagaatgtgaaagacagctctgctgtgtcatctgattgctagtaattttgtttcactgctgaatcttcaatgcctggaacatagccagtacatagtaggcatttaacagatatttattgagtgagtaaattattcctctatttaaaacccttcagagtctacccaaaaacttgcatgtgaatattgataccagtgttattcataatagccaaaaagtggaaacaattcatttgtctatcaactgatgaatggataaataaaatgtgatatatccatacaattgaatattatcaagcaataaaaagtaaagtactgataaagtaaagatgctactacatggatgaaacttgaaagcattatgctaagtaaaagaagccaaatataaaaaaggccaaatattatatgcttttatttatatgaaatgtccagaaggggcaaatccatagacaaagaaaatagataagtggttgctagtgggtgggggagaaagggtattgaggtaagtgctaatggatatggctttcttttgtgtgataaaaatgttctaaaattgtagtgattcttatgagactctgtgaatataactaaaaaccattggctaggcaaaatggctcattcctgtaatctcagcactatgggaggcccaagcgggaggatcgcttgagcccaggagtttgagaccagactggcaacatagtaagactccatctctacagaaaaaaaaggtatcattatagtaagattccagtttattttttaaataataaagttagatatgaatgtagatataagtaatttaaaaattcctaaaagtaaattaaaaagttaataaacattactattgaatgtgacttattgctttgcatttttttattcttctataatgaattatatattttaaaagccacttttgccaacagaaacccttttatttgccataactaatgaatatgcttctgtacttttaaaataaagaaaatgaggagtttttgtattcaacaatcttagattgctttaaattagttgtccttagctttatgtaatataattttttgtttgtttgagatggagtttctctcttattgccctggctggaatgcaatggtgtgatctcagcttattgcaacctccgcctcctgggtttaagtgattctcctgcctcagcctcctgagtagctgggattacaggcgccgccaccatgcttggctaattttttgtatttttagtagagatggagtttccccatgttggccaggctggtctcaaactcctgacctcaggtgatccacctgccttggcctcccaaagtgctgggattacaggcgtgagccaccgtgcccggcgtatgtgatataattttgttctttgaaattgactatagatttgccttatatttctgtaatagtaccagatatgtactgttgttttaatggaaaaaaatcaaaattgatttagaatattatctatagaggtgtattaaaacaagatttgccaaaaaaaaagttaatttgggacgtgtatttctatacattacaaatcataaaagaattcaacacaggcttcctttttgtttttttaaaaaaagcaaaataggccaggtgcggtggctcacgcctgtaattccagcacactggtagggcgaggcaggtggatcacctgaggtcaagagttcgagaccagcctggccaacatggtgaaaccccgtctctactaaaaatacaaaaaattagccaggcatggtggcagccgcctgtaatcccagctactcaggaggctgaggcaggagaattgcttgaacctgggtcagggaagttgcagtgagccaagatcatgccactgcactccagcctgggcaacaaagcgagactccatctcaggaaaaaaaaaaaaaaagcaaaataacttcccaggtgtagttcatgttttttagaaaattagattccataaaatttgaagggaagtatgttttttataaaactaagtatatacgctcagtgtattttttttcctagttttcatttgtagatcataaaactaactaattccttatattttaggatatgtcagcatatgtgaagaaaatccagtttaaattacatgaaagctatggcaatcctttaagaggtacaatatagtcttttgattcacaatatccaaagttaaaaatggctaggaaactaaaccgataatttactattttttttctgtctttagttgttactaaacctccatatgaaattactgaaacaggatggggtgaattcgaaataatcatcaaaatatttttcattgaccctaatgaaagacctgtgagtagcattaatctttgtaaatataaaatagatttcttagtaaatgtgaacatgtaataatacttaatgaatagtgttcattcagatgtgttttatgtaaatttatggcacagtgtatcttgccatgagttaagtttttcatttttaaatgtagcgcctttcaaaatccttttttttttcaagtatggaaaaaaacatataatatgaacatgtattggaaagaaaccatggaaatcagatgactactgcagcaaaaaaacttaaaactattattatcattcggttattagtaataaataagttgagcccatatgctgtgtaaaatagtttttatagtttttggtagttaaaccctaagaaacagtgtttttgcttttttaagctgtcatcagtactagcgcttcattttatatcttatttatgagtctttatttttatagccactggctttttcatcttttgatctcttcttatcagattgttgcttgataatgtaaaaaaaaaatccctccaggcttttgctttgatccttcagcaactttgttaggttgtgataccctcattttagagatcaggataccaaggctcagaggtcaagtcactgctcaaaaacactcagttaattatggtagagctagtttttgaacccagatatttgcattcatacctttttctagtattttttcttttgagtaaaaccactaggcctttttttttcttaagcctgtagggtcaaaactcagtaatggctctcacattccacatatgtggctggggtttaactccagtttcaaggctttcacattcatcaccattttatcttgttagaatcacatcagtcttttagcaccaaacatttacattttaattatcagattatattttttaaactgtgtatgtatttttaaaggagctgaatatcacctggaccagtatttcagcaaaccggttcctaactggctgcatcagaaacacctgaggtgcttgcttatttatttattaatttttgtgaggtgctttttaaaaattcaagctcctaggcctcaccttttggagagtctgattcagtaggtttggaatggggccagcaccccaggtgattttgatgcacaatgagaattgggacccaatgacgtagacttactcttttcttcctacgtaggaatttatttaggcaatatctcaaatgagaatctagtttgggcttgcatatctccaatatggagaattaacttatgtcactaagtaaaacatcctattcaaggttggggtagttttagttttaagaaagctgtacttcgttacgcttccctgaactttttactgattactattcctaccttagttttcttttctcatgagtaagcatccatagctcatttaaacattttttgtgttttcatgtgatgaagtttttagatctcctaccatctgtgttgcccttcaggaaaacacactcatgttatattttgtttggcaataattttttttttcttttgagacagagttacactctgctgcccaggctggagtacagtggcataaacacaactcactgcagcctccacctcctggcctcaaacagtcctctgcctcagcctccccagtagatgggaccacagatgcatgccaccatgctgagttaattttttattttctgtagagataggggctcgccatgttgcccaggctgatctcaaactcctgggctcaagcattcctctcgccttgccctcccaaggtgctgggattacaggcatgagccaccatgaccggtcaagaaattattaaatattatatctgctatttgtaagatattgtttaagggattgagaaggatacaaaaatgagacactgaccttaatgagaatagtttattagggaaaagagagcatagaatttagcagatgttgagagggagagagaagcagctcatatgttactagagtagaagctctttttaactttgtaagattgctgggttttcatttttattttgagaatatgctgccttacctccctgtctcctcatctgttaccccttatccccagttggaaaataaatctatgaaagaaatcattgtaccctgtaacctcattatgagacagctcttgaagtcactcttagaaaggtatataacctattgcactgctatagtgattaatctgtttaatagattcccatatagatttacataggcctgaattttattctctaaaaaatattatagggttttttagtattattaaactattgtactttttcaatagttagctcttacagaaaatgtccagtgaaggtttatttaaaatatctaagaaagacaagttggttggaagacaacttgtgatttacttctgctacccagtaacctattatacagatcaagccactataaaaagaatggttgtttctaaaagcaaaatgtcaaattgagttttcattcctagaaatagggatttctaggcaagtataggcagtttcattgttctaagaattttcaaacaccactcaaaattacagacatctgtcttgaaatgtttttattgcctatatccgcatgaatgcctctggaagtctgaataataaatttagggaaggacagttttacaatgtaattgtaagaatttcttaattgtaaaagtcagttgtgcacatggttttaagagaagatttttgaaataagtgtaagtcttctgtgttagttttctggtaccataaactgggtggattaaaacaacagaaatttattcccacagatctgaaggctagaagtctgaaatcaaggtgttggccatgttttttccaaagcctttaggggagcatctttccttgcctcttccagccccagatgttccttggcttttggcaacatatctctaatatcttcctccattgtcacatggccttatctttctccctggtctctgtgtcttcttctcttagaaggacaccagtcatattggattgtggtccaccctaatgacttcattgtaattacacctgcaaagaccctgtttccaaataatgtcacatccacaggtgctgagaattagggcttcgtatcttttgcctgcatttatagtcccagttacttgggaggctgaggcaggagtatcatttgagatcaggaattcaagaccagcctgggcaacatagtaaaaccccatctcaaacaaaatataccttttgcagggaggtcacaattcagcccataacatctttatcccatctttgacctcttttccaagaaaactgctttttaacagttacctgttctcaattcctctagaaattactcactcctgtgcatctcatatatttaaatccctaatactggatttctcagcttcagatagtatctttcagtgcctaatgattgattataggtgatcctttttcgtcctctttccaagtttctttttttcattttgccaaaggaattttttcagaaaggatgcctgagaaataaactttcagagatattgcccatctgaaatgtccttattttttcttcatagttcattgttggggagaaaaattctaggcactaaaggtagatatgctttcttgtctatgaatggagagagaagagaaagtcaagaggcctagctaccccatagcattcttgactttgatacttgccagttctgagcttggagcactgtagggctcctgggagctctggctcacacctcttaggcagttttcttaagttttcaggttgtggtttttctctggtgtcattgtttattatccttcttggtagactcatctgctttctgtctgttccagaaatttgttaaattatttgctttaaataatttgatatgtaattcatgctctcttattttgctgttattttagtagaattctgtgcatttccctcctcccctttctacattcttagtgcatcatcttgagcctggaagatgtcctttaagtaggatatttccacttgctgagccatgtccagggaaatctgacattctgttaattgagctagattgtctttagggggagttgatggtgcttgtttaaattcagttgcaaggaattttatattttctgactttttcagtgtacccttccttgctccctatttcatgacttttttgaagagtaccattctcttacaattatgctagctaactttttagaaaattatttggggtctggttttcagaacttcaacatgaagtctgatgttttccgaactagattttattttgctgaaataatcacacattgtgctacaaagcttttcctttgatgtcttactatacctgtttttaggtatttgaagacatgttgctcttgccaaagtgaattattactgaccaactttttatttatttattatgtcatttatgtaataatcttatagatccccaaagaaattatcttgccctcactgaactttttcattccccacagtaaatttgtaaactctaatcttcaaagcagtcacaattaatccacttgtgtaagtaaaagaattcatgttttagtgatttctcagtttaatttctatagctttatcttgtgttatttttagtttcctctctagagattcttgaacagattcttaattaccctctaaagagtattcatgttaggtagatatgaatggatctaataggaaaataaaggtacagaaaatttgggtgatttgctgcaataagttgcagttgaaacaagatcatgaatttgacatgtatatacttattccagtctctatttcagttaaaaaaatgccagtatcttatgatgataaaaaccattgcacagatttgacatctgtttctatttcacaggtaaccctgtatcatttgctaaagctgtttcaatcagacaccaatgcaatgctggggaaaaagacagtggtttcagagttctatgatgaaatggtaagaagattttataatgatagttttaaaagcatttgaagttggagaactttgaagttattgggtttttgttcattttatcccattagatatttcaagacccaacagcaatgatgcaacaattattgacaacatctcgtcagctaacattaggagcctataagcatgaaacagaatgtaagtgccatgcattcataattctgaaaaataacgtattctgtaatagtgaaagggttgtatgattcgtgccttttacactttaaaaaaatgaaataggtaagttttttaggtgttaaaaaacacagtttgtattacagtggaacatgtaaaaaggatgttttaaattgttcccaagtaggcctgctttcaagaagggtgaaagacagcctcttacattcgctgaagtactgtttgtctgttttattccctaattacatttaagtatagttttttattagtcttgcttagcctatcattttctgtttactagtctttgctaacaaaatctgtgtgaagaaccttgcaaaccataattatacttttatatactgtgaactagtttatcttatatttttgctgatgtcattttacatagtttcagattaatgctcaagtgttgactacctgaatgccacattgataatcggtcatgttgtattttctctctaagctgacatggtctcagaattctgtacgcattaatctgtgcatctattctcagtcatttgcaattggcatttaatatgaaatctatttgacatccctgtgttaacactgatgttactgttcagtcatttctttgattattcattcattacaatatatagtgagtaccagttaatgccaaccattgttctaggtgctagctgctgaggttagagcagtgcctgaatcagacaaaaagccctatcgtcatgggtcctacattctagtgggaggaaaacaggtattaaataaacagaacaaggaagtataaggtagtgattaagtgctatagagacaaacaaagtggggcagggagcatctttggtgggacgagatggttggagttttagatactgatatcaaaatgtcagtcaggaaatgctttctgagcatttggagacctaaaggggtaaaggagtgatctaagggaaggatattatatgtagagggagcagtgaggacaaaggccctcaggtaagtacatggctgaaaaacagcaagaagtccagtgtgactagagtagagtgaacaagaggacgaggagtgggagatgagatcagagaagttaataggggactaggtcatatagggacttgtgggtaactatgagggcttcagattattaaactgagatatgaagtcatttgtgagttttgagcaaaggaatgacatcagatttaacttctttaaaatgtttaattttgtgggtatattgtaggtatatatatttactgggtacatgggatattttgatacaggcatacaatgtctaaaaattacatccaggaaatgagatatcgatcacctcaagcatttaccctttttgttacaaataatccaaatatactcttttagttatttttaaatgtacaattacattattattgactatagtcaccctgttgtgctatcaaatgcttaatttattcattctttctattttttgtaccaataaccatcctttacccacctacccactacccttcctaccctctggtaaccgtcattctactctgttttctgtatctcatgagtttttttttttttttgagacagagccttgctctgttggcctggctggagggcagtggcatgatctcggctcactgcaacctctgtctcccaggctcaagtgattctcctccctcagcctccctagtagctgggattacaggtgtgtaccaccacacctggctaattttttttatatttttagtagagacagggtttcaccatgttggccaagctggtctcgaactcctgacctcagttaatccacccaccttggcctcccaaagtgctaggattataggcatgagccaccacacccagcctagttgttttaatttttagctcccacaaataagtgagaatatataatgttttatctttctgtgcctggcttacttcacttaatataatgaccttaagttccatccatgttgtttggaatgacaggatttcattccttttttatggctgaatagtactctcttgtgtatatgtaccatattttctttatccattcatctgttgatggacacttgggttgctttcaaatcttggctattgtgaatagtactgcaataacataaacatggaagtgcagatatctttttgatatactgacttattttcttttggatatatacctagcagtgggattgctggatcatatagctctattttttgttttttgaggaatctccaaactgttggccatagtggttttactaatttacattcccaccaacagtatataagggttcccttttctctgcatcctcgcctgcatttgttattgcctgtcttttcgataacagccattttaacaggcatgagatgacatctcattgtagttttaatttgcatttttctgatgatcagtgatgttgagcaccttttcgtatacctgtttgccatttgtatgtcatcttttgataaatgtctattcagatcttttgcccgttttaaaatcagattcttaaggagttgttcgagctccttatatattctgattattaattctttgacagatgggtagtttgcagatattttcttccattctgtgtgttgtctcttcactttgttgtttcctttgtggtacagaagttttttaacttgatgtgatcccgttaatccatttttgccttggttgcctgtgtttatagggtattacacaagaaatctttgtccagtccagtgtcctagagagtttccccaatgttttcttttagtagtttaatagtttgagatcttagatttaagtctttaatccattttaatttgatttttgtatatggcgagagataggagtctagtttcattcttctgcatatagatatccagatttcctggcactatttattgaagagaccatttttttcctcaagtatatattcttggcacctttgtcaaaaatgagttccctgtaagtgtgtggatttgtttctgggttctctagtctgttccgttggtttatgtgtctctttttctgcaagtaccatgctgttgtggttactatagctctgtagtataatttgaagtcaggtgattcctccagttttgttctttttgcggaggataacttaggctattctggatcttttgtggttccacataaaattttaggttttgtttttttttttctatttctgtgaagaatgtcatttgtattttgatagggattgcagtgaatctgtagattgctttgggaagtatgggcattttaacaatattgattttccagttcatgaacatggaatatctttccttttctgtgtgttctcttccgtttctttcattactgttttatatttctcattgtacatatctttcacttctttggttaattcctagttatttaatttgtagctgtggtaaatgagattactttctttttttttatttaattttttagtatttattgatcattcttgggtgtttctcggagagggggatttggcaggatcataggacaatagtggagggaaggtcagcagataaacatgtgaacaaaggtctctggttttcctaggcagagggccctgctgccttcccgcagtgtttgtgtccctgggtacttgagattagggagtatgctgccttcaagcatctgtttaacaaagcacatcttgcgccgcccttaatccatttaacccttacacatgtttcagagagcacggggttgggggtaaggttatggattaacagcatcccaaggcagaagaatttttcttagtacacaacaaaatggagtctcctatgtctacttctttctacacagacacagtaacaatctgatctctctttcttttccccacatttcccccttttctattcgacaaaaccgccatcgtcatcatggcccgttctcaatgagctgttaggtacacctcccagacggggtggcggccgggcagaggggctcctcacttcccagacagggtggccgggcaggggcgccccccacctcccagacagggcggcggccgggcgggggctgcccccacctcccggacggggcagctggccgggcgggggctgccccccacctcccggagggggcggctgccgggcggagacgctcctcacttccctgacggggtggctgctgggcggaggggctcctcacttcccagacggggaggctgccgggcgtaggggctcctcacttctcagacggggcggccggtcagagacgctcctcacctcccagacggggtggcggcggggcagagacactcctcagtttccagatggggtcgcggccgggcagaggcgctcttcacatctcagatggggcggcggggcagaggcgctccccacatcccagaggatgggcggccggacagagacgctcctcacttcctagacgggatgacggccgggaagaggcgctcctcacttcccagactgggcggctgggcagaggggctcctcacatcccagacgatgggcggccaggcagagacgctcctcacttcctagacggggtggcggccgggcagaggctgtaatctcggcactttgggaggccaaggcaggcggctgggagatggaggttgtagcgagcagagatcacgccactgcactccagcctgggcaacattgagcactgagtgagcgagactccgtctgcaatcccggcacctcgggaggccaaggctggcagatcactcgcggtcaggagctggagaccagcccagccaacacggcgaaaccccgtctccaccaaaaaatacaaaaactggtgaggcgtggtggtgcgcgcctgcaatcccaggcactcggcaggctgaggcaggagaatcaggcagggaggttgcagtgagccgagatggcggcagtacagtccagcctgggctcggcatcagagggagaccgcgcagagagggagggggagggggagacttctttcttgatttcattttcagattgttcactgttggcatacagagatgctactgatttttttgtatgttgattttgtatcctgcagttttactgaatttgtttatcaactcttaatagcttttttggtggagtctttaggtttttccaaatataatatcatctacaggctgggtgtggtggctcacgcctgtaatcccagcactttgggaggccaaggcagatggatcacctgaggtcaggagttcaagaccagcctggccaacatggcgaaacccttctctgctaaaactataaaaattaaccgagcatggtggcatgtgcctgtaatcccagctactcgtgtggcagaggcaggagaattgcttgaacctgggaggcggaggttgcaatgagccgagattgtgtcactgcactccagcctaggcaacagagtgagactctctctcagaataaataaataaataaataatgataatatcatctacaaacaaggctaatttgacttctgctgaattttatcagatcctttttcagcatcaattgaaatgatcatatggtttttgtccatcattctgtcgatatgaggtatcacattgatttgctcatgttgagcgattcttacatccctgggataaatcccgcttggtcacgatgaatgatctttttaaggtgttgttgaattctttttgctagtgttttgttatggatttttgcatcagtgttcatcagggatattggcctgtggttttctttttttgatgtacctttggttttggtgtctaggtaatactggcctcatagaatgagtttggaagtattattttctcaattttttggaatagtttgagtagggttggtattagttcttcttcaaatgtttggtaaaattcaacagtgaagccattgggtcctgggcttttctttgctgggagactttttactacagcttcaatcttgttgcttgttactggtctgttcaggttttggatttcttcatgattcaatcttggtaggttgtatgtgtctaggaatttatccatttcttctagattttctaatttattggcatataattgctcatagtggccactaatgatcctttgaatttctgcactgtcagttttaatgtctcctttttcatcctttgagttttctcttttttcttaatctggctaaaaatttgtcagttttgtttatcttttcagaaaaccaacttcttgtttcattgagcttgtattttttcttcatttcaattttatttatttttactctgatcttttttcctctactaactttgggtttggtttgctcttgcttttctcattttttacaatacatcgttagatattttatttgaagtttttcctctatttggctacagacatttaaagctacacatttccctctgagtactgcttttgctgtgttgtttccattatctgtttcaataaatttttcagtttccatctgtccttccttccttcctttcctccttccctcctttctttctttctaacttttttggagctggggatctcgctgtgtttaccaggctggtcttgaactcttgtcctcaagcgatcctcccacctcagcctcccaaagtgctgggattataggtgtgagcctctgcacctgacccaatttttcaattcttaatctcttcattgacccactggtcattcagaagcatattgtttaaattccatgtgtttgtatagtttccagaattcctcttgttattgatttctaattttattccattgtagtcagagaagatacttcacattacttgcttttttaaaaaaaaatgttttatgacttgttttgtggcctaacatatggtctttatccttgagaatgatccatgaggtcaggagaagaatgtgtattctgtagccatttgatgaaatgttctgtaaatacctattaggtccatttggcctattttgcagattaagtccaatggtatttttttgttgattttctgtctggatgatctgttcagtgctgaaagttggatgttggcgatgccaggtattgttgtattggggtctatctctcttaaactctaataatatttgctttatgtatctgactgctccactgttgggtgcatatatgtttacaattgttatatcctcttgctgaattgactcctttattattatataatgaccctgtctctttttatagtttttgttgtgcaatctgtttgtctgatgtcagtattgctactcctgctcttttttgattttgcatgcaatatctttttttttcatttgcatgcaatatctttttccatccctttattttcagtctacgtgtgtctttataggtgaagtgtgtttcctggaggcagtacatcactgggtcttgttttttcatccattcagccactctgtgtcttttgattggagactttagtccatttacattcactgatattgatatttacattcattagtattgataagtaaggacttccaccattttatttttctgattgtttgatggtcttctctttcttctttccttccttcctgttttccttttagtgaaggtgattttttctggtggtatattttaatttctttttatttttgtgtttctcttttatgtttctaggtttgagcttaccatgaagcttgcaaataatatcctataacccgttgttttaaactgatgacagcttaacactgattgcataaacaagcaagcaaaaagaaagcaataaacactttatattttaacttcatctccccacttttaactttttgttgtttctatttatatcttattgctatctatgtcttgaaaaattgtagttattatttttgatcggttcatcttttcatatttctacctaagacttgtgtagtttacaaactgcaattacaatgtaataatattctttgtttttctgtttacttgccagtgagttttgtatcttcagatgatttcacattacttattaacatgcttttctttcagattgaagaacttcagcatttcttgtagggcagctctggtgttgatgaaatctctcagcttttgtttgggaaagcatttctccatgttcgaaggctattttcaccagatgtactattctaggacaaaaggctttttttccttcagcactttaaatgtcatgccactttctactggcctataaagtttccactgaaaagtccactaccagatgtattagagctccattgtatgttacttgtttttgtgtttatttcctcttgttgtttttaggatcctttctttatccttgagatttatgagtttgattataaactgccttgaggtagtcttctgtgtgttaaatctccttggtgttctataaccttcttgtacttgaatattgatatttttccctgaatttgggaagttctctattattatccctttgaataaactttctactcctctctctctctatctcctctttaattaaggtcaataactcttagattctacccctaccctgcctttttattttgagacaggtcctgactttgtcacccaggctggagtgcagtggcatgatcttggctcactgcaacctccaccttccgggttcaagcaatcctctcacctcagcctcctgagtagctgggacccacaggcacatgccaccactatgcccagctaatttttttttttttttttttttttttttttttttttttggtggagatggggttttgccatgttgcccaggctagtctcgaactcctgggctcaagcagtcctccctccttggcctcccaaagtgctgggatcataggtgtgagctgctgcacctggcctggatttccccttttctaggttattttctagaacttgtagatgtgcttcattttctcttgtctcctctcactgtgaatttgcaaatagcctctcttcaagcccactaattctttgttctgcttgatcagttctgctattaagtgactgatgcattcttccatatgtcagtggtgttttcaactccagcatttctgctcgattcttttaatttccatttatttattaaatttatgtgataggattctaaattctttatctgtgttatcttgaatttcttttgagtttcctcaaaacagctattttgagttatctttctgaaaggtcacatatctctgttagagattggtcactgatgccttatttagctcgtttggtgaggtcatgttttcctggatggtcttgatacttgttgatattcatcaatgtctgggcattgcagagttaggtttttattgtagtctttgtaatctaggtttgttgtacctgtccttgggcaggctttccaggtatttgaaggaacttaggtgttgtgatctaaatttttggtcactgcagccatatctgcattaggggataccccaaggcccagtaatgctgtggttcttgcagatttgtagggtacgactttggtggtcttggataagatccagaagaatcctctggattagcaggcagagactcttgttctcgtcccttactttctcccaaacaaacggagtttctgtttctgtgctgaactgcctagacctgaggagggatgacacaagcacccctttagccaccaccactgggactgccttaggtcagacttgaagccagcacattactgggtcttgcccaaggcccactgtaaccgctgcctggctgccacctatgtttgtgtgaggccctaaggctctataatcagcaggtgatgaagtcagccagtatcaggggaaattcagccagatatcgggtgaaattcacccccaatatttcacgtaggttctttcctattttccctaagtgccggccagtctgagaaataaagggacagagtacaaaagagagaaattttaaagctgggtgtccaggggagacatcacatgtcggcaggttccatgatgccccacaagccacaaaaccagcaagtttttattagtgattttcaaaaggggagggagtgtatgaatagggtctgggtcacagagatcacatgcttcacaaggtaataagatatcacaaggcaaatggaggcagggtgagatcacaggaccggggcaaaactaaaattgctaatgaagttttgggcacatattgtcattgataacatcttatcaggagacagggtttgagagcaggcaaccggtctgaccgaaatttattaggcaggaatttcctagtcctaataagcctgggagtgctacgggagactggggctaatttcatccctacagctgcgaccgtaaaagacagccgcccctgaagcagccatttcagaggcttaccctcagggacacattctctttctcagggatgttccttgctgagaaaaagaattcagcgatatttctgtcatttgcttttgaaagaagagaaatatggctctgttctgcctggctcaccggcagtcagagtttaaggttatctctcttgttccttgaaccaattgctgttatcctgttcttttttcaaggtgcccagatttcatattgttcaaacacacatgctctacaaacaatttgtgcagttaacgcaatcatcacagggtcctgaggtgacatacatcctcctcagcttacaaagatgacgggattaagagattaaagtaaagacaggcataggaaatcacaagggtattgattggggaagtgataagtgtccatgaaatcttcacaatttatgttcagagattgtagtaaagacaggcgtaagaaattataaaagtattaatttggggaactaatagatgtccatgaaatcttcacaatttatgttcttctgccatggcttcagccgttccctccgttcggggttcctgacttcccgcaacatctctccctttctttttatataaatgtgccatggtgatgaaggcttgttcattctcttgatttttacccaggattctttgactggtccggcacactaaaaacaagctgattaaacagagaaatgtaattccacaatttactacagtggagcccccaatagacttaatccaagtcgtggggtttaatccataaagattttctgccacctgatctaacgcctcagctccaggcacaatggataagtgagcttgagaggcttcaaaaatttgtttctttaatttagttatgtccaatgataaattatcttccctacccagaaggcgtcctttgaccatttcccatgaataatcagtctcattataggaataggggatgatacagaaatccaaagtattccagttgcactgcatttgcatgcgatgttcgagactcaccacccaatctccaagccaaataacagactgtcttaaatcattaatttgattagcttgtgtccatcccttaagggcactgagtttccctgggctgcgggtaggtccagagattctgtccaggagccagggcctggagttggaaaccttaggaataatcctggtgctctgttttactgtggctgagctggcacccaagctacaagacagcatccttcccattcttccctcccctttttccaggcagatgattctttccctgtgtccaccactaccacaggcccacaaggagttctgtcagggtaccacaaatatttacttaaggcccaagggctcttcagtcagcttgtgttgaatactgccaggcctgggactttcccttcagggcagtgggctcctcttggcctaggtaggtccagagatgccatccaagggccaaggcgtggaattggggagttggtaccaaagcttaagacaaagtcccctttactctttcctgtgtgtggaggctgtcccagtaattcagatttggtagaatggtggcttggaccagagtgatagcaatgggagaagacattagattttggacctgatttgaaaataggtacaggaggatttgctgatgttttgaataatgaggtattggagaaagaaaagcaaaggatgacttacatggttttgggcctgaggaactccaaaaaagtcattgctttttacacaggtgggaggtcttggaggaacaggtttttgcaattcagagtacagctttggcggccaggtgtgatggctcatgcctataatcgcagcacattagaggggctagcatgggaggattgcctgagcccaggacttcaagactagcctgagcaatgtagtgagaccccatctctacaaaaaaaatttttttaattttctgggtgtggtggcacattcctgtagtaccagctactcaggaggctgaggttgggggattacttgagcccaggagggcaaggctttaatgagctgttgtcatgtgactgcacgccagactgaacaatacaacaagattctgtctcaaaaaaaaaaagtgcaagtttggacatgatgggtgtgggatgtctgtaagacatgtaagttgagatgttgagaaggatgttgcaccatggcattcaaagagaggagaagtgtaggctggagacataaatttgaaagttaatacagttataaattatgagaccaaatggtatcatcaaaggagtaagtgaagatagaaaagaggtccaaagactgagagacctgggcactccaaaatttaaagattgaggagataaccagcaaagggaatgaagaacaaacagcaaatatggagggagaaaaactaggtgcatgtaatgtcctcacaggcaagtgaaaaaagtgtatcaggaactagagagtgtctcatactgctgataggtcaagtaagatgagggcccagtaattggatagagtaagatggagctccttgatgactttaacaggagcagtgtaaggagaacagtaaggtcagaagatgacttgaagtggataagagaacatcagataagataaattggagacagacactgtgggcaactctgtcttgaagcctggctgtaaagaggagcagtagtctttgaagcagtaacagaagcaagatacggggtcaagagggtattgttttcagggggaaataaactagtatatttgtaggctgaaagggagtgatgcaataaaagaagaggtagagggatggtaatgaagtggggagggaattgctgtttaacaattagtggttatagaagtgttttgtttatattttcataaaacacttgattaggacttaaaagatctgggtactaattataattttgtgacttaggtagtcattgaaaatttgtatgctttagtttctttatctgcaaaaatgttatgaacataaaacagttaagtatatgatcactttgaaaaggtgaaaagcactactgtgcttcattattgatcactctcttctttctctcataccatgaaatgtgcccattcatggcagaaaattctcttttaaaattcaagtgctcacatttttctgtttttgacaaaactatcatttatttatgtataacaagtagttataaataatatgttttgtgaaaaggctataaatctgtttcaatgtgttaaatcttacgtatggagctgtataaccttgggaagtttttatcaataaattaagttttctgtgtgatctttagttcattttcttaacagtaccaaatcaataaggaagaaaagtctaattccataaatggtgttggcataattggtaagcttttgggaagaaaacttaattttgatcatcacttcatagtacttaccaaaacaaattccagtttagttaaagatatttaaatgtttttttgaaaatcagccagcctgttttttgaaaaattagattactggctatcctggctaggaaggactttccaaatttaaagtgttaggaaaaatcacattaaaataaggatagactttattaagtatatttaatttctgcatttccaaaaggcaaagaagaaaagtttgcagaaaatatggcaaagaattaatgtttttttaaatgctaaaattgataaatagaaaaacctgttaaacctcagtagataaatgggcagaaggtatggacagacagatagaataagagatcaccagtaaataaaatgataaaatatctggccctgctaataattttaaaaatgcaaaccaaacagtagtgaatgactatatttgtcctattaaattagcaaaagcatttttttttcccctagagacaggttctcgctctgtcactcaggctgggttgcagtgtcatgatcgtagctcactgtagcctcaaacttgggggctcacatgatcctcctgccttggccccctaacagtagctaggactacaggtatgtgccaccatgtctggctaattttttttttttttgtaggggcaggtttctccacctcagactcctaaagtactggtattacaggcatgaatcaccatgccagccaggaattttaaatagttgtaccgattaagagtaaactttgcactctcatgaattgttttgtgagtataaatttagctctttaggaaagctatctgggaatattaatcaaaggtctaaaaaatatgtatagttttaataatctgagggcatatgatagtcaatatttagtaataataaaatgccagacttattcagtgcttactatttgtattcttctgagtctgtacatgtataaactcacttaattctataacagctttattaggtaatatttagaaaaggaaaccgaggtataaggaggttaagaaacttgcccagggtcacacagctagttagtagtagaatcagaacttgatccctggcagtcctcagaacttaggctccaaaaatttaatagtatttttatagagagaatatttattatggagtatattggaagtttaagcactaatgatctagctttttagttgcttcttcaagaaatagtaaaaatgatagtgaacacttagtgagagcttactatgtacctgacaagcactttccatttcttaacttatttaatactctaaaataaccctaggaggaagatactatgattagcaccattttgtaggtaaaagctctagaaagatttgataacttgcccaaaattacccagtagagcctgcattttaaacccaaaatctgtccacttaactaataagttgtaaaaagcctgatagtctgtctcctaaccagtatgctgaactgactttataaaagtagtaattctttggatttgttttctcgaaattgagcttcattgggaaattaaaaacagaaacttttctttttttgtataagcatttaacacataggaagcagaacactggaacaagctaaaagaagttttaaaatgttttcccccaggatctcattgctaattaactcatgtcttcttccaaacatctagtgcccttcgcagtcttacaagttgtcaaaaataaaagtatcatgaatcaaacaacaaatctatgttatatctacagtgaatgctgtccttctgacaattgagttaatcaggtctccctggctagttttaaaactaccgcttacagctatacaggactccttgtctttatgctgcttcctgggcctgtatgcccacttcatttacctaactcctttctcattgtttaaaattcagtttagatgttactactaccaagaagccctccttcataaaactcaccctttctacttgatttgaatccagtctactcttgtcgttccctatgattacctcataacattagtgcatttttttcttacctgtttcctgcctctgtaccccagcatctaacaaagcgcatatcattcagtgtgttttttaaattgatgtggggagagagggtataggggaatacaaatttctgcatagtaaaaagcactgggaacaaagtctaaagactgacaggccatagaaaaatgtactcatgtcacaaatgactagtttcttaacatacagtagtccccctttatctggagaggacacattccaagaaccccagtggatgcctaaaactacagatagtaccaagccctatatactgttttttcctatacatatatacctatgataaagtttaatttataaattaggcacaataaaagattaacaacactaattaataaaatagaacattataacaatgaactctaataaaagttatgtaaatgtgtgctctttccccaccccaccccccaaaaaaatcttattctactttttactcacctattttcagaccgctattgacagtggctaactgtaagcatggaaaatgaaaccatggatgaggggggactactgtataaagctgtatatagctcttacaaatcaataagaaaggccaataacccaataggaaaatgagcaaaaggaaaacagatcatttgtagaaagggagaaatgtctcaaacattataaaaaagatgagtcagccccaatagtaataagatgaatgcgaattacagaaatactgtttttaacctttcaggttaggtaagaccaaaaagttgatgcagtagggaaacagacacaatgctaatgggattataaattggtagatccttttgagttgcttgatgttcttccagaattacaagtacatatatattctataacagttccatttccaggaatttatcctacaaatatactaaaatgattatttacagcatacacattattgcattgtttgtaaaagaaaaaaatggagatactctgagtgtacatcaatagggggcagactaaatgaattttatttatccattcaattaggtcctctgtagtcattaaaaagaatgagacagctctgtgttatagggtgagcttccagatataatgttaagtgaaacagcaaggtgcaaaacaatgtgtatagaatgataccacttgtgttgggaagaagaagaaactgcacttgggtatatgctttgtatatcagcagactatttctgggaagatatcagagaacacaacagtgattatctctgggaagaagcactgattggtcatggcaggctggggaacaagtgtagtagaagggcatattttttcactgtctactctttaatcttttaatttgtaatcttgtgtgtactacctatgtataaaaataatttgtaaaagaatgaaaagaattacaaagtaaaatatgaattgttttgacaatcacaaaaagcaagtcaccagcaatgagcaaaataaggaaagaactcattaatattcattgaatttttttattttttttatttttattttttttttttgaggcagagtctcgcgctgtcgcccaggctggatggagtgcagggcgcgatctcggctcactgcaagctccgcctcctgcgttcacgccattctcccgcctcagcctcacgcgtagctgggactacaagtgctcgccaccatgcccagctaattttttgtatttttagtagagacagggttttaccgtgtattgcatgttttttatgtgctagatgctttacatataattacttcatgtaatcttcgtaaatcctctgagaaatacctagttttagctgtatcgtacaaagagattgatggagccttagaaatgttagcattcggctaataaggaagcaagggtttatttgaaatcagatcttttctgtttccatagttgggtttttttcccaccaaaccatctggcttccaattagtgaccatcttttattagtgaaagtaagtataagtgtactttaatagtgagcagcagttaccaaaaatgtccacaagatggaaatgttagacacaagcagatatttttctttgtaaaacatcatgctacatatccaagtggcatatttaaatagatgtgtcctgttttgcagtaacatttctttagtactttgttatagatagatagtttcagatatcacttaatgtttctcttttctcataacaatagttgatagggctttttctgtaccaggcagtattctgggtactttacataaattaattcattaagtcttctcaacaggctgggtgtggtggctcacacctgtaatcccagctgcttgggaagctgaggtgggataatcacttgaacccgggagtgagagtttgcagtgagccaagatcacaccactgcactccagcctgggtgacagagtaagatcctgtctcaaaagttttctcaacaaataatattatgaagtatttgccattatcatttctgtttcataagtgaggaacataggtgaaatagcttacagtgtcacagctagtaagtggcagagctgggattcaaattttagcagttattgccacctatttgaaaaaaagatattggcttgtattgatagtgtgattttgtttataagtttcacctgggccgggcctggtggcttatgcctgtaatccccgcactttgggaggctaaggagggcggattgcctgagctcaggagttcgcagtcagcctgggcaacacggtgaaaccccgtctctactaaaatacaaaaaattagccgggcatggcagcatgcacctgtagtcccaactactcaggaggttgaggcaggagaattgcttgaacctgggaggcataggttgcagtgagctgagatcatgccactgctctccagcctgggcgacaagagcgagactccatctcaaaaaaaaaaaaaaaaagtttcacctgtatataaatttaagaatacttgtagttaacgcttcccccccacccccacccattaagacagagtctcactctgtcgaccaggctggagtgcactagcgtcatctcagctcactgcaacctctgcctcccaagttcaagtgattctcatgcctcagccaccagagtagctgggattacaggtgtgcaccaccacgccctgctaattttgtatttttgatagagacgaggttttgctatgttggccaggttggtctcgaactcctgacctcaagtgatccacctgccttagcctcccaaagtgctgggattacagacataagccactgcgcccagtcacctctcattagctgatgtatcttgggtttgtgtgcccccttatttcaatcttaatatgtgtatggaaaaaaggacattatgtcttaaaattttaactgtgagttggtgaccagaattttatttttagttgtaggaaacatcttagatcctctcttgggaattcagacattcttcccctcccccaacctgcacccatgtttaatgttgtaattcttaagttatccacatttcatcatggaaacattgtcgtcaggaaatgccatatttattaccctgtcatatatcttaaacatgtgagaaaaatactttagtaaaagtatttgttttctttagttgcagagcttgaagtgaaaaccagagaaaaattagaagctgctaagaaaaaaacaagctttgagattgcagagcttaaggagagattaaaagcaagtcgtgaaactataaattgtttaaaaaatgaaatcagaaaacttgaagaagatgaccaagcaaaagacatataaacagttctcatgagaacttggtagtaagctaaactgaaaataaggtgggcttcactggagaaatggacttactgcaaatgctgtgatgtttcttagaggaacttcatatacagctgttgaccatgaatttcttagcaataggaatttgtactatttaagcaatctttaatggaaaatatgtgtgtaagaatggatgctatataggtattttaccaacccattttaagaaaattctatgatattaagcacagtttttaaaaatgtttattgtagtatatgtatagcttattacccttttgacaggcatcaaaatttcattataaagtattacttgtacaaattttgtacttctttagtggctagaattagtgaagaaacttaatgtgtatatttaatttcttcaagttcttacctgcccccatccttttttgtatatgatgtgtccagtaagtattcaataaatgtagtttacagatcctatttctccctcctgatgtgtttcttcctctttgaagactttctggaactccctcaatacagttaaagtatcttta

SEQ ID NO: 106 - DNA, 16149 bp, Homo sapiens
  source 1..16149: mol_type = other DNA
gggcgtgtggcgtcacttccggcttccttcagtccgctggtcccgagcacgagctgtgaggggattcacttgtgtgcggaactcctcggaaccatggtgagcctgactcccctgcctcttgccctacccctgctccgccgtgctcttgccaccccactgcttcctctgtcctgctagggtcgtaggctccgtttctgtctccccggccctccgcacatggtgcgagccatgcgcggggcgtgcggcctgcgccaggccagccggtggagctcaccacgagggggaggggtggaccgcaaagccagcgtctccttgtgcctaggtctttgcatagtcccggcagcccaggtccgcgcctcacccggagcgaagaaatttctagtgtgggacccgctccgccctccttctaggggcggagcctggagcgacggggtctgagccatcagagggtggaggggccgcagccttccgagggtggaagatggaggccgcgttccctcgcccgcccggcaggcgtcaccttgatggcctgcaacccctccctgcctcattcttagttcaagatcgtctttagtctcgctgtacgtaactgtcaatctcgctggtgtataatttatactcccgggggccttgtaaatccgaaaagccatgtcgctctcctacaagtccctctctcccacttaaatgctttctccgatgatggaagcttcatttgattgaaaacattgttgtaaatgagttttctcttagatgtccacttgtaagactagtggaaggcacctcagtgtatgtgttagagtattggtacttaaacggaatgcctcttggttttccttttcaggcgtccctttcccttgcacctgttaacatctttaaggcaggagctgatgaagagagagcagagacagctcgtctggtaagccttgttctaagcattgttttaaagataaaactggaggccaggcgcggtggcttactcctgtaatcccagtactttgggaggccgaggtaggcggatgaactgaggtcaggagttcgagaccagcctggccaacatggtaaaaccccgtttctactagaaatacaaaaattagccgggcgtggtgatgggcacctgtaatcccagctactcgggaggctgaggcaggaggatcgcttgaacccaggaggcggaggttgcagtgagctgagatcgcgccattgcactccagcctgggcgacagagcgacactctgcctcaaaaaaaaaaaaaagtaaataaagataaaactgtacttgaagactgtaaagttgattctgataatctccttggtttttactccagacttcttttattggtgccatcgccattggagacttggtaaagagcaccttgggacccaaaggcatggtaagaaaaatagaaaagttttatattttaatattgttttagagcgcttggtggaaatataataacaagcgtattaaaatgctttttaatctttaaaacgtttaattataaaagacaagtatgttctccttagtaaaaatcagagtccccagaatcaccatccccaatcccatgcccctccccaatgacaagtactgttatcatttgcacgtacatcttctaatattctgtttatgtagaagtatgtgtacttcattatgtattttatactcatgtaacatactgttttataaaacagatactatttatcaatacttttttgtagcttgctcttttaaattcctttcagtgtaagtagataacactgcccctttaactgtcaaatattatcctgtaccttaattattttataatttaattatggctgtattgatagtttctttccattgtttttgcagttacggtgttgaaacaaaaactagtgtctacctgtgcttctagtgtttctaggggtagatacatggtttggttacgtggtgtatgtattgaaaacatttgatgaatggataccacaaaatagctatccagagtgtttatacactagcactgtgtgagaatactgattgatccatgcattcttcaagatgtgcttatgtcttaacttgaaccaattatgttccctttaggacaaaattcttctaagcagtggacgagatgcctctcttatggtaaccaatgatggtgccactattctaaaaaacattggtgttgacaatccagcagctaaagttttagttggtaagtctgaatatactttttcaccaacctaataatactgtttgttaacatttttgaaataactttataaataggctgtgttgaccaatcgtactgtcaattgatgtccactagttgttaattatcgttgttaaaatacaagcttcaggagtgcccgtatgttggtggtaaaactgttgcatttcagacctcagagttccaaataatttgttgaatgaggaaccctggtaagtttagattggtagtgaatatttttggagaatttagtaagcaaagaagcaattttgagttaataactaatttctttttctagatatgtcaagggttcaagatgatgaagttggtgatggcactacctctgttaccgttttagcagcagaattattaagggtaagagcaactaagcaactcttttttcctactgtgtttttgagtatcagaggtaatctagtccttacttcctctgtctttactattgaggagtgcttaataattttctatttataacttttgttttataactttattaataggaagcagaatctttaattgcaaaaaagattcatccacagaccatcatagcgggttggagagaagccacgaaggctgcaagagaggcgctgttgagttctgcagttgatcatgggtttgtatagcaaagtactactgttctaaacatttagtgttctttcataacatgcttaatgcaagaaatctataggacactgaaaagcatacacaaagatcatcttgctgcctcaccccactccaacagtcaaacctacatcagcctccagagatagccactaaagttaagtttgggtttttagtctttttgtatatatcatcaaaatatacaaataaagcaaatagtataatactgtatagagaatttgttagcctctttttaacctagttaaatattaagcacatttttggatgtcaattttctgtgcagtattttaatagagttacacatttgaatatttggctagaatgactgtattaacctatctgtagggggagatttgtgtatttgatgatttttagcattataaaataactttgtgacgttgcgacatagcccaaaggtttctagaagtgtaattgttgggtccaaaggtaagtgtgtgtgttttaaggcacccccaaacctgggctgcacagcaggtgagcagcaggtggaaaaattgtcttcccatgaaaccagtccctggtgccaaaaaggtccgggaccactgttttaaggcacttctatttatttgcccattcacaactgtataataatacttgtttttcacgtccttttatttatttatttattttgagacggagtctcgctcttagagttgcccagaatggagtgcagtggcacgacttcggctgactgcaacctctgcctcccgggttcaagcgattctcttgcctcagcctcccaagtagcagggactacaggcatgtgccatcatagccagctaattttgtatttttagtgtagatggggtttcaccatgttgctcaggctggtcttgaactgacctcaagtgatccatcctcctcagtctcccaaagtgctaggattacaggcgtgagccactgtgcccggccatttctcacattcttgccaacattagacttttgcatgcttgtgtggcccccacccctcttttttttttggcattttgccagtttggtggggaaaataacatctttaatttgtgtttcttgattactgctgaggtttaattcttttcatatagcttacagacttgatcagttagggtaaaattatctattgacatgaatatctagataaattttgaaaagtaaagtagggttaatatgtatatttggttggttttatttagttccgatgaagttaaattccgtcaagatttaatgaatattgcgggcacaacattatcctcaaaacttcttactcatcacaaagaccactttacaaagttagctgtagaagcagttctcagactgaaaggctctggcaacctggaggcaattcatattatcaagaagctaggaggaagtttggcagattcctatttagatgaaggtatgtatgaatgtcagatacaagaagctttgattagatgctgagggctgaatactgagtgaattctgttttgagaccagtgaccctttacaaagccagtgaacttgaatttaaggacatatcatatgtgcaaccatttttgtcattttattgacagtgtactcctcttcccgcgctattccagcattgttgatgatctctagagtttacttaactaccatgaagttatttgcagtctctgataaagaggaaatgttttcttttactagaaatcatctattctcaaatggtacttttaccaggattatatgtattctccaggaagggtctgggtcagtcaaatcattgtgttagctggttgttgaggatgtacagttgaccattgaacaacatgggtttgaattatgtaggttcacaatgcaggttttttcaataaatatagtcagccctttgtgtccgtggtttgcacatgtgcaaccgaacgtggatggaaaatgcagtatttgcaggatttgaaacccatgtatatagtgggccagcttttcaaatctgctggttccagtcagcctggaacttaagtatgtggggattttggtgtatgtgggcgtcttggaaccagtccccttcgtatactgggggatgactagttttttttagaaaagaattaaaaaaaatttctttaacaaataattatgtatgtttatagggcaagaggatctagttcttaaagagtgataaatgagacataataagtactgctttcttagtagtacatttttgtttagagtgaagttttccagatcatcttcacattatatttacttcacaaaatggcctgtcaaaaagtataggcattcttatatagagaaggaaaaaaaaagaattagatggtgctttacaacttctgtttttaccagtggtttggagtcctggttttgttctgtgtcataggtcttgatttattttaagagagagtcataattctgaaaatactcttgattaagtttatatacaagagctgtgtagcatttctttttttttttttttgagacggagtctggctgtgtcacccaggctggagtgcagcagtatgatctcgcctcactgcaaccactgcctcctgagttaaggcgattctcctgcctcagcctcctgagtaggtgggattacaggcgtgtgccaccatgcctggctaacttttttgtatttttagtagagacggggtatcgccatgttgaccaggctggtctcgaactcctgacctaaggggatccacctgcctcagcctcccaaagtactgggattacaggcgtgagccaccatgcctggccgctgcgtagcatttctgataggggctggtggtagggaaggagcattaaaacaagaatattagtagcacaagcagcaccattcttgaatgtctgctctgtactaggaattgtaataggaactttagtcatttagtcatcatgacctggtgagtgaggattaggttcacttgaatagagtagaaaacccaagataatggtggcttcataatggaaaagtttctaatgtaaccaaaaaaaggcctagaaaggtaggtggtactgggtttgtatgatggttccaaagcagcaggactaggctggtaactagcacctctgctactggttacattcctgttttacaaattagcatttctggttggataatttgtcgaaggttatatagccagcagcaggggcatgatcagggtcagatttatctgactccacggtgtccatggtttttccatttttaccaccagcctcaatacctgaatcttcaatttttctcttgtggtggtgattttaagctaataaaaatataggacttaacctattgtctttatattgcaacccatacagatgtgggtgtagcgtatatctgaaacaaaagtttcaaaatactgtttaattttattgtctgtactgtgctcttatattttctgtttcatattttttaagtaacccattaaattgattttgtaataactcttctagtgggatgctttataccagaagtgtccaaggaagagaatacagtcatgggttcctagtttctgtttctggttgggtcggtaaagccccttcctcctccctcttttctgcttatcactagagacagaaactaaaatccatggctttcaggcgctaaaagcctaaaagcaaaacaacaacagaataaggcaggttggacaagcttgcttttatgccttctaagagcttggtaaattggacttaaatagcttctttgaaacagtgatatgataaagcagacagctttttataagatttactaaggctgctttgaagtattaaatatgatactgttcttatatttattgtaggcttcctgttggataaaaaaattggagtaaatcaaccaaaacgaattgaaaatgctaaaattcttattgcaaatactggtatggatacagacaaaataaaggtatgtaactctactttttaaaaattaaaattactgcccaggcagagtggctcatgcctgtaatcctagcaatttgggaggccaaggtggtggatcatctgagatcagaagtttgagaccagcctgaccaacatggagaaaccctgtctctactaaaaaaaaaaaaatacaaaattagctgggcatggtggcgcatgcctgtaatcccagctattcgggaggctgaggcaggagaatcacttgaacccaggaggcggaggttgcactgagccgagattgtgctactgcactcgagcctgggcaacaagagtgaaactccgtctcaaaagtctcaaaaaaaaaaaaattgctggattctataaactcaggaatcaattgcactaaaaagcttggaataggtatgaatctattgtgtatatacacatatatatacgttggtaaaaatgttgaaatatgctatgggactctttaaaaagagtaatgaggcctggcgtggtggttcacgcctgtaatcccagtactttgggaggccaggcgggcggatcacaaggtcaggagttcaaggccagactgaccaatgtgagatggtgaaaccctgtctttactaaaaatacaaaaattagctgggtgtggtggcgcacacctgtaatcccagctgcttggaaggctgaggcaggagaatcacttgaacccagcgggtggaggttgcagtgagccgagattgccccactgcactccagcctgggcaacagagcgagactcaatctcaaaaaaaataatgaaactgatgctctctttatgcttcgtttgtcttagatatttggttcccgggtaagagttgactctacagcaaaggttgcagaaatagaacatgcggaaaaggaaaaaatgaaggagaaagttgaacgtattcttaagcatggaataaattgctttattaacaggtctgtgtttgcttttaagaaaggatttttttccatgaaagtttatggaatacttcatatttacttatattgaattagattttttacctaggaactgtcttagataacttcacttaaattatggatttttgtaatcagtaaattgtgatttatgcacacttacagtgaccagaattacgggattgatttatacagttactataataaagaacacttcttttcaatactagtaatggatgcattagtactatagttgataaactctaattatataggtaagaaatgcaatcttgttctaatttgcatttcttttacttgtggtaaaaatgtttacatgttttttagtctaatgtagtttatcttgtaacagttgtgagcataatgttttcatgtattttatttacaggcaattaatttataattatcctgaacagctctttggtgctgctggtgtcatggctattgagcatgcagattttgcaggtgtggaacgcctagctcttgtcacaggtatggaaaaaaggtattgttttctaacaaacacaatagtcactcttgaatttgttatttgttactatatgcaactacctttaaggagtttagaatttcagcagttattctgaaatctattctcttggatacctttaatttagatacatagatacattacatttacgataccaagttatataccacatttgccgtaggtatagatttctttcattgtgtcactgttttaaaggtagatttttggccaggtgcagtggcttgtgcctgtaatcccagcactttgggaggccgaggcagccagatcgcttgagctcaggagtttcagaccaactttggcaacattgcgaacccacatccctacaaaaaaaaaaaattggccaggtgtggtggcaagcgcctgtgatcctagccacttggggggaggctgagggaagagaatcgcttgagcctgggaggcagaggttgcagtcagcggagatcgtgccactgcgctccagccttggcgacacagtgagaccctgtctcaaaaaaaaaaaaagatatgtatatttttttctcacaaacctgtaagaccgttgttaaaatctgaacaaactagagctttaaaaagtcttaagtctacttacatttatctagttcgtacatttgtttttattgcttagtaagtagttgaatgctttgtgtcctttgtagtagtacagttacaatagtaacctttattgaacatttactgtgtgctggagagtgggtcaagtactgaaacattgcttttgttaattttaaaaaatttctgaaagtaataaacgttagcatacgtgaaacaatcaacattgtataatgaaaattagtatacctcaataccctttaatagaagtatgagtgatataattccagttgtgtcaaatagaaattgtgtttataaatcagacatgtctgtctacatcacaatgacatgagttcaggctggttgcggtggctcatgcttgtaatcccagtgctttgagaggccaaggcaggaagattgcttgaagccaggagttcaagaccagcctgggcaatatagtaagactgtctctacaaaaaattagctgggcgtggtggcacatgcctgtagtcctagctacttgggaggttgaggcaggagatctcttcagcccaggagtccaaggctacagtgagctgtgatcacgtcactgcagtccatcctaagtgacagagcaagaccctgtctttaaaaaaaaaaaaaaaaatgcagcttgtttgctttttattgtggtaatggtttaaaaattattgtttattaaatttttacagatttagggatataagtatagttttgttaatggttttcatagtacactctaagccctggaaaataagtttaacacttttctagattttaggtccttgaaaatgaatgaataggttggaaagttggtttgggaatgagaattaaggagacctgggttatgagttgtgaagtcagtagggctgtcacactgtttggaactgccatgaatattagaagaaattatagtgtactaacctttggagagtggacttggtctcatcccagaatgatctcttaagacgttttttttaatcatttgagaagcatagtcgtcttctaaccaagagacattttcctttaattacttgaagtgggtttacttgctttaaagttacttaggagccattgcgtacttgatgctttaaggtgacaaataaacacaatttaagatgctcatgtttatgtaattcattctttagttccacaaaataaagatgtaagaggccgggtgtggtggctcacgcctttaatcccagcactttaggaaggcctaagtgggcagatcacaaggtctggagtttgagaccagcctggtcaatatggtgaaaccctgtctctactaaaaataaaaaaattagccaggcgtggtggtgggtgcctgtagtcgcagctactcgggaggctgaggcaggagaatcacttgaacccgggaggtggaggttgcagtgagctgagattggcgccactgcactccagcctgggtgacagagcgagactccgtctcaaaaaaaaaaaaaaaaaaagatgtaagaagtaaatggtaataatatattgatgggataaacatatcgtaaggtcttgacatgaaattgctctatacccagaagaatgtttattaagtacaccaactgtatgtctatgaaggtgaccacatggtggctcccatccttaaaagctcagtggttgtcaaaggtgtatgatgacattggttcttgcaagtgtcattaaataaatgtcttgcactgggcatggtggcatgtgccagcagtttgatctattcaagaggctgaggcagaaagattgcttgtgcccaggaggttgtgctatgatggtgcctggtgaatagtcattgcgctccagtctaggcaaggtagcaagacactctctctttaaaaagaaagaaaagtctcatgtagaaggatgaagtgaaaagtttcataagccaagttagtcttatttttggatatgacgtcccaaatatctgttgtgtctcacatctagaacacaaagcagtctcagaattttgccagccaaaagtaaaaagaactttatacaaattatgagtataaattagtagtttcaaagaccagagtctttatgaatttattataaaataaataatagagcattgacagatttatcagtaaggcataggaaaagaagggttgattgataatatatgcaattcacattatgaaaggagtagtcagctagagaaaaggattttgaaatggaaacctgacttttgcttagttaggaaatagggaacgaagtggctgacctgttcagtttacagcatggaagatggagggaaaataggaatagaaatgagacataaggactaaattaatttgttcttattaaatttggtctgggaaattcttagtatgcatttcttgtttttttaggccttaggacatttcatttgtgataattagagatatcaggtgcttattaagcagttcatgaagtgtatagtggttgacttataggacaaatattttcatgtcttgtgctgggaattgtatcatgaggtcttagtcttataggttggattcagaagagaatctgaatttaaactcaaaagtaactgctttaagactcagtttaaccttgggaaggtagtattgtatagtgtgtgcttataggtctgaagccagactgcttgagtttgaaccccagctttttatattcatcctagttaggtctttggataggaaggtaaacctcttggcctcatttttatcatgtgtaaaatgggataataatggagcctatccaagaggattattttaaagattaaataattagtcgatatgaagtatttaaaaagagtgccaggaatataatcagcaatcaatttttaaaatgtgaaacacattacctatcattatctatccattactgcttattagaaaacaggaattttaagcctgctgtgcatttaactaatacatgtttatgtttataggtggtgaaattgcctctacctttgatcacccagaactggtgaagcttggaagttgcaaacttatcgaggaagtcatgattggagaagacaaactcattcacttttctggggttgcccttggtgagtgattatgtagatcctggttagggtgtctaaattcttgctaggctctgttgaagtaaaggttattgtagttactagaatagcatatcttacaagtcttaactcttcagaagcatgatacatactttgtttcagtctcttgagtcaacctcatatttaccgtgtctttgtgaacagtgcatgttcaacagttttttttccttgataacttagaaccattatgagccttgattgttggagaatgtataatacaggaagacaggtcagctttcagaacccagtaatataaccaacaccggcataaataatagaaggcaaactttttatccctaagtggtcactgtgtcttttaattttaggtgaggcttgtaccattgttttgcgtggtgccactcaacaaattttagatgaagcagaaagatcattgcatgatgctctttgtgttcttgcgcaaactgtaaaggactctagaacagtttatggaggaggtaagcatttagaaaatgttgaatatatttttaatttcttaaagtacaatataagtcataagtggttttaatggttcttacagaaatcttatattgcttttgcactaaattttaaaatgcttggcatatcttaaagtcagtaattcagtatcttggagacaactaagcattgcaatattttattggaattttaatctttaggctgttctgagatgttgatggctcatgctgtgacacagcttgccaatagaacaccaggcaaagaagctgttgcaatggagtcttatgctaaagcactgagaatggtaagttaatcaaaatgagagatccgaacttaagttttgtggttattgatagttttaaaatgagtagaaaatgaactggttaatactgcttttaaatttgattctggagtttctcctcttcgtgagcagtaactgaagcagattttacattgttcctaaatgtataattttaaaaagctatcctagttaggagtaaatcagtggttcttacagtagagtgagtagttacttgttttcttcattttcatagttgccaaccatcatagctgacaatgcaggctatgacagtgcagacctggtggcacagctcagggctgctcacagtgaaggcaataccactgctggattgggtaagcaatcaaggggaactttgtggccgttgttaaaagtaactcttttcactaagctttttttttcttttggaacataaagagttacaataaccgtataaaagactcttttggactttgtcctcataatcattacatgtgctgggaaaatgtgtgtgactttatatgctcagcatttcccaaactttgttattccataagacatgtaaaactggttagaagatttgtaactatttggtatataacgactataggatttaaatataaacaatacttacattctgaaaaataacataaactattatgttgtttatacaatcagtattaacttctaatttcatagtaaacttactgcaagataatcttgagtacagatcacagatctctagtccatagataaaagtggccaatgaggcagatttaattcatattgaaaaactttctgacaagctgtgctggacattatagagtagtcttaagaaggtagataatcctgtcattgaacaagagggagcaccagttaatctgtgagaaaatgaagcaggattctcacaagaagagaagttgggtaggtaacttatgaattttcttccatttgttttttattatttgatatgttgtcttctattaatatgggtgatcagtagttgacattattgttgttattactattattataactgacacaatggtcttgctctgttccccaggctggagtgcagtggcaccatgataattcactgcagccttgaacccctggctcaagcagttctccttcctcagccttccaagtagttagggctaaaggcatgtgccacaatgcctgactaaattatttttattttcttagagatgggggggcagtctcactatgttgttcaggctggcctcaagcaatcctcctgcctcagcctcccaaagtgctaggattataggtgtgagccactgatcctggccccttttattttatttatttattttttgagatagagtttcactgttgttactcaggctggagtgcagaggcatgatctcagctcactgccacctctgcctcctgggttcaagtgattatcctgcctcagcctcctgagtagctgggattacaggtgcccaccaccatgcccggctaattttttatatttttagtagacggggtttcaccatgtttgccaggctggtctccaactcctgaccttaggtgatctacctgcctcagcctcccaaagtgctgggagtacagatgtgagccgctgcacccggccccttttaatttttttaaaggctttctttgagctcatttgtaggcttatctacctactgagtaaagtagttgggtgtcctaattttattaataggattaatttttattataaatcattagagatgttttgatactttagttaaaactgctttttagtaaatttgtttttctttgcagatatgagggaaggcaccattggagatatggctatcctgggtataacagaaagttttcaagtgaagcgacaggttcttctgagtgcagctgaagcagcagaggtgattctgcgtgtggacaacatcatcaaagcggcacccaggtaccctaacacttttctcagaaaaaattactaacagcaaaacaaaatagggagctgtatttattttataattagagttaatgaaaagcagagacagttttgcctggataaaagtatgtaagttatttaaaatatcacaactcttaacacttaagccagaaaaacttaaggggaaagagggatgggcagctgaggtagctcttaggattgaaaaggcacagaaagagccatgcttggaaaggtcaagtactgaggacagtagatgctgtgatgctttctattgtctttaaacagaatgatagcaaaaggaaactgagttctgtaactaaagtgttctagggcaaggtcatatagccacacctactcccagaaatcttcacaagaagtcagtgccctcacccacagttgaaataacgcttaaaaaatgtataataccttgtttggtctgatactgttttagagatcaggtatcttttattagcaaattctgagtaatttgcaataaagaaactgaattttaactcagccttccagacctaccagaccatgggcttctttttcatattccttattaatctccagaagactttttttttcagatcagtgccctgtgacagctgcttcataactcttgacaatggttagcatcctagtccccccataagctaccaagggtgaaaagtttatctctctatatgatccctgtataatgctgtactctttgatctgttcttaagcttcttcagcttctcgtaactgttgtgtttgcctctaaaagcagtgtttctcaagctttagatccttgaacaagcattaagtacaaatttactagtacccttatcccatctttccaaaagattgttctatgcccccttattgtatggtcatcaaagaataaaagatgagaatagaaggtgcttcttgttggtgggggtgtctgcagagtcccaaggcagaacagtcctgatgtggtgcagggcatcacacagaggagggggctgagtggctagctcaggtctgtcttcctcctcacctaaagccagcagtcccatcctatataacccattagtccatgacataacttggtcacctcttaaaagcccaacttccaatactgccacattggggattcagtttcaatgtgagtgttataggggacacacatgcaaaccattgcagagttataacagttttaatacaggattctagttgtgtttgtatttagtataatactttggataaaatcatgctcttcatttttcactattgacttttttcttactctcataggaaacgtgtccctgatcaccacccctgttaagcattcccacgtgctgtcgatctttggaccagtttctagcaaagttgtgtttgaaagatactctattaaagaagactgtggaatctgtttatcggtgcccattatatccttaagtttggatatttagctgaccttcgctttaacataggtctaatttatttgccgtgtcattttccatacaaatcagttgatttaaaaaagttcatttctcatactgtgcattaaaataaaaatttgaacaattacttggtt

SEQ ID NO: 107 - DNA, 32744 bp, Homo sapiens
  source 1..32744: mol_type = other DNA
cgggcgccgggcacgcgggccaggccttccccacaactgatggggttgaaatttcctttccggctcagcagggagaaaagatatggtggggtgcttaacagaggaggttagacaccggcgggaaccagaggagcccaagcgcggcgcctgggcctcggggctgcaggagtcctcggtgggggtatggaggtcgccggggaaggaggacggttcagttgctaggcaacccggcctggacccgcctctcgctcgcgttgctgggagactacaaggccgggaggagggcggcgaaagggccctacgtgctgacgctaattgtatatgagcgcgagcggcgggctcttgggtcttttttagcgccatctgctcgcggcgccgcctcctgctcctcccgctgctgctgccgctgccgccctgagtcactgcctgcgcagctccggccgcctggctccccatactagtcgccggtaacggatgggggcctggaagggaagggggaacgtggtgttggctgggcggcctgcgcagatgggagggccggagggatggagggactgggagccgggagtcggggccgctggccgcccgtggcctccggggtcgtcctgtgaggtcggacaggaccgcggagtccggaccccggagcctgagaggggccccggggccgaccagcgcttttatcggggacggctgaggcgacgtaggggttggcgcggcctggaggcctaaggttctctgagctccaccgtcttttccgcgtggaccggagcgaggccgcggtgacgcccgggtgccctgagactcggctgcgccgcgaggaccgggaggcccccggcgtacgggccgggccgagtgcagagccggccgcctcttggacacccccctgcttttccctcaaaaataataccaggagggaggccgctgggagatgaaaagaacggcggaggctgcgaattccgacgggagggaggggctgtggagggacgagtccccgaggcggggagggggcgggggaggctgcgacgctcccgggctctccgcccattgggggcggccgcgcggggaggggaaacccccggcggcttcgctccacacgtggtaatgggcttcatggccactggctgggcctggttggagacccttgccctcggtctgtgcttactttgaaagttgtagagacggtggaatgtgaaaaggaagggtaagcgagtaagccctgtccctgggtttcaaactcttccctgcttctctttggtcttaatctttttattggtaccagagattgtggatgttagctgatgataaggaagggcctccactgctagtattttaaaaagttaacgcgtatatagcgcttatattaactgttattagcaaaaggttgttattgtgtttcccaggtactgttagatgggtgtcttgatcagggttttttatttggggagtattgatcctgatcgatctaaacccctaaaccaagcttgtccaacccgcggcccaggacggctttaaatgtggcccaacacaaattcatgaggttttttttttttttttttttttggaaaaaaaagctcatcagctagttaatgtattttacgtgtggcccaagacagttctagtgtggcccagggaagccaaaagatcggaccacccctgcaaacggttcttagatgaaaataaaatgtttggccctttatgactttaattgttcttggctgtcttataaattagttcctttattgaagtcactagaataagatacttaacggtttcctttttaagatgggaggtgggatggaatgaggtgttagtataaactttgccaagtttgtagcctgcaaccttgtcaatgaaccctactgccctaaagatctgggggatggcagtgtaggggggctgggactgaggtcccatctgggaaggctagactttgagagtgcaaaaaggatgaaccaggcgcaggatgtcctcaaggagcccgtattttagacggtcactgatcagttttgaaacaactacattttaaaaatctcactgctacatttgaagatatcccactgctgcattttaaaatttacactgcttgcctggtttcacaagagctgtaaaatgaaatttggccttttgaaaataggtggattcaaaacatctttggaaacgagtatctgggtcctctttttttggtcagcttaaattaatactcctatactttggaagtaatatacattacctttgattgaataagggaaaaaccttttatgtatagggtaccatttaaaaatcgaagggaagtaaatgacttttacagttattttcaaggcactcttgtgtttcaagcttgtttgaagttgcccaagtttaaataaatggcctaaatctatagtttagttctaagaatactgtcctttggagaatgtatggaactaaaccctggtaggtggacttggacatcttctgtcataaaacctgactttcatagattctccaagtcaacattatgttagtaaatagaaatttaaaagttttcactataccaatttgaatatctttctaaattttatctgctacaaagtgcctatttttatattaggcccattgatttgcagaattataaagctaatactgaatatggtaaattactgcacttggcctttaatgagatttttgaaacgaatacctgtaccataactaatgtaatccaaaatgccatctcattttattcagcttgctcctgttggctcctggtaaaactgagttgattctaaattctcaaaatatattcaaaactaagggtctttttgtagaaggggctaaagaagcagtatctgttggacttcaaaggtctgaagatgtcaaaatacaatattttattcacttcttggttgtaaatttgaaacaaaggattagagagaatgactcatcaatatcaaaatattaatgatcagtgtattcagatcttcaagtttaatcaaacctgtaattgtgttctcagtttagtctttgggtaactatctagcacctgtatggacatgtatcttatgtcatgagcaaaagaggcaaattggttgcttagatgtagaatgttaaattgtgatgagagctataaaggaaggaaagggtaaaggggtcaaagagtaatacagcgtttacacaaaggaacctgttataatttgatgattttaagttccatttcaaactagtttcatctaaataagtttttgggcagaataggggttagaaggagagagttgttactttacacctatccatatgtaagtcgtttagcacaatgactacagaacattagagtacattagtgggcttgccatagaaaatggcttctatacctttggttaccaactctgccttttacttcctgcatatttgtatatatttttacttattcagaagttttgtacattttaatttttattgggaaacagggttatatatattttttccttgtggagacaggctcttgctgtgttgccctggctggtcttaaatgcctcacctcaagcgattttgccttggcctcccaaagtgctgagtgtatgggtgtgagccaccacacctgtctagagttataatttcagtcttggaattattttctaaagagggtacagaagagcataacagggataaataatgtaataggcaacactgattgattattcaggcattgttttaaattctgtgtgtattattagctcatttaatttacttagagacaggtagcatcaacattttaacaaggaaaaaaaataggtgtggagtggttagataacccgtccgtggttacgtacgtgagcagtgataacttatgatgagataatttttatcctggttttgaaagaatgttgacttacactgttctgctataaatcagcatgaatattagttcattttctgttgcttagaatacctgaaactgagtaatttatttaaaaaaaaagaatttatttcttgcagttatagaggctgagaaatccaagatcgaggggacccatgtggtgagaaccttacttgtggagactctgaaggttcccaaggcagtacagggtatcacatggggagggggctgagtgtgctaactgggtagcttggctctccagctcccctggtgggaaactgggtaatttataaagaaatacattaatccatgaatggattaattcgtttgtgagggtggagccctcatgatccaatcacttcttaaagacccccatctctcagtgctgccacataggggattaaatttcaacttgagttttagaggggacaaatactcaaaccatagcagcatgaaattcaaaagcactccaccttgtatcccactgtgctctagggaaaagctgtatagcagttatggtcatgaagtcttcttccagcatagaatttgtttacatacacagtcatgcatggttaatgatggggatgtgttctgggggaaatgcatcattaagccatttcatccttttgtgaatgtcatagaatgtatttacacaaacctagatggtacggcctagtacatacctgggttatatggtatagcctgtttgttgttcctaggctacaaacctgtatagcatgttgctatgttgaatactgtaggcagttttaacttttttaaaaataagttggagtgtactctaaccacaaaaagcatagtatagtaaatacataaaccaataaatcatttattgtccttatcaagtattatgtactgtaaataattgtaagtgccatacttttatatgactctgcagtaggtttgtttataccagcatcaccacaaacatgaataatgaattgagctgtgacattactaggcaataggaatgtttcagctccattataatcttgtgggatcactgttgtatatgcagtcctgtgttgactgaaacgttatgtgactgcagttgggtaatggtttcttagccttatgtcagctctatgtatccaattagttcagtcagttgcctcccctcttcagtggaagattttgtttttagttcagtttaggaaggaagatttcctttcaggaggccaggtgtggtggctcacacctgtaatcaatcacagcactttgtgaggccaaggcgggagcccagaatttccagaccagtctaggcgacatagtgagacaccctgtctttacaaaaaaaattaaaacaatatagctgagtgtggtggagaatgcatacctgtagtcccagctactcaggaggctgaggtgagaggatcacttgagcctgtgaggtcaaggctgcagtgagctgtgatcacgccactgcactatagcctgggcaatagagcaaagccttgtctccaaaaaaaaaaaaaaaatgccttcaagcatgtttttagggtcagttatgtcttttgagatcttatacacaccatatatgtatgaaccttttattataaagtgacctttttatcttaatgtttttccttgaagtctattttttcctgacattaatacgtgataccaactctgattagtgttttattctgaaactgtcttttacattacagatttttttttaaggaggtatgttgaagtgcagtggcacgatcatagctcactgtaacctcaaactcctgggttcaagtgatcttcctgcctcagtctcccgagtagctaggactacagcaggcatgttaattttttgtagagatgatctgtgttgcccaggctggccttgaactcctggcctcaagcgatcctcctgccccagccttccaaagtgctgagactatagacgtgagctaccgcacatggcctcaccttcattcttaaaagatgttttggttggggatagtattttaagagccttagttattttcaacatattgaggattctgttgtcttttagtgtcttattgaagagaagacagctgtcagtctttttgtgcctttgaagttaatctaccttttttgtgtgtgcttttgagatgaatttgtttttgctatcttgcctttttactgatgtatccggagctggataaatatatgtgtgtgtgtgtgtgtgtatatatatatatggattctttattttatggttttgatttgtagggctacttgaatctgtggattggtgtctttcatcacttaaggaaatggaaaattattgcgtattaacttcttcaaatattctgtcctcctgctcccagaacttgtatgaagtctttattaggcttcattggatcttaacatgtcttttcatttcagtattttcagtcctttagattctgtggctctgccatattttcaaagttttcttctaggcttcatttcagctcacttaattctctcttcagctgtgtatcttactcttaagccagcccatttagtttgattcattagttttatttctagaagttctagttttccaaattttgttatatcacctttaatagatgacttccttgcagacagtgtgttttcaaacttagatcaaagacaaccaggcttactatgtctgtaggtatgtatttgtttatagtctgacaatttttaagtctttgtgtaggattgatttctgttatattttctgtttttcctgttggctgtgaaaattacttgtatgaattttttaaggtctagaaggaagctttcatttaattttgatatacaggtgtctgaatataccagggacagatcattttaagtacatagcttggggtttggagggcaatacagatgaggtaaatttgggctgtttgtccaggagaatgaatttattcttgaggatatagcattttggggttcctgcttaatttgggagggttaccataaagatagccaccgtggacaggcccagaattttaactttggttaaaaccaaagttcacgttgctgataattggcagttgacctcagtgcaaaagtgccttccttctgctcctgttttgccctcagttttgggctggtgattccttactatcttgttagcatttcagtgcttttaagatttttaacaaaatgtttttgttaaaaaacatctgtacttttaattcttttcctttttttttttttttttttttgagacagggtcttgctcttacccaagctggagtgcagcggtgtgatctcggctcactgcagcctcctcctctgggttcaagcaattctcctgcctcagcctcctgagtagctgggactacaggtgtgtgcaaccacgcccggctaattttttgtattttagtagagactgggtttcaccattttgcccaggctggtctctaactcctaagctcaggcaattcgcctgccttggactttcaaagtgctaggattacaggcgtgagccactgcgtccggccatatttttcattggtagaattgatctgcataatctagtttgtcgctttcaggaatgaaagtttttcacagagatcttggaatgcaatttaatgtataacaaataagattctcactgattttatttaatgtcaactgcagtaaaatattaatacaggtattaacctaaacttgtgtttctcaatgtggtctacctgagaaccacctctcagaagctgagtttcttgtttagaatgcagatttttgggtcccacttcctcagatgtttttctgctttatatagatgatgaaatagagccagaagttgtttgtcttagtttgtagattgctacaaagttgatgtcagcccaaatgatctgactacaactgactagaaaattaggtctatcttacaaccaagaaatacaatgtagccagaatgggcaggttagagcagccttctctggaggagtaaatgcctcctgttaatgttctgtaaatgttctgtcttggatcctctttactaaagtttcattttaagaatttaaactgtaaatgtaatgctgcaaatggacattgaggttagcagtgtagccattctgtgaacacattaaaatgttacaaaaatttaaatttggaagttttaggttttgtttctgtttttgacaattgctgggtttagtagacactatatattaaacctagcaaatctcagaataaatttgtgtattggaaattattatataaatctgtgtgttggaaaaccaaatgcagtcatgcaccacataaatacttagccattatattaaagttgcctatggtattcaatacagtcacatgctgtataggtgtgtagcctgggagcaatagtctatatcatagcctaggtgcgtagtaggctataccatctaggtttgtgtaagtatactctgatgtttgaacaacaatacaatcacccagagacacatttctcagaacatataatccacacatgactgtaatggtgaatgggaaattagttctcattacccccagtcccttctttctcattaggttactctggttaggtttttggtgtttgttttcagaaagggtttatttgtattaaagtatgtgcgtatatgagtggagatatatatatatatatatatatatatatatatatatatatatatttccatatccaaaggggatttcggcatacatcctataccttgctttagtgttccttcatatcaactcagatctgtttcatttgtgactgcaaagcattccatttttgcatattccattatagtactaagtttataataagctttgtgtgctaccccaaagaagacaacgctatgattgtcaagatcagatttaattcctgtaatcatgaattttgtcagttgggagagacagaccataggtcaaactaatttataattacagactgagacatcttatggtggaaagaaaagaaagctttataggagtgtgtgtacaaccaagaaatcttacttaaccggaatgtgcaggttggagaaagcatctctggggagtgaaactttgaaatgagagccaaaggatgtgcaggacttgttcagagctgtggaagaaccttctaggtgaacatggaaagcaaaggcattagattctttataattttttcatggtagagctcataagtgaataaatctggagatggacatattttgtttttttaatttttatgtttttaagagacagtgtctcattgtgttgccaaggcttgtcttgaactcctggcctcaagcggtccttctgcttcggcctcccaaagtgctgggattgcaggtgtgagccatggtgcctggctgagatggacatgtttaaggcttttgatattcctattgtcaggttgctctccagaaaagatacgggaacactagctggaaataaggatgcatgtgcactacaggtttccctgtattaaaaagaagttattgatgatgtggtagacaaactggaatcctacttggatttctttgatgtcagagttcagtatttttcttatttttgattaatattcataattgctaaacactttgtaaatgctgactcattacccagcatcactagaaaaattcatcagtactattaggaattatttataacaaatacaaaatatttacagagttagatacattaggaagaataattttctttataattactctaaaggatagatactaggtcagtaataatgtttcccccaaatattagcacttaactgctaaaatcaggatgttttccatttttaactctttgttcataggcataatacgttgctatgaaagtaaacacatgcaggattttgtgaattaaatatgtattaagattttaatttttaccagataacttgattctatttattcataatttttttagagacagggtcttgctgtatttcccaggcaggccttgaactcctgtgctcaaaagatcttcctgtctcttgggcagctgggattacaggctcttgggcagctgggattacaggctcgtgccactgtgcctggctaagataaacttgattttaacatggattctatctaaacttggtttagttttttttggtaatctgtagattacctgtggcattctaccatttttttctgcctggatataacacatctgctttaagatttgtttttccaaaagcagtattctccaggttcatactaatcttttagtgagaaggaacttaggatatcctctggtgagtcttaacagtaaacttactcaggtctggtaaccacaagtcttgacaatgtccctagcatatctaggggaagctggaggttggtggttgtcagttatctaacatgaggtacatgtacatttggagagatagggaaggcttacctaacattaagattgggacctagagcttttgaaatagtctaaatggctatttgatccagggattaagtcttttaaaaagatatccagagggcatagtgagtacagtaggcatcagattttggttttcttaaacatgaattacataaaatgaatattgctaaatacgaaatggataaatggatttaagatgctacgtagtctaaaaatttaagcagaaattgacctttcttgattgttgaaagaatttgaatgaagatccttttgtactgttcctttcctatgattctagcaaatgttagttttgtttttaaccaatggtgctattatcatagtctttatacaacagattctaaaagcttagtggtaacttttttgttttaagtaatatcctctgaaaaattatttttggtactagtaaggaagaatttgcatgttccatgagttttttcttcttaacactgatagtattttaaaggaaatagacatttcttgggatagttttcagtatggtattgatttaaagggttttggtttcttatttttttttaataaatcatatactttttttttaacattgatgtttctctccatagatatttggagttcttacaacatggcagacattgacaagtaagtggcagagagttggttctttttcagagatttggcatcactttgtactctgttcttaacagcaagtagtatgaattatatattatgaaaatgtagttactaatgcttagtacctacttttacaaaagtctagtgcagtgtattcaaggtaaaatatagaatatatgatcattagcatatttatgatcatatattcgaaaccatcgtatatactaaaccatttgtcactatttttaagaaaatgctgagcatgataatggattataaatacttgcagaattcatttttattgtatatatttcccaaagatttactgcttgcattgtaatgtaccaaacacccaaaatgtgtataaaatgtatttatatatagagcttaaggaatattcagacaagttaaaaatagaacattactatcagaagccttgtgtgccccttctcaattgcacctttcccttgcagacatgtaagtgctatcctggcttttgctaattcttttctttgctttccttcagagctttaccacctataaataatcagtgtttaattttgaaaatctgaatagtgatcacaaagttagctatgtaaagcaacattgccactttgccactgttaattgaaggctataagataggataacaaggaagaaagactatctgggtcatagtctggcctcaagttttgtgaggctttataaaagacttattgtggagaagtattgggcaaggtcatgtgtcctgggaagtataggtttaatcaagttggcatgtggcaggattctaatgtggatggatgttttatagaaacagggtcaggaagaatgggatgaggtacacagtgtttgttgcgtgtaattttacagtagcccgtgttaaaatagagcacttgggagtgaggggatgctaaattattttccatagctgttgtaggcatcagcgaatgatagtgggagggctggaaacttcagtacaagatcaacacatagaagtacaaataagaatttgggccactcttacgcattttatcttcagcattaaaaaaaaacagatgagtgacttatgcattctgtcttcagcattaaaaaaaacgagaagagtggaaacggcatttttaataataatggttcccaaagtgattgtctcctgtgtcacacctctaatttggattgcttaaccttggtgacatggctgtcattggatctattttactatcttcctgaggtttcaccttgtttctcctcttgggtttgttgtttgccatatctcacattgctttctcggtttgttagtaccttcttggaagagtacaagggagctaaattattttaagacatgtcatgactgaaaacgactattctacctttatgccggatagtttgggtgtaggatagtaagatgggatcatttttcttcagaattttgaaggcattgctccattgtcaccttgcttccagtgttgctgtgttgaagttcagagtcattgtaactaaccatttgtgtgtgataattaagaaatatgtacatttacactatatatacatttctggaagctactctggcttcagagttctgaaattttcacattattatttttttctcttaatgttacatattcagtggtggaccctttcagtgcagcaattcagtggcttttagttcagggatattcttgattgaactttgtgattgtctcatttgttttctctttctggagctactattagatgttgtgtgttggattgctctcatgaccttttgtcctattttccatctctgtctctttgctcttctttctggacagaactgaagactttcagcttgtgttgagttttaaaatttctgttgttttagtttccaagacctgcttcgttcttcctgtttttttgtttttttttttttttaaatagcatcctcttcttgtttcattgatgataatgtcttttctctggatgtttcttccatctttatagtccatttgctcttacattttctttctctcatttgttttggtctcaatctaggatgctttcctcaaatataaatcaatacttggttggctgctcattaagattggattgggtggggtgtagggacacttcagacatgtttaaaaaagaaaattgattggaaaatttgagcgttggagtggggaggcttgttaatttgggatttcagtgtagggtcaccagagtgggcatttgttagaaaccccagtgttagaatggtcatttttttttttttctgggctagtcagattcatcgttgaacagtgtctgggtaaagatctggcttctggtgttcctttaaatgtagaggaggctctacatttagcattctaatgtgtacatagtcctatatctttgatactgttgactgtgtctgttgtcttccagtccaagttctgaattttaccctttcctgagaggaaactgaatatttctgctagtgtagagaagatctaatgatttaactgcttatcagtttttactttcttgttttagcgaccttctctcctgtcccaccccttgccctagttctagaaatgtacctggtgctaccagttcttatccttttgaagactgattgggctgcttctcagctttccccactgctaatcttagatttcagttctctcaatgaaattatcacttgtctggtttccagcttccaaaatgttgctgcccttgttttctttgatttcagtgttagcctgctaacaaaacaaaacaaaaaaaccctttatcataattttagtggagattttagaaggattaagatcagatgagtttgtggcatctgccatcttaactttgcaactctcattttaaactttaaaaagagtaaattggttgtgacagcttgatttcccccttccttattatttaattttggatgcctgttagccctgggagggtggaagtcagaggggagtcttgtgcttgaaaaccagagtcagtaaacctttctctgtaaaaggcttggtggtaaacattttcagcattttgggccacatacgattctctaactgcagttggccctctgtgtctgtgggttcagcatccatgagtttgcatctatgaattcaaccaactgcagatggaaaatattagggtaaaaaacaataaaatataacagcacaataataaatacaaataagcaatagaacataacaactattgtttgtttgttttgtttttaatagagaattcttactgtgttaatcaggctggtcttgaactcctggcctccagtgatcctcttgccttggcttccggaatgttgggattgtaggcatgagccactttgtctggcccagcataatacaactatttacataacgtttatatggtatatagtattattataagtaatctagaggtgatttaaagtatgcaggaggatgtgcataggttagttgtaattactgtgccattttatataagggacttgaacatcccaggattttggtagggaggtttcctggaaccagtccaccatagactctgagggatgactgtactcaactctgctgatgtagtgtgaaagcagacaatacataaatgtagtgcatctgtgttccaataaaattttatttacaataatagggtgggctggatttggccacatgggcatagtttgtggacagctgttttaaagcctttggatatagatgttcaattgattaaagacacgagaggaggagatgctccagttatctgtaaccagtgaccgttaagtgtgtacacttatcaaacacttaaagtttatactaaatcaaagttcttccagaaataggctgggcgtggtggcttatgcctgtaatcccaggattttggaaggcggacgtgggaggatcacctgaggccaggagtttgagaccagcccagcctgtctctactaaaaatacagaaattagccaggtgcagtggcgcactcctgtagtcccagctattcaggaggctgaggcacgagaattgcttgagcttggggggcagaggttgcagtgagctgagattgtgccattgcactccaggcagcctgggtgacagagcaagacactgtctcccaaaaaaaaaaaagctttcagaaattgtatgtatcatttctgaagactgaattatgctggcagagtacagttgatttttttctgtacttgcatgaaaattaagtcattatttgtccctgtggaaaattaatttttcaaatgctgtttagacacaaaagcaactacatttctaatccaaatgttaaaataaaaaatttacacaggaattatacaatgatgttttacattgacttaggaatccttattttcctttctaatgctagatgtaatctcatgttcaataattagatttttggtgattttttttttttaagatgaaatgggaaggatgctatcttattaatttttaaccttctctttgaatggtgctatcatcttggctttgttctaaacaagagctagactcagaagtcttcactttattctttctcacctccactgtgaagtaaagaaaaggaaactccaaagatagtataggctagtattgttgctccacagccataagggatccaggactcttctgttttcctaactcctttttctttagctggtggctttcattctctaggatgcctcctggtccagtgtggctgctggagcttgagccatcacattcatattctaagtgggagggggagagggattaagataaaggcttcccagctatctaccatcctgttaaggatacttcctcaaagaaatacagcatttctgcttttttatcttgctgtcaaaatagtgtagctaaaggtaggctaggaaatgtagacttttagcttggtgtgttgccatctcatataaaatgagaatgttgttactaagaaggaaaagtaaaatcagtagatattcggttgaatgcacgtacttgttgacatcacattccccaaaaacctgcaaaaccaattttataaagcttcaaaagtataaactttacatttgaccagatgcttttaatgaaagtgtaagcacttccagtgtgtacttgtttacatatgaagttagaaaacggaattaccttttgaatttcctatttcatgtctttgaaagagatactaattttgaaaatgaattttaagtttttctgtaactttttttggtaattggtacatttgaaccttggtgtgatactatgatattatagcaaagaacagtctgaacttgatcaagatttggatgatgttgaagaagtagaagaagaggaaactggtgaagaaacaaaactcaaaggtattactttaaattacttcaggagccagtgattgctggcacatgtctactagagggtagttataagtaccagtctatttttttggacccttgctcattgtcccatttatctactggtccatacttctagtgtgtgtgtgtgtgtgtgtgtgtgtgtgtgtgtgtgtgtgtgtaaggggcgggtaggtatagatacagcaactcaattagaagtcattgtttgcatcctgcactgttggagtgacttggtgtacttgtgtcaaacagctgcccatgagttttgtctgaatttagaaatgttacaggttgtgatgtggtgcttataacagtatgtttagtgtttaatatatggagaacatgtagtgtgtgtctttttaaagatccactccttcaagcagaagagccatttattaaatgtaggtaatattcacaatttattttagcagatatttttaaaaggagtggtggtgggggattgtactacttagggtatgtcttgtagatctgcgccaagaatattaaggtaccagatgactcagcttttcatttttaagccggatggaagttaattgtgaaaagacttcagaacttgtattaatagcttcagcttttgtttagtaacattttcttaacagatacagaactgtatcctcagtgaccaatattgatatttaaaaatctgtattggttatcctggctgtgtgtacatcatctagtaattgaattattatcagaagtaaattgacctcaaaaaaagtaattgggaaaattaagtttatggcactttgtgtaataactgtattgatgatgaagagaaggttagtactgtaatttgttttgtataagtctagtgcatatttggattgagtatgtttttaaaaagccattgaaaaccacattttgtttggctttagttacagtctttgactgtcccaactattaactttattaactttattcatacacatagaaatacattacacaagcatcaaacataaacattcagatcactcacttcatctttctcctgggcctaaaactgtcagtatatttgcagttttctgatatgtgttgtctgcattcagaggactgtcaagagtcatagataggcatctgaatgaagctttgagcttcttaaaatgcaaggtgggtgaaacacaggataccaggaagagaaaggatattgttcatatagttgtggcagtggccttgagaactgtcttgactagagatagattaggaatctgaattattcctgaacattgggttttcctttagtgtattctctttagctttccctgcccgtctctactcattagatataccagcaatttatgggccagttaggaaaacttcatgagattggattgtcctattaaaaaagcataatacattttcataaaatccttctttcgatgcccttttttttttaaagcacgtcagctaactgttcagatgatgcaaaatcctcagattcttgcagcccttcaagaaagacttgatggtctggtagaaacaccaacaggatacattgaaaggtacagcttttccatagtccttatttatctttctataatcaacgttgcaggcgtatctatttttaagaccatctaggatttagatatgcaatagtggaaacctattgtctgttagtatccagtataggattattagaagtttaaaattgtgcttagtaccacctgtttgcattggtcttttaaagtttatttattgtggttcaagtttataggaagtgtactgatcttgagcatttcagagatttgtttagaggtatgttagaaatgcacagaattagaagaaatacagatttcttatttcactgatgacataaatcattattaatagcatgaatatcttactcagcttacacatttaaaaaacttttttgtgattttaagatccattcagttactgtctatatgttaattatagttagtagcttctaaatgttgcctagttctctgtggtatgtgttcgctgtgttttattatctgcttttcctatgatggacttatttatcaacacaaattctattgttatagacatctttgtacatgtcctgtaaaggaactgtgtgagaatttctttgagatgtgtgctcagcagtgggattgccacctacatagagtgtggaagcctttaagtattaaacttctagcatgatttccagaaatactgtactcaatgcaagaagatagattcatcttcatgtctgccaacaattggcaccatccagcttcatagtgtttttgtttttatttttaaatcagtctaagaggtgtggactcattttgtcttatttgtattttatgatttctaatgagtttttagcttttctacataatgcttgaacctttttcgttgcccattggtaccctttttccactttcttgttgggattgcaacttttttttaatgctttgcaaaagtctttgtattccaaatgttattcccttgtcagtttttagacattctaaataatgtgtcatttctacaaatttatccatggagtcctctggtaaacagttaagttttattttagtaaaatattttgccctagggcttgtacttttgaaactttttaagaagtccctcctggtttctgctacatttcgtattgaatagtttcaccttttacatttaggtcttaaatccctttagagtctacctttgtattagttgtacgtaggcttccagttccttttttttctgcctcattttttgagccaggtttgtttgtttgtttgtttatttatttatttatttatttatttatttatttatttattttgggtcctcctccagtgacatgagctagttttttttttttttttaaacactattcactaatcaatccattgttcccccatttaggtgtaccacctaccttcattgcatatcaagttgtaaacacccgtgtttgtctttgagcagcactcttatgttttattggtctttgtctcttgtcattgtcatacttaattactatgactttatagttgtcttaatatttggcagggcaggttgcatcctttcatacttctcccccaatcatccacatttttgacagttaagtttaccagggttgtcaacaagcaaaaaaaccttaaaacgttgataggaattatattgcatttgtagatttacagaattatatcttttaatattgtctcatccacatacttctaattattcaggtcacattctgtgtctttagtttcaaagttatcctcatagagtctattggttaagttaatttctgtatattttgtgtggctgttgtgaatagcatcttttttgtattttctgtttggctgttcttgatttacagaggattgctgttttttttttttttaagttgctcttgtatccagtaactttgctaaatttattgtagtaatgtgttctgttttgccccccagtcacaagattttatctgcaaataatggcagttttagctctgttcttccacattacattataccacatacttttctttacaacattaccaggactttcactactgtgttaaacattagtattctttgtcttatttctattcatactgggaatgaatataaaatctccattaaattcagtgcctatttactgttttttaatctgacctttggtttttttttttaactgtatcaattaagatgctctattgaacttttcccttcagtatattaagtaaatagtaaatacatgttttggaaatacttattttggatatcaaactagccttgcattcctgtagtaaattgaatcatgatgtgttattgttacattgttgagtaattgaattttacagttcttacttgttagtgaaatgagcttgtgttgtgtgcatgcatgtatgtatgtgcataaagaaagtttcaggaagtggtaatatttaactggtttttggagtcaagatttcaattgcctaaggaatggagcagcttttaaaatttttcgtttcctgaaacaacttgcataagatagcaattagcagttcttagggtagaactcttctaaaaatttactttgggactttggagttggggaagtagaggtccaggggagttttggagaatttttttttttttaaacatactaatttattcaagttctctcatcagttttggagtttcatattttaaacatgtacatatttaggtttaaaattgattagtacatagtttacaatagttttaaaaatctggttttcatattctgtattttgcatcttaattctgctggttgtcttgatcttattaagtttttagaatattaattttgcttttggttttccttttccatactgtcttttgttactgctgctgttatctcttttttaggattgctctatgttattctttccagttttttaaattgaatgcttaattcatttgatttttattttttaatttgtgttttttatggccttaatactcttacttttgtaaatgttgagtgtgaagatctgtatgctgaaattaatagctcaagcttattgtattgttcagcttctctttatttctgcttattggttgtctgtttgacctgacagttttttctgtcatttgtagattgaaatattttggagccatattaggtgtatgatatttgtgatgaacatttcttgttctcttgtttcattttactgatatgtgtcttcctttgtgttttataatgttttttgggggggtcataatttttatttgtctgatattacaataataacccccagcttttatgacaaggccttactctgtgatccactctggagtacagtggcacactcatggctcactgtgatcctcccacctcagcctcccaagtagctgggagccacaggtacatatcatcatgcctggctgttatttttgtagagatgggggtctccctatgttgcccagactggtctcgaactgttgggcccaccttggtcttccaaagcgctgggaatacaggcataagccatcacccccagcctctttttttttttttttttttttaaacttttaacctagtatgtcttttttttccatcttttcatctgtgtgtcttcctctagtatcagtgtttgctgcttttattttttggatacagtgtctcgctttgtcatccaggctggagtgccatggcacaatgacggctcactgcagcctcatccttcggctcaagtgattctcctgcctcagcctcccaagtagctgggactataggcatgcacaaccatgcctggctaatttttgtatttttgtagagatggggttttgccatgttgcctgggctagtctcgaactcccgagttaaagtgattcacctgcctgggctccccagagtgctgggattacaggcatgagccaccacactcggcctcaatgtttgcttctttattattagttgcatttcttagaagttgtattgtttttggatttattgctgccatctttctctattttttaatttattttactttgggtctttcttccttcttttctgcttcccattggatagatcaagtcgccttctggttccaaagttaatggcattgatttttgttactatggtagtggcttataacctaatatctaagtttatttacccctgttgatttcttaaatttaccaatatttatattgttcataaatgtgctttctctggccctctatttttcccttcaaggaaagaaatttaccaagatatttgaccacacccataccttaaatagaatctgctggatttttaaaaaattttcctcaaaagttgcttttagtaatatatagtgagtatctgtggcaaacctgaagcctggtatacctgatataatttttgtcctgcttttatatctgaataatagtttggttatgaaatagtaaattcagagttcttaaaaactacaatttatttttttctttatttcagtgtttcttttaatgcctgttgttagtctgattcctttttctttgtaggttattctttctcactggacacctttagaattttcttttgtctgtgatattcataaatctcattaacatgtctaggaagcagagtaaggatttttatattgctttaatgctgagaaatgtatcattctcatatgtgaagagatcgtaccccttctctgtcagctattgctacttttgtcgtccatatctcagagcttttctattttccatctgtctttcatgctgccttctggtagaacttttcaacatcatggactttatcttcagtcgaatctatcctgtttctcttatttgttgcctattttagttattgtatttttcatacttaacattcccagtctgttgtagatttcttggtcttgttgcatgtcaatcttcctcatctctaagtatatttacattcttgtttaaattctctaattatgctgcttcagatgataatcatttcattcactctttcatagaaattgtacccttgaagtttctagttattctctgagctccagcacattaggcaataccagttaccctaataatgaatatttggggagaaatgaaggtctgtgacaaggagaagggcgcagggtgagcctaagtagtagagcactagttgccttacactgaaagtttgctgccagtccaggcaatttttatggtgtgctttgtagggtgggggactagtctcctttggttgtcaattcatcattcctagattggatcaaatacatgtttgaaggctttgaaccgtgcagctttcatcaaccctcgcattgggctcttgtgaagggtgaagatgacagacaacgattgttgcaaggcaggagcagaacttaaaaagctttcttgcggaactgctatcttccagtttgtccgcactgctacctgctgtggccattccctccctaagttgttggttaccctgtacagttaaacacaacctccagtcttacctgaaattgcttatggtgtgtgtgtgcctcagtagttacttcattcttgttctaaagtttctgggattagctttttgggggagcaagaaaagccagaagcccatgccagttcaccaccttggcagaatagtgcttttcacttaaaattaacagaaatagaaagttgatatcttcaagtgtttgttttttatttctaataatcttaagtaaactggtggctaagtaagtgaattatttgatttacaaaagtttgtggcaggaaagtttaacctggattttgtatctgttgcacagattccctgaagttatttaaattttaagtgtgaacatttattgttagagaggtttaatcattctttaggagactcataacctagtgtgtataaccttttaaaaatcagtgccccctgttcacattagcagacatggaatcaacctaaatgcccatcagtgacagatctgatacagaaaatgtatacaccacgtaatacttgcagccatacaaagaacgagatcatgtcttttgtgggaacgtggacggagctagaggctattatccttaacaaactaacacatgaacagagaaccaaatatcgtacattcttacttaccagtaggagctaaatgatgagaactcatgaacacaaagaaggaaacaacagacactggggttacttgagggtggagtgtgggaggagggagaggagcagaaaattaagtattgggtactgggcttaatacttgggtgataaaataatctgtatagcaaaccttcacatacacccctaaacctaaaataaaattttaacaaaatagtgcttcacagttcattgtatggtgtatgaactttatctcatcaaagctgttatttatttttgagacagggtctcattctgtcagccaggctggagtgcagtggtggtgcaatcttgctcaattcagcctcgacatcccaggctcaggtgatgctctcatcttagccttccaagtggctgggaccacaggcatgcaccaccacacccagctaatttttgtattttttgtaaggacagggttttgtcatgttgcccaggctggtcttgagtttttgggctaaaggaatccacctgcctcggcttcccaaggtgctgggactacagttgtgagccatagcacctggccctaaagctgttattttaaaaatacatgtctcctctttatagtatgttacacttgtatttaataatgtaattactaattcctaattaaatatggagactaaaaaaataatggtgtgtggaatcttgtcctttttcctgatatgtctatgctcccctcctttttcctaataacttgtatgggtgagatatatgtaaaagaaaaatccaagtaatcattgttctcagaattaagatggtctgtccatgacttcagcaatgacaagtccaacacttaacttgggtaaagatttagggttgacaatatgatttacattttgtttatcaatttacccagttacatttctacttttgaaatatagccagtggatcaatgtatttatatctatttgatttttatttactttgaatctaccttttgcttcagataaaaaacctgtcattcactaactccaatgcttcagtttcagtatgacaaaagaagtgtgacttccattttactctgatgctatataactgatttctaacctttcagcctgcctagggtagttaaaagacgagtgaatgctctcaaaaacctgcaagttaaatgtgcacagatagaagccaaattctatgaggaagttcacgatcttgaaaggaagtatgctgttctctatcagcctctatttgataaggtaatgctttctcctactttgtttaatttaacattctagaagacgaattctagaaacataagcagacttggaagaggttaatctttagaactctcattgaaattgttattagaggcagcacttggaggaactatcaataatagcagttaaagttgtggtatgcatttgttaaatttgtaagacttcttagtgagaaaccactggttttagcttggatgccagtgtttttatacagccttttttttttaaatcattttagcgatttgaaattattaatgcaatttatgaacctacggaagaagaatgtgaatggaaaccagatgaagaagatgagatttcggttagtaccaactttattttggtatgtttttaagatgataaaatcttaggacttgtcagaaatgttagcatttaatgatggagtacaatattatataaccagttgtattttttcattttttaattttacgtctttattacacgtttttctattactttatttttaaaaaacagtcattcaagattgtaatttgcatggcaataagcagcggtttcatgggttctaagtttcttaagtgtccacagcagtttaaaacaccacaagtcttatttccaatttgcagcacctgacttaaagttcgaattcatctgatggagcattaaaactgtcattttctcttgtgaaaagacataattgctatttccaggactgtatattgaacatggttgtacattatttttaattggttagtagaattttactcatgtaatttatatccagaataagaacctctagcatctctgaatggccttcctctcagaacgatgatgattaaatgtctaaaatgtatctggggtgcccccacttgacattaccaaacatgtttccaaataatcttagaaaatatgattctttaaacatatgcataccacatctttaaacataaacataccacacagtgcaccatcacttccttaaccattttccaattgttcacttataacatttgcaattttttattataaatcatattgtgatgaatactttcatccataagttttattgcaaggcttattgtttcttctaatgtcttctaatttcaaagaagtggcttactggttcaaacagtgcacatacgtggttttaaggcttttagtatactttaccaaataatctccagaatagctccaacaactcctaccaacagtatgttattgtgcccatagggtggacttgataacagcaaagcaaattcaaccacagatatattagattctcacccatctcaaaactatcacatcagagaagcaaggagacatattattggtgaggaagccaaattcaaattcttttaaaaaatcactcagctttagatcagtaaaataatcaacaaaaatggtcaccgcaaagtctaccgggtttttcaaaaaataaaaagagagaaagagaaaggccaggcgcagtggctcatgcctgtaatcccagcactttgggaggcctaggtgggccaatcactaggtcaggagttcgagaccagcctggccaacatggtgaaatcccatctctactaaaaatacaaaatattagctgggtgtggaggcgggtgcctctaatcccacctactcgggaggctcaggcaggagaatcacttgaactcgggaagtcgaggttgcagtgagccgagatcgcaccactgcgctccagcccaggcgacagtgtgagactccgtctcaaaaaaaaaaaaaaaaagtaccaaataaccaaaattttttatttgactaaattctgttcatgtatgagcatgacagtctctcctgtttatttgactttggcaataaaaaaataagcagccttgtacagaacagggaaaatgccaagaacgaaggcagtctacagttttactgtagaatacatatatatatatatatatatatatatatatgtaggcctctctccctttggccatatctactgtcagttcaggccattaactacagacaaattttcaaattcacttcttctccaagatcttcgatgctgtcatcatctacttctgtctgtttttcctgaatgacctcaattatgtcatctgtaaagtctccttgaatgataatttcatcctcctctgttactgaggcaccacaggagaatttttgagcaaaaaatctttgtgtgatttaagatcaatttcaaaagttacaaggccacaacccttgtcacatatttctttgctctgggaattttggctatagtaaccttttgtggtaccgtctttgtttttttgttttatttgaccccttccacctctcttctgttttttcttctcctcttcttcccctgctgttccttgaccttgacagattccagcttcttgtttgggtgaattttccacagtaagttttgcatattcatttggaaaattcttctctaatcattgtctacatttagcaacatcaggcatatattcacagtactctattggtaatgaacagactccacaataaaggactcaaagtaggtaatcagcatctaacttggctctgttccttgggtctcctttgcagtcagccctattggaatcggaaacgtcagcagccatttcacaaacccaggcagttgcacaggccccgccagctctgctcccgccactgttgccagctgagccgacaaatgcaactcgtttccccggccagggcctccctagagcatcagttgtatttttatacctaggaaatatttttcctttttgtaagaatgataatgcagatgaactgttattcaacctggcaccaccatctgtactcaaaaagtcattatttccttacattttatagtttttttgtttaagagacagggacttgctgtgttgcccaggctggagtacactggcatgatcttggctcactgcagctcattcctgggcccaagctattctcccacctcagcctcccaagttgctaggactatctgaagctactatgcccagcttaatctacttttttttgtagaggcagagtcttcttgcctaggctggtcttagactcctggcttcaagcaatcttcgcacctcagcctcccaaactgttgggattatgggcttgaaccactgagccactgtgcccagcctatttttatagtttttttgagtctctgttgcccaggctggagtgcagtctcggcttattgcaacctccacctcctgggttcaagcaattcttctgcctccttctcccagtaactggataacaggcgtgcgccaccatgcctgactaattttttgtacttttagtaaagatggggtttcgccatgttggccaggctggtctccaactcctgaccttaaatgatccacccacctcacttcccaaagtgctgggattacaagcgtgagccactgcgcctggcttacagtttttagtttgtagattcattatattctttttttttttttaacttcatggtaggctgaggattgttgccattttcaagtgaagacatggaggcttctaagtgacttgcccacaatgaataatggcagagctgtgacacacattcagtgctgtgttaagtgttccacctctctagcattgctattttatgttgtttggtaaagagaatataatgttttgattaagaacaccatggggtgaggcaatggaccaaattagtatttctgttgcttttcttgtttattatgcttaagtcttcatttttaattagtttttacattttttttttactaaaatggtttttcctacacatcttggtcaccttagtggttctctttggaggggtgtggtagcagtaattttgatgggattaaggtttgttatgggcaacggcggtgtttacacagatagactagaactttgaaggtaatatctggtgactgtgctttttggtttttatacctttgctactttatcatgaggtctaatctatgtattaaataatgtttgctgtcacttaatcaaggaggaattgaaagaaaaggccaagattgaagatgagaaaaaagatgaagaaaaagaagaccccaaaggaattcctgaattttggttaactgtttttaagaatgttgacttgctcagtgatatggttcaggtaattttattcataaatgtaccagtttactttgaagggtaaacctttgaagtttaaatggctgtgatcactgttctcttcagtgttgatctttctagaatgattgcttacttttgaaatagctaatatctgtagaagagaaattacagctttgattaatgtaatcaaataaattagtttattttaaaaaatgagataatgaaatggtcccattgataatggctcattatcgactggtgttttcttataaccctgtgccttttgtctttacatacttagtatggaagtatgatgggaaagttaatcttatagctgcaattatgcaattcccttaactcttccaggagaaatttgcattttaaaagaataccataaagatgttaaactcattcacaatggttacattctctggcaaaccataactgttgtcacctttgggaaactgcctcaagcatttcttgagtgagcccctaccgtctacattgtagtagtacatgttgccctgtcttgtcattgttggaagttacatggagaaaaagaaatgatcttcacacaattactgcttattacaattctactttagcaaagtggaaaaggaacgaccaggaggaaggggacaagcagctggaaaaggcagcaattacaatcaggaaacattttaaaagtagatatgccttatttagacttgattttggatttttcaacctatataataattcagttgtctatttggacactttttctctaccagtggcagtagaactacagtataaattagctttagtataagccataacctggagagtaagtcttaaggttcataattgctatacaaaactactttgaaatatattatgtctcagtcagctggtgtttgtgtagtaacagaacacagtcctcgaatgccatgttattcatttttattatttttttaatttgaaggaacacgatgaacctattctgaagcacttgaaagatattaaagtgaagttctcagatgctggccagcctatggtaaaagaactttgaaatatttataattttgtaacatgcttacaggtagataaatagaagcttttaaaaagataacattcaagggtaaggttggtgctctttgttatagtgaataaatatttggatgctgctaattgtgaggcagtatttattccttttcctccttctgatcataaattgtgtttgaaacacagacaatccttgttcctggataagtggataaaaataatgccaagggaacatgaataagtactttttctgcattaaaaggcatgagcttgggaattacacaaaactgatgttagaggatgcccactccctaatgaggaaagatcagccaacaagctgtccaccaaaccaccagaattaatgtcaactaagggcaaaactgctaagaatataggctgtagatgcttaaggttgggctttttctgtgtcaagttcacgtttagtctactatttaaaagcctgattcctccagtagttggggagtaagggaggcaacatggtcactttattcaggaatgcctagcctgttgtgtaaacatgttaattatttaatagatgtaaattgaaactaagttctattcagttcaatttgtacctcattattattttaacgtaatttttttgattttaacataatttggggctcatctgacagtctgtcccattcttaaatatttcatggctgggtgcagtggctcacacctgtaatcccagcactttgggaggccgaggtgggtggatcacttgaggtccggaggtcaataccagcctgtccaacgtggtgaaacactgtctgtactaaaaatacaaaaattaactgggtgtggtggcacacacctataatcccagataattggcaggctggcgcaccagaatcacttgaatctgggaggcaaaggttgcagtgagctgaaattgtgcccctgcactccggcctgggcaacaatgcaagactcagtctcaaaaagaagattgtatttcagagtagaaaaaaaaattatcatttagaatatttataaaaacagatgaagctgtgtttactaaagtactgaaatatgtgaggtaggtatttaactgatttttatgcttcctctccccagagttttgtcttagaatttcactttgaacccaatgaatattttacaaatgaagtgctgacaaagacatacaggatgaggtcagaaccagatgattctgatcccttttcttttgatggaccagaaattatgggttgtacagggtgagtttaattttactaccttaacaaaatgttttttctgtttttgttatacttgatttgtatactcggttattttcagttacatatgtacatagtctgtctctgaacattttggtaatatgttttctgaaaagtgcttatcaagtttcctgtaattctccttggacccatgactgtctcacatatatttttgcagaggaatgcttctttaaattatactatgtgtttgtgctaattgtaaatgtgtttattttaaatatttgcttagaaataaaatttttccctttatactgctatagaaaacatttgaagcaattcacccttctaaaatttgaaatctaaatagaacatttacttctaaaagtttagcagttgaaagattgtcaattgtaatagatttttcttctttgttttgcaaggtgccagatagattggaaaaaaggaaagaatgtcactttgaaaactattaagaagaagcagaaacacaagggacgtgggacagttcgtactgtgactaaaacagtttccaatgactctttctttaacttttttgcccctcctgaaggtaaataatgttttagcttgagtattaacggttgttttataaaaagcattgcttagcttcttattcattgtaatttcttttctcaattttgcagttcctgagagtggagatctggtaagttgaattgttatatatttattgaattgttaagtatatttgaaattaaagcactgaatttcaaaaatggagagtgggatggttgttacattgagttctgaggcctacaatgcatggggcagactttttggatatgaaaaataattccattcaaaattatatcagtgcttctgctgagaaacactgagataaaaagcttaaggttttcttttcttttgaaacttcacatattgctgtgagggatttaacttttcaaaactgttgtcttccttagtaaaaccagaatatattaagtcacttatactgttacattcctaactacattatggttcaaattcattcctgaatttgttactccaatgtaaatatggtttcatattgtgactaagtatgttcacatatatggcatatggcaaagaacatgaaatgttcctgccatatagactgaactgaggaacaaccttaaagaaagtctatacacacaaggtagggcaggtatgttttgaatttggttttcttttgggcatgtttttgaatttaaattaactgagatagtttaaatagtttgtacatatatggaattagaaattaacctaaactgaatacttttgaattggaatactcttggctaagacttagaacaaatttgtaaaaggcaaaagtaagtatttctggcttggcttataggacaaaaaaagagaacataaagcagtgtgaatttcaggtgagaaaaactactttaagtattaagatagagcatcacactattttcatatcagtggatgggttggagtttgt

SEQ ID NO: 108 - DNA, 32744 bp, Homo sapiens
  source 1..32744: mol_type = other DNA
ctgtcctgggattgcctggagctccgcaccgcgagtttgccgcggcactttccgcgcggcggaagagcgcgcgccagcttcggcacacctgggagccggatcccagccctacgcctcgtcccctacaagctcctccaaggtaaggcgctcgctcacacccggtcctttccacgctcggcgggacagctgggtccccgcctcctctgcgaaccggctaggagctccgcgcctcgccttgggagtggggttgtagctgacggggacctcggaccggcggtggctagagcgcggagcaggcgatacgacgagccgacaggtggcgggtctagccctagtatctcgaccgccgccggcgcggaccttggtggggatggggcgggcgggccgacttgggggtggggtcagtcctctctcctcccttctaggggcggcgatcgtcggggtccgtactgtaggtgcgtgggagaaactttgcagggtggggacccggcggctgctggccggtagtgactggtgggcgcgctcgaggactccaaggggcgcagcccgggggcagacccttgggtcgggcggggatcttacgcttcccttacccgcccccttttgtctttcacctcagccccgccggctgctgtgggagcggcggccgtccctctcctggaggtcgtctcctggcatcctcggggccgcaggaaggaagaggaggcagcggccggagccctggtgggcggcctgaggtgagagcccgaccggcccctttgggaatatggcgaccggtggctaccggaccagcagcggcctcggcggcagcaccacagacttcctggaggagtggaaggcgaaacgcgagaagatgcgcgccaagcagaaccccccgggcccggcccccccgggagggggcagcagcgacgccgctgggaagccccccgcgggggctctgggcaccccggcggccgccgctgccaacgagctcaacaacaacctcccgggcggcgcgccggccgcacctgccgtccccggtcccgggggcgtgaactgcgcggtcggctccgccatgctgacgcgggcggcccccggcccgcggcggtcggaggacgagcccccagccgcctctgcctcggctgcaccgccgccccagcgtgacgaggaggagccggacggcgtcccagagaagggcaagagctcgggccccagtgccaggaaaggcaaggggcagatcgagaagaggaagctgcgggagaagcggcgctccaccggcgtggtcaacatccctgccgcagaggtgagccgggcgggggccgcagccggaccgggccggggcgggcagctgcctcccggtgtcttcctcctgggagctacccggggcgcagagtttacctcccctggctcgtacttgtcccttcaccgagttaggcaggcagggggtgatggagttttactctgaacaaatgcttcctgggaagttccccaaactcagagtaggacacgtgcttttcaggcttcctggccaggtctcagatccaggatccttttttaccgtggtagaaagacaacttatggctccaggacttgcccacctggacttggctgacttggccacctggacttggctgtttatgcttgatcagttagaaaaattgattaatggtgacgacattctctagggtctcacgtgcccatgtgaagttaccagtttatttctcctttcttaccaatgtttaataacatctgtaaagaaaatgttgccttagcaatatccaagacagctttatcttacagtgagctcaagatgagtatatccaaatgaatacgtgcactattttatatataaatcagctgtttataagttgtgctcctaaacacacagtgtttttctgagtgatacttaggacaatagggatgatttagtaacccacaattctgttcgctaagacgatctctttttgagtactgtgtctgaaaaacatgtggtagggtttttgtttgttttgggttgtttgcagtttggagcattttcgaaacgttacaggtagcagcatcttccattagagtgactggtaaaacatttttactaagtgtataatcacacctccctctaccagaaacaagacaaaacaatctcaaacaagttttgattactttgatagtagctcatggatttgaggaagtggttcaactaccttgtttcacctaaaatagttgcatctttttctcattgactgtttagctttcactttttcttctcctggctttctaattttactcaactttaattgtggtttaagtagaagcatttgcaataagttagggtgtatattaaatatacctaaatttttagtattatgatttccatacctgttaaatcatagtgtgtctttgtaggacgtatttatatgagcgtttcagagatttttatcagccagcaaaactgtcctctgcggtttgctacttgcacaaaagatctgttattcattaaattgctttagaaggaattcgtaagagtggtaatcaaatttctaggtgttttttttttttttttttttagttaaaaatatgaagattaaggggaaattgaagacaaggctttggaaaagctacattcctcaacttgatttttaaaagtagctgatgatccaaataaaagaatttgtcattttcaatcttttcctcattgttcatctgacagcggtcttattttgggaaatatcttggcagatgttaaacttcactttttttctggctgcatgtgctaaaattatttttcaagtactttttttttttttaaacaagggtaatgtttactgggggaagtaagtagagtgtatcttgtgagatcctaagaaacatcttttgttaatacccctgctttgagtaagagaacatagtgctgagaatgtagatgacttcccactacaatggagtctaatactctggaatgtttttcgtttgggtgttggcaactcctaaatttaatcttccctgaaaacaaacaaaccaagggtacctttttttttgtctgtagagtttgaacctttttattgaatagggaattgaggactgctttcttttagtggtaactatgtctctgtccgtttcaagctgcaggacccaacaaaacagtaatgcttcactacagtatctaattaacagacatacttcttgagcgcctcctcctcatattttcttatttttcaaaacaacttatgtatttcagattattttaatagtggtaaaatatatgatgcaaaactttaaagctgagccattttcatgtgtttatattgttgcttttttagaattgtgccatttctcctggtagtttcaacattgagaataccagttgctgtggagtttcttgtgtaatatttaatttagcacccctgttttaaaaagtcatacatattttgcaaatttttcgggtatgaaaataagtaaaaagatgaaaatgaccaatctctttatattcaaaagtagactttattttatctaatgtcgagtaagactcttattttcagacatgattcccaaccaagtctgtattagtagattaacatgtagttcatatgtagagatctggttttaatggtggataaacattaagttccttcaaggaagtacttatgaaacatctgtgtgatacatttattgtgactttcattacctcactttactagttatagagtgtatatataatactgttataaaggtatctgacagcagctaaagataccagaattgactagaagatagttataggcaaggaaccaggtcaaaaaccgaaactagctatttgggaggtaggaaactgggtggttactgcatgtgatggctgaagtcgatctatccagagcttctttaatgagataaaatttactaagagttttaagaaaaatatccttttttctaaatttttacattttctattttttggtagtaattcacctgaactgggtaatttggacgtggcatacttcttgccagtaatttttgtgtgtgtttatcagatcagtcaaatgtgtattacatacctgttaaagacactatccttaagcagtggagaaaataagaacacggcagtgtatattctcaaggagcaaggctataatctaggaagaaggataaggcataattacatgaaaaaatttaagtactgagttaacagtttaaaagccatcttaatgaagcatgtaactatttattggaaatagtgtgtgtttaaaagggggagatgattgggctgggagaagctattgaggatgagaatcttgacctgagtcttaaacttttcagtacttgtatatttttacatatgttctcacatatgtacatgtatacataattgtttgtatagtatattaagtaccgacatgcagtggttcttaacttgagcagcacattgatagcatgttaggatctttaaaaaaatgtttgctcatgctaattcaattccgtgccctctttgtcccttcaccccaccctgtaatattgaatgggtctgggatggatcccaggcattaatatttttataagttccccatttgattcaaatgtgagtcagtgataacaactgttggactgcagtctgggtatagaaatgaataggacataagccttgcccacgaggtgctctcaggtaatataaggaaatgtgaaaagtagagtagtaagtatagcttagtgcctgagcagggtacctaacccagggaggaggagtgatagttgaagaaagcttcctagacagttacatacttgtttccagggggtttgtgaagttactgccattgagtagggttgtgtgaatgggttaatggagatgggtgccatagaaaatgtaatctttgaataggtagaggtggcactgaagttttggtttaagtataaaagttaacatatacagtatttaaaacttctgttttaaaatagtggttggctaaagtggtttagctttagtggttggctaaagtgctttatgtactgaagttcacagcaatctcatgtggtagttacactgtttatcactatttccagaggagaaaatgaagacttagagcttaaatgattcaagatcacatagaaagtaactgatagagcaatattttaaacatttttgtgtattttgtgtgtatgtatatatctagggaaaggggagtttttaaaaattaacctacttttcattattcagcatatttccctagatttttacataactttttattaaagattatcttaagtaatttaaacatctgaatgaggaaaacagtaaaggtatggaattgaatagaatttcaggtcaaatttgtggactcagagattgcctctgaccctctaacctatagagtggcaaaattttgaacaccaggctctcggcaaaacgtaaatttatttttggctagtggtcagaaaatgtgaatctttgattttacctaagtgatatattgtttttctatcaagatggggtcatgacacctactccatagtttgaactcgtgttggtgaaagggaagataaaggagcatttaacatatagaaagcacttttaagtgaacacaggttaggtcataattatttagtatgtttattgaacattatatataggacaagttccacttagtaaactttataaatccaggtggattaagaaatgccttttgttattcccattatgctccagactgtctacctttctgtgtgatgagtcaggagagaaactaataatgactcagagttggagaaaatttgattcgtgaatggggtagatatagtgtaaacactgagactgtttagtgtaaaacctgggctattagcccagctttcctaaatgtttgagctcactggtaaagtaaattgaaattttaatattatcaggatttgtactgagttgtctgagctgggatgtcatttctcataaaaataataattacataattaaagtagatgacatttatggtgtgcttattaagtgccaggcactgttctaagcacttgacatacattagtgcatttaattctcaccacagccctatgggaaaatggggaagagaaggtatgttacttgcttcaggtcatacatgtagtgagaagtagattagagatagtttgcactcacagtcttgtgcgtaataaaccatcttactacacttcagtgtattacatactgtatacctagtttaagaaatacaaagaatattttagtgttaaattgttagtatatgactatggaatttaaaaatagccctatttatagaacatagatgaagtgagactttaatggaaaattttgagaacaaatgaatatataaacactggcattaaaattcttatttaaaatcattatcaagctagtggcctgtttatactattttctttgtttttttctttctttcttttttttttgaggtggagtcttgctctgttgcccaggctggagtacagtggcatgtggtgtgatctcagctcactgcagcctccacctcccgggttcaagcaattctcctgcgtcagtctcccaagtagctgggactgcaggtgtgcaccaccatgcctggctaatttttgtatttttagtagagatggtgtttcgccatgttggccaggctgctctcaaacttccagcctcaagtgatctacccgcctcagcctcccaaagtgcttggattacaggtgggagctaccgtaccaagcctatctatgctatttattatttctgcattttttttttagcacctatgatgtgtgccagaaaataattatgccatttaatagcaaggttgatataatgttttataagtataaaattattggcaaatattagggtttgacattttctctgtgctttttttccttttttaaaaattgagatataattcacatacaataaaatttacccttttaaagtgtacagttcagtggttttttagtattcacacggtgtgctcttaagtgcttttatattttcatctttatttttcattatgttcttagaacctctggtccctaaattttagctttcctttcagtaaagtgatatggtattcaaattatgagaagccattaacttaaaataatttaatatcagcctttcccactttacagagaaaatgaaattatggtaggatctcctcaattttaagtttcttaaaacttgggcacctactaccatttgtttgcagtggagtttagtataataggtatttattaggtttgtgcaaaagtaatcacagtttttgccattgaaagtaatggcaccagcctaatagttggattacttttgcaaaaacctaacaatttaactgagtgtaatactttcaccttaataaaacttttacatatctttcatggagatctgcaaagctctgtcatctaaacatttgggaacattgattcagagttaaaaaaaaaaaaaaaaggagtttccactgcttaccactttagttacagtactagaatcagtgtcctaaaagatgtttctggggggaccatctctaccagtatcacttttgccatttatttaaaatcagatttctggaatccaccccagtctgggttagggatgttatctgagagtctgcattttaacttgagtgattttggtacacactaaagtttgggaagaactaacttaaataccctgtactagtttactgatccgtcaaatgaaatgaatgctggttatctaacaggattgttacatgaattaaataaaatgatgtttgtgaaaatgttataaaaatgcccaaatcagaaattgtagttactgtataggttaatttcctatgaggttgttaaacattttcatttttttcttccaatttaaaactgtgcatattttaacagacaggttgagctacttggaaattcaaagtactttaaacatttatgtaatgtcacatacttagtgcaaaatgctctgtctgctttgcctcttttccagaatttagacaagtctagactacagaaacacctcaaatagttaatgcgtaattagaactttactttcactcatttttaatttttacatatctttaagtgaaagcatatacttgtgtttataaatgtatttgataattagcaactcaaacttttaaagcattgtgtttgccatcttatcaaactactatcaagtgcaaacatttttcccattgattacaaatcttacatgttagacctataggcatccttgactggcaattgattttgaacatatttggttaactgctgagtcaactttctgtttagatcttaggcaaatgtgttatagccatatacctacatgtatagaattgagcctcagccacctgttacattctccttaggctatgtaaaaatacacagggcaccatggctgaacgacattgtaggaatatttaaattctaaaagcagcaaaatcacacacttcaaaggtaaaaagagctccagcaagttcaaatcttagcatgtcagttgactagtaaaatgtttattctgtgatagtttttggagattttgtccagcaaaattttgtgggtcacagtgtatttttcaatgatagtctcatttattttaagtagttgaagaaatagggcagttgtattctgaaaattaatattttgttaggttttgctgaagtgaacagataggagagaatttatattgtggattacaattctgtggcagctgaaactttgttttcaggctcttcataataaattctgtggggccaggtgccatagctcacacctctaatgctaccactttgagaagctaaggtgggagaatcaattgagcccaggaggtcgagcctgcagtgagccgtgactgctcaactgcactacagcctgggtgacaaagtgagaccctggctcagaaaaactcaaacaaaacaaaactctagggggactaagagaataggataaataaacataataatatacagtttgaaatacagaactgaaacagatgaaattaacttaaaaagacatctttcagactaagcttatctatggtcatgtaagcaaactacttaatattttagaatttgcaggttacataaagtatcaattgattttctattattttggagttttttccagaatatttttagtagtatttaaaaagaatgtaaatctcagaacagagttaacattcagaagatggtgcttgaggaataggaataaaaagtacgattgtattagctgaaataatcaaagaagttacttttaggtttcaaattcttgaaagacttctccatatcctataatgtaagcaaaagttgatgcaaatcaaatttatgtaatcctaatttttttctgctagtagaagtaatgtgttaaaaaaaaggcagtgtgttcactgtagttctctcatggaaataaatccaaggaaaggtagaaaaacctgttatcttatacatattaatatttgtgtttctattcttatttttttgaatctacttgagaaatggaaccacactattgatttgtgtgtatacttaaccactcatcatgagtatttttatgatgttattctataacttcaaaaataggggtggatgtgtatgtatcttttgttgtatgttttttagagacagggatcttgcttgttccccaggctgcagtactatggtgtgatgactcagcctcaaactcctgggctcaagtgatcctcttgcctcagcctaccaagcagctgagagtacaggcatgagccaccatgtccagttggatgcatgtgttttgtgctgtttgatattaaaatacttaaccattacttcattgggaaaggaccttactgcttatctgccttattatgtggctttttgattagcccataaatagtcttagataaatagccctttcctttcctttcctcccctcccctcccctccccacccctcccctcccctcccttcttctccttttttctgagacaggatctctgtcacccaggctcagtgcagtggcacgatcatggctcactgcagactcaacctcctgagttcaagagatcctcccacgtgagcctcctgagtagctgggactgcaggcttgcaccaccacattgggctaattttttaatttgtttgtagagatggggtctcagtatgttgctggtcttgaactcctacacgcaaatgcttctctcaccttggcctctcaaagtgttgttgggattacaggtgtgagccactccacctggtctatttttttcttttcatatattgtgtttcctgaaacattgctcaggaaaagtgtttgtgccattgaaagagtctcataggttcagataattgtgaaggatgaccagaggttttttctttttttaaacctctataacctttgatttcactgggaagttggtggttggagctggagtaattataaatgtatgtatgctgtagctgaaataagttcctgaaactcatcatggtatgcaaaattgtgcagtaaaaactgtagggcatatgtgaaaatggagtttggggcataacactcaaaaactttgtcaatggcatttaaaaagatagaaacctaataaaaactagcagtttcacacatgttaaatgcttaataagtacataaatactacaacaaatatgacactttactttgaaaaatacctaaactttttgaaaagtgttagaaggatcccagcttgtgaattactgtaaaatggtaggaggaaggttatctgaaattggagtgagagtgttacaccagatgtggatgggtgtagctcataacgtatgcagtgaactgacgtaactggcagatgtttgaggtgtgtatgcatatatttctacgtgactgggttgcagttatctgtgcctgctgagcatttcttgcatttgaacataagcaaacacaaaattagtgttattctcaacttgttccctaacatgtgttcatatcagtggcattgggacaaatccatgtttttctaaacaaatgttatagtgcgtatatgtctacccatgcatagatatctgtatccccatcaatctgtctaaaatatgtaaaacgttgtaaaaacatagaaaacaatggcttgggaagatcaatccaagtaatgacatagaggaaaggtataggaagcagagaaatgggagtactcatataagagtatactaataatgatcgctagggcaatagtggtagaaaaggaaagaaagaatagatttcagagatatttcattggcattaaaaattacataactggatgttttgagctggaaaagtgtttagagatcatctagcccattacaaaaaacaaaacattaatgtagtctttccagaaagcttttacctcaaaacttaagttgcatttcaacctcaacctttttcctctagctgagtctagcatatcccccactgctcctggccccaccaggctaatactactgccgtatcagggattttattttattacctcttacttaaatactcagcctctacctcctggttcatcttgtcatgcagaaatgttcccttaattttgctttaccttcagcttactgttttttctccataattggtcagtttcttaaaggcaacattttcacctgctgactgttcatttcttactacagtactgaaattcatctctctaaggttgcctgtgaccttttttttgtaccagtgtcaccaaacttgtgacctcttaattgccgaatgtgacagcttctttcattccatttgtcctctctgtagcatttgccctgtcactcctctcatatgctgcagcattttttatagattcttttataagaatctatatgtaaatgtttcttcagaaacatatgaatgcctgttgtgtgccccaggctcagtgctgtgtgatagaaaatattcaccagtctttaaggaacttctaatctttcagggaaagagataaataattagaggttagtataataacaactatgatggagaaaagagcaaagtactgaactagcacagaaaagggggccatgggccgggcacagtggctttcacctgttatctcagcagattgggagacttaggcaggaggattgcttgagcccaggaattttaggctgccgttagctatgataatgccactgcacttcagcctgggtgacagagtgagaccttgtctctaaccaccatcctgtgcctcccacccccgccaaaaaaaaaaaaaaaataccctaaagggagccattaattaaggaagtcaataaaggctttacataacatgaggtggtattatgctttaggtctcagttggtaagaaagattctccaagtgaagaggggaacagggtaacatttcaggtagagcaaatagcacgtgcaaaggcacagaactgggaagtaatagaaataataactttatattgcatgcctgctgtatgtccagaactgcacagaaggctttccatgggttacatctaatcttcacattaactcatgaggtaggtttttatttttatcattttacaagatgaggaagttgagcctcaaagaagttatgacttgcccaaaggccatcctggcagaacttggctttgactccagatctgtttgggtgccagtgcccacacattggttatcattgttggaaataagcaggatatgttctaacagaggaaatggtgatgttcagaaaattcatgatggggagtgaatggagaacagttaaagaggattgatatggaccaattgtgttggattttaatgccatgccaaagaattcagactttattctgctgttcagtattgttgactgggtacttccttcctctgtccatatctgtttatgcaacaactctcacaggttttggaaagaaaacagttttgtctgcctaatttgaaatcattaaaaggattgtcttgttcggaggcagatattcaagagtagtaaacaacacaaaatactgtgaaaataacatatagtagaataaatcaaaatttccatatgcattaaaaagaaactagaggataggatctaaacaaagttgtaccaagtgatttcttttgatgacaaaaataattatataatgaataaatttgagtgtttgggggtagagggcagatggagtggaggtggggaactccagtgatactaaattgctagagtttgattctagtgtaatcatggagaagtttatagcttaacgttatccctgagtttgtactttgccctgcactttaatataaaaccagtttattgcattctgattctctagttcattctgtaatacagatggtaggaatacaggtgcttaaggatgggaattgcctttgaatttttctccatgtattacttgtttaacttctacaagtgttttctccctccatacttccctccttcctggtagtatcttcgaggaactcaagggcatctccaaaccatgttttaggaatagtattcagaaaatttgaaataaaatagcaaatctaggattgtgcaaaaatcagctatagaatattacttataaatttaacaaattttcttccatttttatttttatacattgggattatattctatgtacattcttataacctgcctttaaacttgacattgtcttattatttcattttaagctttttttaaaaggagaaatgttattacttttttttgttgtttcataaacacttttgtttcataatcattttcattggacagtgattctgactatccagtgatactagtactttatatttttggaatacaattatttgaagccacccacaaaataaatgtatttatccagaaatttaatcattctacagatattgttacaacatttttgttatcactatctttacaaacatcacagatgtgttattcttaatgtctacagaatattctctaatttggatgttccggtatagctagcatacatttactaccttgttagtacatgttagacactgcactaggccttttgaacgcttaagttaatacagctgttctgttaccagcactgccaggatttggacaactctgattttgtccttgagtactttataatctaactcagaaaaacaagattatataggacaattcttgaacattaaaaaatgagtataataaaatgttaaatgttaggtcatactcttagtacagatatttgagagattcctggaggattgaatggtccaggtaattttgtgaagggaatgtgagatttgaactgaatcttgaaggactgataagaaatgcacaggtgaagaggagagttctatttcaggctgtgaaagcagagtgggcagtagtacaaagatgagaattagtaacctgattggggtagagggcttatgttaggaaatagtaagtgaaactgagggagcagaatagtgaaggatcttaaaaacaagcccgaaggtttttggtttgatgtatccggctacaggagaacttgagcaggatatgttcatattgtgagagcaaaattttaataagatcaactatcaggctgtagtacacagagcagactagaagaaagagagaatagagataaggagattagttgttgccatactctagttgggaagatactgtgtgtgaaattatagaacactatagcagagaatacagtttattaatgttttcagttttatgactatttaattgactgttagtgtcttcagttggagtacataggggagcttattattatcttgagtcacatgataatttgaaagattgattaaatcagaaattgcttatactacaagctggctcttagaatattttattaattatgggtgaagaaaggtatttgtatttctgaataagcaggccatattaatgtgagattacacttaagtgctttttgagcctggtactattctaagtcctttacatgtattaactcattaaatttttagaacagctctagatgggtcactgctattattattattatttctattttacaggtgaggaaagcaaagcattgagaagttcagatttctgatttgagaaattagttgctaactttgcacttgcctccattcttgattttttttttttcctctgtttccaacttcataatgcgatcagggtcacttctttctcctgtgcttccagcttcacaatggggtcagtgtcaccttttaaatactagcctgagcaaaacaaatatattaagcttgctgttattattttttttctttccaacttttattttagattcagggggtacatttgcagatttgctgcatgggtaaatttcatgtcgtgggggtttggtgtacagataattttgttacccaggtaatcagcatagtacccataatatccttacccttctcccaccctccactgttaagtaggcccagtgactattgtttccttctttgcgtccatgtgtacttaatatttagctccgtcttataactgaaaacatgcagtatttggttttctgttcctgcattaatgtgcttaggataatggcctctagctccatctatattgctgcaaaggacatgaccttgttcttttttatggctgtgtaggattccatggtgtttatgtaccacattttctttatccaatcaactgttgatggggatctgggttgattacttatctttgctattgtgaatagtgctgcgatgaatatatgcatgcttgtgtcttcatggtagaatgatttattttatttttatttttatatttgagagacagagtcttgctttgtcacccaggttggggtgcagtggcgtgatcctagcttactgcaacctccaccttccaggctcaagtgatcctccccacctcagcctcccgagtagctgcgaacacaagtgcggcaccacgcccagctaaaattttttgtatttttagtagagacagggttttgccatgttgcccaggctggtcttgaactcctgagcccaagcgatccacccgccttggcctccaaagtgctgtgattacaggcatgagccaccgtgcctggccctgtggtagaatgatttctagtcctttgggtatatacccagtaaaaggattgctgggtctggatggtagttctgttttaagttcattgagaaatctccaaactgctttccacagtggctgaactaatttaaattctcaccagcagtgtttgggtgttcccttttctctgcaacctcaccaacatctgtggatttttggctttttaatagtagccattctgactggtgtgagatggtatcttattgtggttttaatttacatttctcaaatgattagtcatattgagcatttttttcatatgcttgttgctacgtgtatgtcatgttttgagaagtgtctgttcatgtcctttgcccgctttttaatgcggtcattttttttttggcttattgatttgcttaaggtccctgtagattctggacattagacttttgtcagatgcataatttgcaaatattttctcccattctgtagattgtctttttactctgttgatagtttattttgctgtgcagaagctctttagtttgattaggtcccacttgtcaatttttgtttttgtttgaattgcttttggagtcttcatcatgaaatctttgccaaggctgatgttcagatgatatttcctaggttttcttctagggttttcatagttgcaggttttacatttaagcctttagtccatttgagttgatttttttttttttatctggtgaaaagaaggggtccaatttcagtcttctgcatatggctagccagttatctcagcactgtttattgaataaggagtcctttctcctttgcttgtttgttggctttgtcaaagatcagatggttgtaggtgtgcagctttatttttggggttctctgacctgctccattggtccatgtgtctgtttttataccaataccatgctcttttagttactgtagccttgtcgtatagtgaagtcgggtattgtgatgcctccagctttgttctttttgcttaggattgtattggctatttgggctctttttttgtttccagatgaattttagaatttttttttctaattctgcaaataatgatattgatagcttgttaggagtagcattaaatctgtaaattgctttgggtagggtggccatcttaacaatactgattcttcctatccatgagcatgggatgtttttccattactttgtgtcatctctgatttctttcagcagtgttttgtaattctcattgtagaaatctttcacctccctggttagcttattcctaggtgttttattctttttgtggttgttgtgaatgggattacattctaagtagaagaatttaaccttgtgaagtgcttatatgaggaataaaaaatgctaccataaagtatattacctatttttagctcttattttaagttctcacaaatctcagacctctgacaagggagtgctgtttggctagtattgggttactgaatttgaaagaggagctcaggctcagctctttgaggagaggcctccaactggctggtaacggagtcactgaggggcacaataaggctggtttcagctgttgctacttgaatgagtgctgctctagtgactaagcaaggctcaggtgaaactgacagaacaggaagcaaacttgaagaacaaatcacttcttccttctccagacttgcaatttccttttctctctttgtattggtagacactagaaagaaatatgattaatttagggccgggcgcggtggctcatgcctgtaatcccagcactttgggaggctgaggcgggcagatcacgaggtcaggagatcaagaccatcctggctaacacggtgaaaccccgtctctactaaaaatacaaaaaattagccaggtgtggtggcaggtgcctgtagtcccagctactcgggaggctgagggaggagaatagcgtgaacctgggaggcggagcttgcagtgagccaagatcacaccactgcactccagcctgggagacagagcaagactccgtctcaaaaaaagaaatatgattaatttgactcacttaataatggttgtggtaattgagaaatttgacatctaacttgatatttgataatattaagtaatcatttttcattattttcgttgtggtagtggtttagtgtgtgctgtagaagaattgttttagagatatatattggtatatttagagaagaaatgcctgggatttgcttccaaataatataggacagatagtggtgggaaagtaatagaaatataaatgaaatttgtacttgttgaaattgcagtaatgaacaaattaggattattttattttctctactgctgtacatgtttgaaatacagaaaaaaattagaatcttttttttttttttggtgatacattcaagttaataaaactgattctcgttgaggggtatggatgtgatctaatacacacaataaacttgatgataagtaccttggagaggataaaacagggagataggctatagagagtagaggctgcaaagtggtggtagcactttagggctggcaaggaaagcctctatatggagcaaggtatttagttgagatccaaactttggaaggagccagttaggtaaaaatcaggggaaggagctggggtaaaaatgttctaggtaggagaatcggaagagattgtggggagaaagaaaacaaaacaaaagttctaggtggagggaacagacattacagaggttttgaggcaggaaacttcaagtattcaacttaaagcaaaagttgggtaggtgagaagagataaagaccaggtcatggtagagtttggagtttaagtgcagttgggagctgcttgttggttgaagcagaggaagtacttgatctaatttttgtttcagaaagatcagtttaggttgtaggtaaagaatgggctctgtgtacgggaaggagagggcagaccactacagcaatacaggagagagtgaccaggtgggaggtaggggccatggagagacgggattgcgtatggaatatgttttagaggtagagctgacagcactttctgtgagaagcagagcaatcaaaatgataattaggttttcctttagagcaattgggtggatgctgatgccattaactaacaatacttttcactgctattcgtgcagtaaaatgatgtcatgcagaagtatagctttttaatatttttatttttagagatagggtcttgctatgttgcccacgctggctttgagctcctgggctcaagtgatcctcttgcctcagcctcccaagtaactaggactacaggtgcacaactgtgcctggctgtgtcctttttgtagaaattatgattgagcctctttataaataatcttaacattttgagtatatgctaggcattgttctaagttcattacatgtataagcttatttaattatcataaaaagttaaatgaactatttgtctttatatccctcgtatcgaggaaactaaacaattaacatggtaaacacatcaacaagctaaagaagaaaaatctcatattaatagatggagaaaaagtatttgacaagatccaatacccattcacagtaaaacttcttggtaaactaggaatagatgggaatggcctcagtttgatgaatatctacaaaaacctatagccatatatttgaatttagagaagctacttctacgctaactacacataagggctatgtttctagtacagaatattgattaaaacctttcctgttttgattaaatctagccacatgattctcctagtgaagggatttaatcttgaaattggtggaatattttagatggtaaattgattagagaaaagagatttcaattatgttgtctagtactttccattttgttgaattaaagtttaaaacaccaccaaacaactttaggctgtagtggaatttaaaattagtatttgaatgtaatgttttctttcctttttttttttttttttttttaagtgctaaggtcttgctttttgcccaggctagactcaaactcctaggcttaagcaattctcctgcctcagcctccagcgtagctgggactagaggttcgtgctactgtgcctggctaatatttttcctttttaagctaggttttccttgacagtctattttagtatccttaatacttagctcagtgcttgacatgtaggattaagaaggtggtctgtcaactagggaaataatgaaaaaaaaaaacccctaaaaaaaaagtggcaaacatattctgatatggaaattatttcatttataaattgtgttttcttctaaggttttgctttaaaatcacaaaatcttgaagtacacttaaaatttgaagttcagcttatgatagccttttttttattgtgaactgaagttttaatatttgatactagagagtatctattgataaattcgtgtagttataagaaaggttcagttacagtgattgctattaccttgatattttgtaaattactccctttgtaacatttgctgtctcaggaattattttttctaatgtcagatggacttttcagaatgaattgaatgagatatttttggcattttgaaacctaatgatttttctatgaagaatttttattcttattcattgcattttttttttccccaagaaaaaatgatgtataatagtgacacataagatagacattctcctggtaaagtatattgctctttggattttattttgatttcagtaacagatttgataatttggttttttaagctttcattacctaattctgtaatctttgaggatacaattcaaccaaccaaccagccttttctataatttagtaactttacttgcatttttctcttggactttgcttatgtactgccaattagttgcttaaaactttttgtcattgttaaaactgtttacatggctttttaaaatgggggaaaaacaatagaaacatgctgtggtgcaacgaatgaatacagtgtgattaacaacttaattttttttcctgtttcaaacatccacctatttttagcattttgtatacccataggttaaaaatatttacatttttcttagaaaagtaacctgtttaagaacaaaaaaggccaagcgtggtggctcacatctgtaattccagtactttgggaggtggaggagggtggattgcttgagctcaggagtttgagaccagcctgggcaacatggcaaaaccccatctctactgaaaatacaaaaattagcccagtatagtggtgcacacctatagtatgtttgaaccgggaggtggaggttgcagtaagccaagattgtgccactgtactccagcctgggtgacagaacaagagactgtcttaaaaaaacaaacccaacaaacaaaaaaaaagaatgaataactgtttattcattatataaataacttatttaacagtttcagtatattttgaaatctttttccatgtatcatttgatttttttctttttttaaagaacacttgagaattactcaactaagtttagattatctagatgtttgttagagttgctttcgttggaggacttgaaaatgaagtatgtataatttaagatggttattagaagaggagtttttttaaatatatttcttagttatttaaggtctgcagatacgaaaatcatatgtcccaaaccaataatcaagatataagataatatggcaagttgaaaagatagaacagtgtatcttgaaatttgcatagtcctgagaatagacatggccctactctgtaatatggcttattccctccatgcagggaaagttctgaggcctctctaattcttaaatctattttgcaaattactttttaagttctattaacatcattgtacaagaaaccctcaatttaatattgttggtcttatatccctaatctttacataatctgcactgtgtggggaatcttctgcatagctcatgccagtaacttttagggctattttttaaatatcaccaagactgaagtcattcaagccaaaatgtgaagactaaaatctttgatgtatctgaacagaaaaagataagtgaaattatttaaaaatgtacttcattcttcctttccctagctttgtttgttttgaactgttttcttcataacagcacacagttggaagtgcatgtgtgtaaatatgtttgtatttgattgggatgagagtatttccttccaataggaataccccaacttgttgtctggattcctctccttatatttgtattctctatacaggggtccccagctcctgggccgtagacccgtactggtccatgacttgttaggaaccaggccacacagcaggaggtgagcagtgggcaagcgagcaaagcttcacctgtatttacagccattccccatcgcttgcattactgcctgggctctgcctcctgacagatgagcggcacccttagattctcataggaacacgaaccctcttttgaactgcgcatgtgagggatgtaggttgtgcactccttatgagaatctaaccaatgtctgatgatctgaggtggaacagtttcatccagaaaccatcctccccattatccccctggtccatggaaaaattgtgtcccatgaaaccagtccctggtgccaaaaaggctgggaaccactggtctataattttccttacttaaccagttgtttttgtttctaatattttagaggtaaagagttcagaagtaagataaaagaagaccaaagacaaactacttcagggctatttcgtgaagcagaaacagcacttcatcaggtggcttttgcgggaggaagcactgttaatgcccttaggcgtaagggtaaatgattcaacttacttaaggaaatacattttcttctaacttgaaacattaaaaacaaaaaatatctacaaacttttactatagaaagatcaaatgtggccagcactttgggaggctgaggtgggcagatcacctgaggtcgggggttctagaccagcctgaccaacatggagaaaccctgtctctactaaaaatacaaaattagccaggcgtggtggcacatgcctgtaatcccaggtactcaagaggctgaggcaagagaatcacttgaacccgggggacagaggttgtggtgagccgagatcgtgcctttgcactccagcctgggcaacaagagcaaaactccgtctcaaaaaaaaaaaaaacaaggaaaaatcaaatgaacaaaaggaaataagatagtattatcaaccctatgtgtgaacatgttaactagcttcagttatttttaatttatggctcatcttactttattgatttcctccaatttttattgttttgaggcaatactggatatcatttcatttgtagatagtatgaatttattaaagataaggactcttatttttaaaagattactccattccactattacatgtaaataataattcattaatatcaaatgtccaatcagtgcccaaaaattttcatgggtatctcatatatgtcttttatattttgtccaaataagatctatacattatagttgcttgcaatgtctcttaacttgtaatctttacattcttcctgtattattttttcacagtttatctgttgaataaagcttgttgtttctcacagtctagattttgctgaatgcatcccccgtggtcttgtttaatgtaatcttgtaaactatttcctataatttggtaaatttagatttaaactagaggtttgatcagatccattcattattattattattattttgacaaggatacattatatgtggtattttgtacttccatccgaaggagtaaaagtctagtcagttctttttctatgtcagcaatcactggtaaattgcctagatcagctgtcaactcaaaatattaatatctgagacaggtgtcagtcaatttagaaaatttattttgccaaggttaaggatgcacctgtgacacagcctctggaggtcctgacaacatgtgcccaaggtggtcggggcacagtttggttttgtacatctagggagacatatgagacatcatgtaagatgtacttggttccatccagaaaggcaggacaacttgaagaggggaaggggcttctaggtcagaggcaggtttgccctaagcagttcccagcttcacttttcccttcagcttagtgattttggggtcccaagatttattttctttcacaccaaacttttcagccttaagatccctttacattcttaaaaattattgagtatcctaaagggtttttgtttatgtgtaaatatcactgtatgtatgagcatttacttttttagaaattaaaaccaagaaattttagaaatgcctgttattaattggaaaaaaagcccactgcatgtttatataaataacatttttgtgagaactattttccaaacaaaaatttagaaaattggtccactgtttaacatttttgtaaatctctttattgttcagctgaaaagaagacatcctgtttctcctatctgcttcatcctttagtttgttgtaatattacatatcatgtaaccgttggaaactttgtgtacactcatgggagaatgaggagagaaaaggcaagtaagattttagcattctaaaaatagtttgaccttgcggatcctctgaaatggtcttggggactcacaggggtgcttggactatgatctattttattattggttgcaaaatggtggtattctaattcattcctttgtaatttattacctggaatattttatatagagaaatttcctttcatcagctgttttagttaccttgagatacaatttgtacaaataagatagcctagatgcttgattcttttcctttaaggagacagaagctttattgcattcattttactatgtgagaaagagatgagaagactacttttaagccccctttgtactaattgaaaccgcctccacttaacaagtgaaggaaggactccactaatacagttggcttcttaaattattaagatgcagtttgtatcttagaggttgcttattttagtactatatcaactaacactatataatctctttaagaaacttgcttgaggagtctaaaaaggattggaagctttcaagttatctgatgatactttcacctatttccttgtgaaaatgcaaagttaacaagataatgtctgcgattagcttaaaatgcttatttattgtgagatatattactattaactccatggaagagaaaaatcaggctctgttacgggatattgagttttgctgcagtttgattttataaaactcaactaatttgcttccagaattgcttcaaaaacttgagcgctcttgaggcaagacagggagttgtaagctgtcataaatgatacaacccagagactaagacttggaatggaatgaagtctggagagaggagatgtatatcagagtagtgtaagtaataggttaattaggcataatgaaatttcagttcttgttcttaaacacaaatgaaaggggaagttcatcttaattccttacttgtatatacttgagatgaaatgtgaagtcagttttcctctatgtaacaatttttattttaattgacttacggaatttttatgatacaatagaaatacgttgagacaagtttattgagccaactatctatacatcttaaaatatttggcagtttaaatagtcatttaatgtgggttagatgtgggaaggatgtgagttgaaggatggaaggaagctggaccaaatagcataatctgtcagcaaaataaatcttttctagttagacttaatctcttgttgtttttggacctgatgaaaattgttttagagattggaacttaatagaatagttatggtttgaagatatctgttttagttatgtatttgtagactataagaaaagtaaatggaactaatttttgtctctataaaattttccttaaaaatcagatttttttgggaatcttctgagtagtaccatcattctatggaaacatatctcagaaattaaatcttcattgttataatctgttttttcatattattggaggtacatagtaaacctcacagttgaaccttaaaatataactattgttgacttttggaaaatggtttagtgaattgctgctcctccttccaagttggaaattgaagagatgttgtgtagttgtaaatgctgaatgcagtgactgaatgttcactacatttttggtttacagcaatagtagatgtattaactatacttgcacaataatcactattttatttttgttcaagtataggccttggaactttaaaaaaaaaaaatagccagacatgatgacgcatatccgtagtcccgagtacttgggaggctgaggcaggaggatcacttgagtccaggagttcaaggctggcctggacaacatagcaagaccactctctctctctcctcccccccccgccaaagagtctactttgtccttaaaataatttgatagcacatttaggaccttatttttaatactaccttttgaaacattgactttctaaaaaacaatgtgtggccccaaacaagataatgacatgggtttaaaaacaaacaaaaatgccctttcagggcatgttacagtaaatataggtttagtataaaaacttggtattaaagtttttggtagttaatgatctggaagcatggcatgatcctaaagttctaaaaattagagaagactctaagtaagatagtaaagaaatgagtgtttaatttactatatattttttttaattgagggagggttttgcagaggtggagtgaaagaagaggatcactccgatcattgtcttttatttccagatctttttgagtaatgaaaatgcacttaaaaaaaagttggggtctagttgcagtctcaacccttgaagtggtggcctctgttgactgtctcgaggatatttactttgtccatcttttaagaaaataatcctttatgaatagtgataaataatcccacatttctcactatgactagttatttttaatgggcaaatttctgtttggaatgtaagatggactattttattataagctatttctcccattggcacattggcaatttcatatttgccaatactcagtacttttcctaaaatgtatatttggcatatactttgtagttggatttatttttgtttattatattataagcacatagcctgattaatcttactcttcagttaactgggatgttagtaaatcactacatgtaataaaacttttcatttatttctcttagaagtttctgtgtcagaagttcacactgtgcttttaaaataaatagggtttttttttttggttttgtttgagacagagtctcactccattgcccaggctggagtatagtggtgcagatcatggctcactgcaatctccacctcccgcactcaagtgattgtcccacctcagcctcccaagtagctgggactacaggtgtgcgccaccacacccagctaattttttgtattttttagtagagctggggttttgccatgttgcccaggctagtcttgagctcctgggctcaagcgatcctcctgcctcagcttcccacggtgtaaaataaaaacaaataagtttttaaactttatttgcctaagaatcacgaagggaactttaatgaatctatgacaggactgatgaatctacatttaaaaaatcttcccaggtaattctgattaaggtgtaaactgtaagtcaaaagtggcacccatttctgtcaggtgtattcctaaacgacagagaagataaagaaatagtcctgaaatgtgtgcatcaacacttaaaaccatagacaagataggagaaggaggcaaagcaccaataaaaatctccatatcccatgtacaaaaccttagaatacagagtaagtaactggtgttctttggccacaccaagggagcaagccttatgctactgaacaccttatgcattcattattttcccattacacaaaaaatgaagttgatgaattttggagtaagatagttacttgttgtgtaaaattaggtaggtggacaggctctcattagtataatggagattgaactgcctatctttaggcttagaattaaataaattaaaagcatttactcaaaatatctgccatgtaagaggttctcattctcaaaggatagctattttttgtttttaatgacaacatgttaccatagaatcattttaattatttccttgtgattaataattagcactttaaaaacagcattttcttgatgtttccttactccatcttcacatgccaagtgctaagagtgcttagtaacccttagaaatctaagaaaaagtagataggctttatgtgattttgttcaagcctttgtgtaaatggactttatgtgatttggtttaaacctttgtgcatttcttagtctggaatccataaagagctgggcttctgcttttttgtctttatgtatgagtgatacttttgccttgtagaaggaagtgagctgaactgaattctaggtcagcttggcagtgtggtccattattgaagtgtctagaactagaatgtgaatggaagtaagagattaataattgcaggatatctagatttcctcatacagtaaatacagtagaaagtcacaggcaaagaactaaaagactggacttttctggagctggatgattctgagcagttacctaacttctttgatccttgattattttgttgttagaatacatcaaagcctattcccagggtggttgttagggttaaacaagatgttatcagtaaaaactgttttttcaaatgtgaactacaaatgatttatattactgtttcctgtcctgaaagttctggatcttttaagcattagtatgcttttttttttttttttttttttgagagatgtctcagtatgttgcccaggctggccttgaacttgtgggttcaagtaaacctcctacctcagcctctgaagtagctgtgaccacaggcacatgccactgtgcttagctaaatgctactatgcgtattgactgagatttttctgtcatttaggtaatatgccctgaatttcaagttgaaatagagctttttgaaaatactatctttgggtatgagaatctttttttatcatttattaaagtggcaacatttaggttattgtttgagatgtttttatttatttttactttttgttacttttccattttaccttctgaatatgattaagcagctgtaaccctactatattataattccctgaactctgtagtctcccctgcttagtgtatggccccagctgatcatattaccatttactgatgacacatagacttttcatagatgcctattgaaataagtgtttgtgaggataaggggaacatggtgtagggagagggctttggtctaatgtatgtaataatgtctttaaaatgaatcaaactttgaagatttcctagttttaatagtttttttaagtgtaaaatgttactaacataaaatttttgagtaagaaaactatcttcttacggcttaaaacattatcttaaatgtaataaattaatttcttaagaaaagagtgacatgtccatgataaaatttcaagtggtgcagacagccattgttgttatttcttaagtatccttctggagatattttctgtttttaccaagaaatatgtgtggatatctccagagattttttctttcaaggttgttaatggcataatggatttgaaatcttttgtttgtaagctaaaagtttaaaatttaagtttctaaggacagattgtagaaatattatggctcaaagtttactaaaatgtaagttcttttttttttttttttttttgagacagagtctcgcttcttcgcccaggctggagtgcaatggcgctatcgtagctcactgcaacctccgcctcccgggttcaagcaattcccctgcctcagcctccccagtagctgggattacaggctaatttttgtatttttgttagagatggggtttcaccctgttggccaggctggtctcgaactcctgacctcaagtgatacacccacctcggcctcccaaagtgctgggattgcaggcgtgagtcattgtgcccagccaaaattgtacgctcttaaggacagatttttttcttagctatatggacttaatctttatattctgtagtctatataattatatactttaaaaaaaaatacagtggctggccgcaatggctctcgcctgtaatcccagcactttgggaggctgaggcaggtggatcagctcagttcaggagttcaagaccatcctgaccaatatggtgaaaccccgtctctagtaaaattacaaaaattagctgggcctggtggcatgcacctgtagtcccagctactcgggagactgaggcaggagaatcacttgaacccgggaggcagaggttgcagtgagccaagattgtgccactgcactccagcctgggcaacagaacgagactccatctcaaaaaaaaaaaaaaaaaagtacaatgaaatgtttttttagccatcttgctagatatatcacgtctggagtttagggaagagatctttagaggtaatgatgtgaacctagtcagtttgtctgtggcagtggttctcaaactttagtgcataacatcatttggaaggcttcttataacacacttctctcagtataacctcttagcacttctgtttgtttctatttgtcatcttgaattgtcctgggatacttaattcctttcattctctgtctcataacattttcagtttattggggaaggaggagattcctgtcagtgccactatgaagattgccctaggaaaaaggattttatctgtgctgttacctgtttccctcatttcattttccttggctactcttgactgggataaatttgtaagagactttagacagttcactgtagctgattggaaagctccaagtactgttaacatttataaccgacaatgtctgtggtatgtttgctcactgctttttaatggctagttttatctgcaaaactgttaatatgggcctggcactaaccatagtgagagagtgtattgttctcagcattttctttttactattatttcctgcagccttgtctagtataatagttacttaagaagagtaaatctttttttccatgtctttacttctttccccaccccctttaatctcccttcttttggacaaaaactacttttggggagtctgtagtcttttaaatccaaatatttcctttaaatatgagaagagaaaaaaaattaaacaggatgggcaacagacaaaatattttccaaataccacaaaataatttttaaaaacttggttgatgttgtttttatcattaataggattttgaattaatgtgaactgtcaatctactatagtttattttcctctttagttgtataagaatacaataaataatctgaataactgtagatagaaatgtgcatagttgtaaaatgggatttgccatggaaaaattttattaacactttagccttatttaggggtttcttggtgcggacaatgtatgctaatgggctttctctagtcatgtattacttctgtacaaatggggaattggctgctaacatgaggaggccagaggcagtgtttttaatgacaagaacaaataaagcctatttatgttaaagtatatgattagatttggacttctatgtttactcacctttcccgatgtctaaaatgcccctgccaaaatacattacagggatatttttttagcttgaatttagatttttttttttttctttgagactgagtctcactctgtcgcccaggctggagtgcagtggcgccatcttggctcactgcaacctccacctcccgggatcaagcgattctcctgccttagcccaagtagctgggactacaggcgcccgccaccacgcctggctcgttttttgtacttttagtagagatggggtttcaccgtgttagccaggatggtgttgatctcctgagtttgtgatccgcctgccttggcctcccaaagtgttgggataacaggcgtgagcctctgtgcccagccagatgtgtgtggttttttttctttttcttttttttttttttttagtgtgctaagaggccaggagcagtggctcatgactgtaatcccagcactttgagaggctgaggtgggtggatcacttgaagtcacgagttcaagaccagcctggccaatgtggtgaaatcccatcactactaaaaatacaaaaattagctgggcatggcgggtgcctgtaatcccagctacccaagaggctgaggcaggagaatcgcttgaatttgggaggtggaggttgcagtgagctgagatcatgccactgcactccagccttacagattcattccaactgaatctgtaaacttaaacaattaaacagctattttattgtattatttattttgaaggatgaatattctcttgaaattttagtgttatataacataaatctgcatttgttttggagattgttcactacatttaatttactgattaaattcttatgtgtactgatgatgtgcatctgtatgtaaacataagtttttattcaaacacaaggcaaaaaaatcttttttctctgcttggttgtccgataagaggaacacaaccccctattactcactaaaaaagaaaaactggaagaatttcaagtatttagtttcttattaaattcagatgggatgatagacctctaagttgaacttttccttatccttaatgggttgtatgcattaataactcttagcttgattctggcctaatttcttttaaag

SEQ ID NO: 109 - DNA, 32742 bp, Homo sapiens
  source 1..32742: mol_type = other DNA
ggaagccgccgagtgattagtgagcggagaagctttcttccggcgggaagggccccggaggcgggcacttggggggaaagttgagacgtgattaccgggttgggcgggccccatctgggaggggtttgtgggtgaactcggggtccaccgcccgctgaggagatggatgaggacgggcttcctctcatggggtcaggcatagacctgaccaaggtttgtaaaagacggtgctagactcccgacgagccgggaggaggatggggaagacgcagctttccggggagacacccaccttccgagtccccaccctgtcacggcctcgggcccttgtgacaggcctgtggggcctcaggagggagagccccacagtccaccttgaaatggggtccctcctgagctgattaaggagacggtgtgcatctcccaactgtcgcttcccatctcgcttgtctctctgccgccggcgacacacgccggttgcgatagctagccctacctcttattcagcccccaagattttgtgtgtgtttatgtgtggtgctttttgcctgccaaaattcgtaccagtgagtctagagcctgttctcaaacttttgtgcacctctgtcatcttcggacaccccacccacagcttaggaaacaagttaatgactattcccagtccttcaagaaattcatatcacacagcaaagtgcctcgtgattatgtccaaatatgaaaagatttgcactgtgtacgttcctcctgtatgaaccatgtttgtttttacgtaacacaggtgccagctattcaacagaaaagaacggtggcttttctaaaccaatttgtggtgcacactgtacagttcctcaaccgcttttctacagtttgtgaggaggtaggtccggtgatactggtttatagagtcgcctggaaatcacctttcactgctgagactgacaaatggagtaaaacaagaattacagtctttattcatgtaccgtgacctctcatcacccaattgtgttaacacatcttaggttctcttttactctgttaaaatcaatcctgcacccctcctctactgagttagtgttctagaggtccctgtgagataggtcagtcaggcttattgcgattaaagggaacaataggaaatctaattttttttttttttttttttttttttgtgagacagggtctcactctgtcacccaagctacagtgcagtggcgcgatctcggctcactgcaacctccacctcccgggttcaagcgattctcctgcctcagcctcctgagtagctgggattacaggcatgcgccaccatgcctggctaattttttatatttagtagaaacggggttccaacatgttgatcaagctggtctcgaattcctgaccttgggcgatccactagcctcggcctcccaaagtgctgggattacaggcgtgagccaccgcgcccggcttctaaaatttcacagttgaaaacagtttttattttgcaatttgtcattcgttcccgtaccccaaaaccacattgtttaaatttattttacattctggatctaaaagatggctagaggagatagcctagaaacataactttggcatcaaatatgattatagaaatgaaaatattttctgcaaatgacttgtgatgtaaggattaagtacccaactagggattaggtaccagaactggcacagcagtgcgcacctgtaatcccagctactcgggaggcagaggcaggaggatcacttgcgcccgggaatttgagacaagactggacaacagagaaactcagtgttttgtttttgtttttgttttaaaaaagaggattaggtactagatccaggatccagggaatccctgtcttttaaaaagccaaaagaggatggggaagacaatgggaaccatgggttgaaattgcatttaaggaaagagcaaagtaaattatgggacttagatattcacaagtaagtctgttgaacattctgtcttatgtaaggtatagccttagcaattagagtttttgttaagtgtgttactactattaataaaaattgcatggagatgggaaaactattttttacttgtatgaaattccagttattgttttgtctaattatcaacatttcttctgccttctaagacaaagtaaaatatagtaattggtagagtaaggggcttaattcaatttagttttatatgttaatggccagaaactaggtgcttgcttccagtcagttttatttcgttcctactatctctctaaataatttaggatataaaattgactgaataaaaaccagtaagccaaggttttcacccttcgatttttataccagggcaagatggagaagtatctggaaagggactgtcccaggattactagcagaaagaagcaaatactcttatccccatagcccttatcatcaagctgaaaaataaagaacaaagcaacaagtaaacacacctatgaaagcaacttgtttgagctgtcctgaaacagggatagcccttcacctttgtagtgcctaatggttcttgaatgagagctgtttactgacaactagatcaaagaaaacaatagtcatctcatttattgatagattatgatcaaagcctcatgagtcactctttaacctcctcctgttcctgtctcaacttctctgcagctgttctggctgtatctgtattctagtacttctttgaactctagagaaaagtttgttcatcaaaacctcatgaagtttaaaggtagtctattgccttttgtcctttttcaaaaatcttatttctttatttaaattgacaggtaaaaattgtatttttatgatgtacaacatgatgttttgatatatgaatacattgtggaatggccaaaccaagctatttaacataagcaatgcctcacgtacttacttttttttgtggtgagcacacttaaaatcgcctctcttagcaattttcaatacaatatattgttattaacagcagtcaccatgacatgtaggagatctcttgaacttattcctcctgcctaactgaaattttgtatcctttaaccgcatctccccaatcctcttaaccccaagcccctgctaaccaccattctactcaatatttctatgagttgtacttttttatcctccatatataagtgagatcattcagtatctgtctctgtttgactggcttatttcatttaacacaatgtcttccagttcatttatgttgtcacaaatgacaggatttcattcttttttaaggctaaatagtattccattgtgtatatataccactttttttaatccattcatccattgatggacacttttgattccgtatcttggctattgtgaataatgttgcagtgaactttcaagtacagatgtctcttgaatgtactaattttacatcctttggatatatacccagaagtgggattgctggatcatatagtagttctatttttaattttttgtggaacctctgtactattttctataatagctgtactaatttacattcccaccaacagtgtacagaggttcccttcatcacatatatggtttccaaatatagtctcccattccataggttctcttcactctattgatggtttcgttggctgtgcaaaagcttcgtagtcttttaaaataatttttaaaaaataatttaaaatccagattctacaaacttcttagtgtgatgtaatcccatttatttatttttggttttgttaccagtgctttggggtttatatccaaaaaaagtcattgcccagaccaatgtcgtgcaactttccccttatgttttcttctagtagttttacagtttcaggtcttacatttaaatcttgaatccttttcgtgttaaatttttttatatggtaaaggatgagggtctaatttcattctgcatgtggatatccagttgtcccaaaatgatttattgagactgttattcttaacatctgtgaaaagtatgtttctgtaactgtcttttctgtgttcttaacatctttctcaaaaatcaattgactttaaatgcatggatttatttctgggctctttattctgtttccttggtctatggctgttttgattactgtagctttgtggtagattttcaaatcagagagtgtgatctctctggctttgtttttttggcttaatattgcattgcctgttcagggtcttttgtggttcagtatgaattttaggatttttttttctattactgtgaaaatattattggaaaattgatagggattgcattgagtctgtagattgctttgagtggtgtcaaccttgtaacaacattcatgtttccaatccatgaacacacgttatctttccatttatttgtgtcttcttcaatttttttcatcaatgtgttatagttttcagtgtacagatctttcacctcactggttaaatttacccctatgtattttttttgtagctattgtaaatgagattttttttcttttttttcagatagtttacttttagtgtatagaaatgctactgatttttgtatgttgattttatatcctgcagctttaccaaagtagtttgttagttctaacaattttttggtggaattttttataagattttcaatatataagagcatgccatctgcgaacagaaacaatttcatttccttttttccaatttcaatgccttttatttttccctcttgtctaattactatagctaggacttctagtactatgttgaatagaaggggtaagagtgaatatccttgtcttgtccctcatcttagaggaaaaactttcagttttcaccattgcgtatgatgctagctgtgggcttgtcataaatggccttcattgtgttgagctagattctttctatacctaatttgttgagagtttttatcatcaaaggatgttgaattttgtcaaatgcctttgttccatctattgagatgatcatacggtttttgtctttcattctgttaatgtgatgtatcacctttactgatttgcatatgttgaaccatccttgtatcccagggataaatctgacttgatcctggtgaatgacctttttaatgcgctgttgtattcagcttgccagtattttgtagaggatttttgcttctatgttcactggggatattgacctttgattttcttttcttgtagtggatttgtctggctttggaatcaggataatgctggcctcctaaattgagttcgaaagtttcccctcctcttcagtattttggaagagtttgagaaggatttgtattagttcttctttaaatgtttggtagaattcagtagtgaaggcatcaagtcctgggggttttgtttagtgggagacttaactactgatttgatctctctacttattattggtctgttcagattacctatttctttatgatttagtcttgataggttgtatgtgtctaggaacttatccattctaggttatccaatctgttggcatataattggtcatagcaatctcttatgagccttcatatttcttttgttttaattgtaaagtcatgtttattggagtatgaacttatatgcagtaaaatttaccattaagtatgagattggacaaatgcataatcataccataatcaagatgtagaatagttgtagaacaagatatagaatcactccaaaaattccctcatgctcctttgcagtcaccccttttttatccctaggaatgcattgttctgttttctgtcaaaagggccaaatttaatcactgcaatggtctccagtactgtggaaaaattcctgagcatacaaaacacacaaaccaagtttttaaaaaatgagatacttttaaaaatgtctttagcatatcaaccaaatgaaggtagcttcatattttactacagatgctcagatatcttaggcagaattaagtccaccattgccatatatatgcctcaacagtaatatttaagagtagactgtaaaaataaacttacaatctttagaatcgtcaaaacaatgggattattaaatgacctttgtaagttaaagcaaagtttataaagttgtcttacatagttgtgaaatagctagtctagttagatagaattaacgtctcctaaaactgacctgcttgaagaactactgtaggtcatgtctttgtaggtagagtatgtgaacgaagattaagtacttgctcttttgtgttaacactgtgtcaagtttcagactggggctggttgatagaaaaactagttaaaaaaaactattttaaataatggaattgaattttatggaaattctctgtggcaccaactcaaccacaggacagaaacaaaaaattctcatctaaacattcctgtagaaaattgggaccatctaaaaattcaccccagctaccaccatgaaagaaacaaagaaagcaaaaacttctgttctgaatatatcagtggtcccatattcagatacttcttatctacttgaaaagctttgatgggtggggcacggtggcccacacctgtaatcccagcactttgggcccaggtgggcagatcacctgaggctaagagttcgagaccagcctggccaacatggtggaatgctgtctctactaaaaatacaaaaattaactgggcgtggtggtgcacacctgtattcccacctacttgggaggctgaggcaggagaatcacttgaacctgggaggtggaggttgcagtgagccaagattgcgccattgcactccagcctgggtgacagagcaagactccatctcaaaaaaacaaaacaaaagaaaaaagaaaagcttcgctgattctttcaaacacacatcagaccttaagttcattagcatttataacgtcactgagctgcattgagctctgtggctgaaaaagccaattctttgtatttctgtggtatcagttgtaacatctctttcgtttctgatattatttgaatcttctccttttcttaatctagctaaaagtttgtggattttgtttttcttttcaaaaatccagctcttagtttcattgatcttttctattgtttttctagtctctttcatttttttctgttccgatcattattatttttttccttctactaactttgggttttatttgttcttctattccttcagttgtaacactaggatgttacactttggatctttcatcttttttgttataggtctttactgccgaagcttcctttcctcttaaaactgcttttgccacctcccataagtattgatgtgttgtatgtccattttcatttgtctcaaaatacttttaatttcgtttttaatttacttgacctattggttgtttaggagcatgttatttaatttccagttatttatgatttttttcaagattccttctattattgatttctggtttcaaaccaatatggtcagaaaagatacttgatacgatttcagtctccttaaatgtattaaaatttgttttgtggcatatcatataacctggagaatgttttgtgtgcccttgagaagaatgtgtattctgttgctgttttattgaattttctacatatgtctgttagggccagtgtttcattattgattttctgcctggatgatatgtccatggtgtttgtagagacggcgtctcaccatgttgcccaggctagtctcaaactcctgagttcaggggatcctcccgccttggcatcccaaagtgctgggattacaaatgtgagccactgtgctgagctcttttccattctttcacttcaatctatgtgtgtccattttttaaaggtgaagtgagtctcttgtacacagcaggtagttgggtcttatttttgtatctattcagtcaatctgtgtcttttgatcagagaatttagtccatttacattcagggtaattattgatagataaggacttactgctgcgattttgttcattgttttctagttgctttatagatcttttgttcctttcttccactcttgctgtcttttgtgattagatgattgtctctagtgatatactttgattccttacttttcatcttttgtgtatttactattaggtttttgctttgttgttcccatgaggctgacataaaacatgttataacaggctattttaaactgataataacataattgataacataaaaaacctctgcacttttactccacctctccacattttgcttttgattttgcaacgtatatctttttatactgcatatcccttaacaagttattgtagctattattatttttaatagttttgtctgttaactttcatactaaagatataagtgatttaatcaccatgacagtattagaatattctgaatttgactgtatacatttttttttcagctctaaaatttctgtttgattttttaaataataattccaatctttctgttacatttctcattttggtcatttattattttcttgatttcattgaattgtttctctgaattttcctgaagtccactgagtttccctaaaacaataattttggattcgttgtgaagaagggtcagttactggtgatttgtttctttagtagtgacgtgtttctctgattattcttggtctttgtggccatgtgttggtatgtgtgtgtttgaagaagtaaggacttactccagtctttgcagactggctttgtctgggaaagcccttcaccagtaagctcatccagaggttctagacaggccatctgttgtggtgcatggcaggcttgctgctggagtccttgggtaggctggcctggtgcctaggttcgtagggttgttcctggagcctgatccactggggtggacctgctgattagctctataggggtgggcctggatccttagggttccaacttgaagcctaagtctgcaggggttggtctggcactggggtgagccttgagcctgagtctgcagtgtctggccaggttccaaggtgggcctggtgcttggaacccctggggtggacctggagccagagtatgtgggggtgggcctgggtcctggttgtactgtgactagcctggagcctgagtctgcaggagtggtcctgcagcctccgtccatgggggccaatctggcaatgcaatctactggggtggtcccagactctgggtctgctggaacatacctagaccctgactcaccacagggatttgtctggggccagcttggtgctggggcaagtgtgcagcctggggtcacaggggccagactggagcctgagattataggtgctggcctggtaacttgggctacatggggctggcctgggtcctacggcaatagtggctagcctggaacttgagtccacagggatggtcctggagcctgtgtttatgggtgtcagcccaacagaagggcctactgggatgggcctaaaccctacttccactagggtatgggctgcaggagccagactggggccacaggagctgacttggcactggtcaggcctggaacctatatctgcaggagctgacctggtgctggggtgggcctgaaccttgggcccatggaggctagccctgtgctgggattggtccagaacctagggccactggggctggcctgtccctagagcagacctggagacaatctatgcagtcttgcctggtgctgggactgtcctgagccttgagctggtctggaacctacggtcccagtgggacaagcctagaactcaggactgggtgatccagcctagtgccaggatgggcctaaaggcttcgcctgcaggtgtcagcctggagtctgggctgagggggcttgctcagcactgagttctgctggggtgggcctggtgttgtggtccaaggcaaagtcctgtgctcactgcctctccttcgcccacctggagggtatctctctccatgctgtgctgcctggagttgggggaagggtgacatgagttctgtaaaactgtccttcttaccctcttcagtgtgttttttcttacttttgtgctaaacccagtgctgtaatttctcacctggtctccttagctcttgagaatgtattttcgtgcgtgaatagtttttcaaatggatgtttctgtgggaggatcagtgctggaaagtcctattcccccatcttgctgttgtcccacctttttctcctttatgtatgataatctagggttgactgtaactgattgtctacaatatatattttagcaatttggatattcatgtcagctggagactgctcaatgagataacaactaatatttattgtgtacttcctctgtgctgggcatcatactaagtgctttatgtgtatttaattatcgcagtcagtcctttgagagaggtttagttatcccactcatacagatacagaaactaagatgtagagaagtttaaatcatttgcttagtcattcattcattcaacatatctttgcatgcccccagtagttgtagctgcattagctgcacatacacagatagaaagtagcagaactggattcccactgattttttaactggaaaagtcaatatctcattgctttcttacattgcactgctttatctgattaagaagcatgcttatgtcaacttcaagtgagagagtgcagtacaagtaccttcttatagctatattaaaatctatttttagactcattcacttctttgctatgctatgtctgtttgatgtaatatatttttatgtcaattccaaagatacatgtattcaaatgtaaggtgccattttctcccaaggtaaagtcactttggtgttttgaaatgtttttgttaatagtgcctaataggcctctagtccttatttatttaaagcctcaaacaagaaccaactgactgtttctctcaacaaaagaggaacctcaactgttagtttttgaactgagagtgaactgggaggaaaaagaaaacttttcccaccccccgacaggatctggtttgaaccaaacccaaccttaaacaacttcagtcacagataaaccctcaagccagaattaagtttgaaacaaattgctagggttctttcttcatcagtggcactgtttctagagttcttcattaaagagaagagtataaaactgcattctgtgaagaactcaactttgcaaaaactttctgcatattaggctacttttgtaactcttccagtgattggcaccagagtagaagagagattagatgacagagaaagtagtagaatcagacccacattacagaggtacttagggtcatctcctcttccatcacaaatccccagtgagcatttttattcttgctttagtcagcaaaatcttatggtcatccattgggactgcaaattttgaggggttggcaggaagcaacataagctctatgcatattgcaggtgaaacctgagcatttaaccttatagtgaattttaaagtcaaaggtactttataaacaggagtgccaaatgtgttactttggttttttgtttgtttgtttaataatttttttttcttttcttttccccccgagacggggtcttgctgtatcaccgaggctggagtgcagtggcgtgatcacagctcagggcaacctcaacttcctgggctcaagtgatcctcccacctcagcctccctagaagcttggactataggcatgtgtcaccacacccggctaattgtgtgtgtgtgtgtgtgtgtgtgtgtgtgtgtgtgtgttagagatggcatcttactacattatctaggctggtctccaactcttgggcttaagtgatccctcggcctcggcctcccaagtgctggaattataggcgtgagccactgtacctggccagaatgttattttaattcaaactttttttgttgtttttttgtcagacagggtctcactttgtcacccatgctggagtgtagtggagtgaacttagctcactgcagcctagacctcctgcctcagcgccccaagtagctggaactacaggtgcgtgccaccacacctggctaattttttgtattttttgtagagacagggtttccctatgttgcccaagctggtcttgaactcctgagctcatctgcctgcttcggcctcccaaagtactaggattacaagcaccctcagccaaactcagacttattacatgcctaagatactggatttttaaataatttttttaaattctgaaatttttcttttttctaaaatctttaggtacaagcaaaagtgctgagaattgtcacataacctgaaagtttctttagtgcttatcttctacattcatttttttagcctgccattggacttaacctttaatcagataatattttgcttaaatccttatttgctcttatatctttaaccactgctgggcttaagtatcagacacaacctaataaaaccattcattgcttccttttctggcttctggggcacacgcaacacagtggggtataccaagagatccattatcttaaaatactgtttctcttttagagaaatggatatataaacaagatattttacaaccatgaaaaaccagcattttattttgtttccatattcaactagtaactccatatttccttctttcttttgtccttttttttttaactttataaaatgtactgccttggaaatacatgggtagtaaatcaagctttcagcttatctgacaaatatcagggactttgtaaattcccctgttatcccaaaccatagcatttcaagtttgttttcagtcttcatgaagacgatggttaaatggatgggaaagactgttacctttccatttcctcttgctaaaactttcagaggtgagaacagctactgtcaccgattatgttacttatgttatatccacagtcatccataatttagagcagtggctctcaaccaggggacatatggctatgtctagaggtgtctttgattgtaataactggggagtgctactagcatttagtggatagagaccagagattctgctacccatcttgtagtgctcaggacagtcccctgcagcaaagaatatttcacccacaaatgtcaatatagctagcattgaaaaacttgttttatagtggtctggggattgtataaggaaaatgccacaagcatacacatcttagaaatgaacttcagcagcccataaatgaacccaggtataccttttcacctgacaatggctctttaaaaagtatacattcaggtatgttataccaataattacactggaacatacaaaaccatttattatactgaattatctttgaaaagtagttctttcttaatcatgccatggaccctttgacagtctagtgaaaccaaattaatgttttcaggtggatagaataaaatgcataggattacaaaagaaaccagttatatacttaaaaaaatttaaaactatgacatactagtaggttctttattaaagcattaaattatataatcctttcatatgtctaataaccttaattttgaagtataaggaaatctgcagcaattgtgatgtgatttaaaaaaaaaactatgatttctattggtgacagtcttagatcctaaaaccactgtgattttttttctttttcttttttttttcttttgagacggagtctcactcgtcgcccaagctggaatgcagtggcgtgatctcagctcactgcaacgtccgctttccaggttcaagcgattctcctgcctcagcctcctgagtagctgggactgcagacgcacaccaccacacttggctaattttttttgtatttttagtagagttggggtttcaccatgttgaccatcctgacctcagatgatacacctgcctcggcctcccaaagtgctgggattacaggcatgagccattgtgcccagcctatggtgattttttttttaactatgtttttaaacaatgctgaatttaagctagaagtagataaaaataaaggtagaattttttctctcatcctagttcatgtactgtagttcagaaccactttgtaaatgatcatctcagaatcagaagagcaaaaggcttttcctcttggcacagaatcatcttagtgagaaacgaattgatcatttgttagctttggataacaaaaattctgtgcaatacccaagaatttaccattatgttttaacagtgtaaaattatctcaaaaaaatctcgtgaagtgtattgcctctggagttggagggtttgagttcaggatattttacttgtatgagactcaattttctcatctttaaaattggcataatagttcctactttatagatttggtgtaagatttcaattgatatgttgcatatacactgtaccatatgtagcaaggtaaatactcagatatttacagtattgatgattattgcttaaaagtaaatatataggtatattaaaacagaaaaatttttaattccatttttttgtttccttttgtgtttccttcaatcaaaccaatatgtccatttttaaataagttggaaattctcattcactttacatattaatttgctgtggaattttttctctagtgaattgagactgattagatttgccaaaattaaatttctatgattttaaggaatacacttataatttggagagggattcattcataatacatgttataaacctgtattggtgtttacctaaaagccttatgtgaatgaattctagaagtcaagggtaaacttagctttgataccatgaaaactagatcctaatactttatttgtagattatgtctttgtcgatatcaagatgctaaactaaaaataagtgatctgtaaagaagcactatctgctttgtggccactttcagttttttgccccctctaattgtgggcaaagtgaccatttcacaggatggtaaagttctacttaatagtcaggatcttaataatatcccagaatacaatcaggatgctgtgtatctgccagcttgtaaactgggcaactgctcttggattatgtgactgaatataatgtttaagattaggaggtttcaagtaaatgttctttacttgaatggtcatattttatgatgctacctttctttgtataggtgtatatttacacagaggtacattgacaatttaattatacagagtaacaagcatgataagctcttctatctggtttatcttgcattttgatagtagattttaatactctagttttttctcttctctttccaaaatgaattactcatcttccaattccattcccctttatttttcaaactacagatgtttaaatctgggacgaattgtatatgctgatgcatttaagtaatttataaaggcagaccttgttgcagcgtgtctttgaataatttttattcttttattttctatgaaaaaatttcttcattcatcaacaaataattattaagctcctattaagtgtcagggtactattctgggcactaaaggtacagtagtaaacaaaaggctctgtcctggtttgtttatattctggtctcaacaattgtttactgctctgataatgagtttgcagaaaatgtcaactttgttataagtgaatataattttataaaataactgagaagcgactgggtgcggtggctcacgcctgtaatcacagcactttgggaggccaagcaggcagatcacgaggtcaagagatcaagaccatcctgaccaacatggtgaaacactatctctactaaaaatgcaaaaattagctgggcgtggtggcacgtgcctgtagtcccagcactcgggaggctgaggcaggagaatcacttgaacccagggggcaggggttgcagggagccgagatcgcaccactgcgctccagcctggcgacagagcaagactccgtcccaaaaaaaaaagaaactgagaagcattataatacacgtaatagaagagttctcattcctactcatgtaaataagacagtactgtattagaatatgacaaatatttaatggtttttaatattttcatatctgcccttagttattgttaacagtttattttaattaaagtctttatgtctctaatttttcttttacagaaactggcagacctttcacttcgtatccaacaaattgaaacaactctcaatattttagatgcaaaggttggtatttctcaataatttgtagtataaactttgctgtgcatataccagctttcttaatcatacttaattttcattgcatttgggagtgattccatttaacttctgtatctgtgaagtgatactggttgtgtttttaattttactgcagttgcaaagaaaatggtgttcattatgaaccattaattcaaatgtacacatggtttgcgatttctttcattgtgctaggcaaacgcataatgcgagtaacatgttaacaagctgagctgttatctagttcacttcatttgatagaaaattccagatttattttactagttattatttgataatacaatactaatataaatctttagatgtctcagagcaaattttagagacaatatcagctgtttctatttgcagataccttaaatgctaatgaggaataccagttttgatgtcagaaattgcaaataataactaagaaaaatagaagactgttttagattgcaagcttaaagattttgataacagtgatgtctttggtttcatttttaatatttttttacatgtgttttttctgtttataaagttatggagacactagtgtattttcatgactaactttcctgaagttaatattttctttgtccatttaccaaaataaaactaagaaatattctgtaaatatttatgaggaagaaaaaaatgatatccctttttaatatgaccagaatgtctagtttgtactttctacgtctctttatggacttcagcaactgtgtttctcttagaacatttctctagtttggaaacccggtcttgaacatgttcaagatagtcctctagcagccatacccacttgaaactatttgggccatagccactgtgctaactatggttatcagtcaacagttctcaatgagtattgctgcttgagatcttattaccattggttttttttttaattattattctttataatgaatatgtgtcttattttaatgtgaatatgtgtcttattttaatgtttaaggaattcctgggagttagagtccaaggtcgcacattaaatgaccatatggacaagttaaccttagttatttccatggccatagagtcatccccaaagttagccaaacatcgacaaatgcgtgtcattgatatcaggatgaactcagaaaagaaggtttgtatgggtctcgcagatctaacctgaaatgcttaactatttcatagtgaaagctaaaccatttcaggttgaaataccaacaatatgcccatttttttgcatagaagaaacatattttaataacattcagtggtgaatgttcaaagaaagaaaaaagaatgagctgtgtcacacattaaagtgtaaagacaagagttttgtcatatcctagataattgaaactcaaaatttgcacaaagcccttttttttcgaagtattatcaatagaaatatttttacaacaacttttctaggtacatgttcttatctccactttacaggtgagataattgagacacagggagttttacacaagatcacacagcttgtgagtggtagagctaaaagttaaacctgacagtctgacttcaaagaccaggctctcagtccttacactaggattgtctatattttgaaaatgatggttatgtaaactaaattagatttttgagaagttcttcaaaagaatttgtgaccgtctttcacttttagtttatgacatggaaaattaaagacaagatattgtgaacctatttgtatagccttaaaacttaagacagctattaaaaatagtgtttatttatgcaagtactatcttcatattccaatactaattttcttttctcagttgtcatctatcccaggcctagatgatgtcacagttgaagtatctcctttaaatgtcaccagtgtcacaaatggagcacatcctgaagccacttcagagcaaccacaggtaagtgagttctaagaaacgagcagatgttcttggttgaaactgatagtgttaagcagcaggttggaaggaagaaaaataaacatgtaaaacttctaatagtaaaattttaaaaccttaacatagaaaatgaagtttgggaaaaacaaattagctgtgttattttgaagggcttcctgaagttaatactttctttgcctgtaaaaaagaaaatcagtctatataggactaggaaaaagcttcaaataattattttcttcaaaataattagaaatttttctaggttcttagaagaaatgtacttttaaaatattttattgtaaaatttttaaacatacacaaaaatagacctggattcaccagttttcacaattgcttcatctatttttttggtcacttgctgaaattaattccagacatcttgtcatctcaccctgcataaatttttgagcatctctgaaaagttttgacattttcttttgtaacatttgcttatataaatgcctttatcatatacagtgtaattaacaataattggccaggtgcagtcactcaggcctgtaatcccaacactttgggaggctgaggcaggtggattgcttgagctcaggagttcgagatcagcctgggcaacatggtaaaaccctatctccactaaaaatacaaaaattagccaggtgtggtggcacgcacctgtggtctcactactcgggaggctgaggtgggaggatcacttgagcccacgaggcagaggttgcagtgaaccgagattacactactgcactccagcctaggtgacagcgcaagtccctgcctcaaaaataaaaaataaataaataaataaaacattctctggtattgtctaaccccttgttactcaagtacacgccatggaccaaccacatgggcatcacctggcagcttgttagaatgaagcatctcaggctccaccccaaaactgctgatgagaatctacattttaacaagacccctaggtgatctgtaggctcttaaaatttgagagctactgatcttagaaataccagtgtgtttttgaagatgattcgtttgaatcagcatcccagtaaaagctatactttacatttggctcttagatcttaacatttacttatgcttctgtatgaatttaaattttctattactttttatttcaaaaaataaaaattctttgttgtttgagaacaatctctagtgtatctcagcgaggtattaaaatctaaaacaaagtaatcatcaaaatggtggcctaccaaagtaataataataaacaaataaaacaaacagatttataaatggaattctgcctttgtacctggaggcacttttcacaggatattttttagatcacgatgatgttgacagtgatgataacagctaacacttcaagagtgctttctgtgtaccaaggcatgcacgtttctaagtgcctttcataaactaatttaatctttacaacagccctataatgtaagcaccatattatcaatcttagtttatagatgggtcaaatgaggtatatagaggttaagtaacttgctgaaggtcgaaaagtaacgtaagagctagaattttaacccagacagtctggtgccaagagccctagcacttacctgcttcactacactatactacactacactacactgttttcagtacctgtattcaatttatttaaacatattgaggatgcgtggtatgaggccctgtagaaagagccatatatttagaatatagtatatatttgggtaataaattagatgatcatttacttaattagatattataaaatttaacatccatttatttaatatagcaaatttcattatggccactcaaatatataaaatgtgcaagaggatatccagatgttgtagaggagtttaactttacattctctcaattaaatatgactatcctctttctaaaataaagcgtctataaagaatattaagaaaatatttccacactacctagtagttattatgtggtagatagagctgtcatatatttctgtaagatttttaagtatacctgtctaactttgattattaatttttccaggtgctattatgaatgccatctataatatgccctttaaaattcttatgcagttgtgtttgtcctcacatatttaatgtcccaaaaattgattaccagtaatcacagctgaatttcttaatttgctttgcaaattcagaataacctggtatatctctggcaattttatttaaaaattgtatatgtatttatttagagggtttatgaagttctgttggcttccaaagtttgaaatactgtgataaaattgtgtgttgattagcttaataaaataactgctcagcatgttcttaatattcacatcaacttctcatttattcattgttattaattggtatattttatacaaaatattttgaagtgggcttaagtattgcttaatccagagttttcattgacattatagtcaactcacttatcagacaaaggagaataatgcactttttaaaaaaatcatctgtttatcactctctctaatctatacatgagtcaaagacccaaggtttgtgtactgatttttctgcaactttaatttcatggttcagatttcatcattattcacaatagaatatccaattgtgcagagtgagattgatttgagaataaatgaaggacagttgagagatatgatagaggatttaatgggtcattcaaatagcaaaggtgtaatacatttcataattaaaccttgttgaggtcttggttattaggcaaaagttaacgactgagaattgatatctggccaggatgtagttcatttgcaccattttgctattatatgagtttaatttccataaattgttaaaaaacatacttggttattgttttaattttttatttaattaacagtgttttggaatttttgtatttgtattatagatgaatatgtgtgtgtgtgtgtgtatatatatgtatatatatatactcactttggtaaaacttagcaatatcatgtaacagaagaaacctaaaggatttttggatgtttatttgctttgtagtttttgacagatttaatttatatttgaattatctgaggaaaaacttcaatatgtaattcacattcatagtctaaagactatgaagatataaagatattgatttatctacatttcagaatgaacaatagacataaaattgatttcttctaaggaaattcttttaatgcttatatacagataatgagagagattcaccaaagtaagctttttctaaatgtttggtttgatagaaaaatcaagtactgtatacaggcagttctatctagttttgcatttaagcaaggatatggttctcatatgcacaagtttcagtaacatggtaccatgcaaaatgaagactgcctgtataacaatagcatttttatctaaaaagaccattccccagtattctttattgtaagtcatatttagtatgacattatgacttttaaccactctgtagacaatgttaccattaatagttccatcagtatctgaaatgtataaaaccagataattttgtctgacaaactggcttctcttttacaacttctccaaaaattgctttctaaaagttagaagagccatgtccacttagaataaaatgatttaataaataaagggctcaattaggtagattctagatacctaggaaatcaattcatcattatctcaataaatttattattaatttgtaaacagttgatagttttattagctttcttaaaagttttgttaaaatagtatcaccacctatatataattcatgctttgtatcagcactctggggacaagtaaagcagaatttttattttaatgcatgaatatacttgcattttaaggaaccaatatagtgttgaaatgtaaccttctctgaaatgatatttaaatatttgtagatatttggaaacatatctcatattaaattattggtatttaaattgggggagatgatttttttctgcaatttactgccttagaattatggaaagaaacattccttttaagtaacatgatagaccccttttgtaaattgtctaaagatttacaccaaatactctctacagcagaacagtacacaagactctggactacaggaaagtgaagtatcagcagaaaatatcttaactgtagccaaggatccaagatatgccagatatctcaaaatggttcaagtggtaagctaacttggtctgtcttctttgtgtagcagcctcacttgaaattcttaaccctggaggttttactgttatttttttcaatctgagaaaactgctaaaccaagtaaccaagttttctattctcttacttcctttctattttaattctctgattaaaaaaaaaaaaggaagtcaaatctttagaattgatcccacactttaaattaacatagtttaatatagatttatgtacatttttttgcattacacaaagttatcaatgcaaatcttagatacagaaagtaatgaaagtagactattcatttggtaaatcagttgactctagcttaatccccatattattagcacaaataatattttttaaaaatttttatgtttatcaatgatctcttggccatgtgtaatgcttttaatattatatgacttcagaattcatatttttcctgagaaatcataacatgctgtggtaccaaaaatatctgcagttgtctgtgatagcagaagctaacatttttttattcctttagaaagtatttcagtagttgaaagaggtagttgtccatcatttttctgttaatcaaacagttaaagcctggcgcagtgacacacacctctaatcctagcactttgggaggctgaggtgggaggatgacttgaagacaggagtttgagaccagcctgggcaacaaagcaagaccacctacttctacattaaaaaaaaaaaaaaaaaaaaaaacctaactccatatgatggcatgcacctggtagtgccagctactcaagaggctgaggtgggaggattgcttgagcccaagagttcaagggtgcagtggctcacctcactgattgtgccactgtacttcagcgtaggtgacagagcaagaccctgtctcaaaaaataataataataataataatgcttttgtaaaattatattatcaagcaaaagaagcacaatactaatactaaaggacagttttgttttgctgtccatgggatagtttatcacctagtaatttaaaagcaaattctgacaaccagaaagagtagattggctcatttggaagctgcacttttcctagctatcagaagtggatttttcacttccacagttctttttttctgaagcctagagctcaggatattggcggtcaatttagaaaaaaataaaccagactttgggatgaaaatagatgaagtttttttaattaacaagaataaaacaaagccagtttaagtatgaatcatgatgaacacgtttttaaagctagaacccaggaaagcctaagcttaaaagatagacttgttaaaaaacaacaacaacaacaacaacaacaaaaactatttcactcttttaaacaaaagggagatgcttctaaatgactcagaaagattttttatgttagccccttcttgccaaacctatataaaataacaaacaggaaaatctactaggtgatactctgtaaaaatgccctgaaatctttatgaaggctgcatcttaggataactgttaaattcttgataattgtcttcaattttataagaacttcaaaaaatctttttctttttaaatccaccatctgtttatttcacaaatatttatcaaacacttacttgaagctaagctactgtattaggtattatctagatttatttagccaactaaggtttccagataccacttgcaatttttatttttgttactaattacgtcaacaagttcaattgcttttcagtcataaatatacatataaaataaatgacccgggccgggcatggtggctcactcctgtaatcccagcactttgggaggccgaggcgggcggatcacttgaggtcgggagtttgagaccaacctgaccaacatggagaaaccttgtctctactaaaaatacaaaattagctggtcatggtggcacatgcctgtaatcccagctactcgggaggctgaggcaggagaatcgcttgaacccaggaggcggaggttgcaatgagccaagatcacgcattgtactccagcctgggcaacaagagtgaaactctgtctcaaaaaaacaaaaaacaaaaaacaaaaaaaaaactgaataaaataaatgaccctttaaatatttactttttattcatatgtcttatcacctcactaggaataagagccaagatccttcacaggcccaagaaatcctatacagtttagctcccctgttacctttatgatctcatatcctcactcactcttctccagctctactggcctcctttatgtcccttgaataaatacattggcagcccctgtctcagggcctttgcttcagctgttctgtctgcctgaaacacttttccccagatatcttcatggtttgctccctcacttccttcaagtctgtattcaaaaatattaccttctaagtacagccttccttggccaccctattttaaattgcagtgtcctcctacccaattccctttacgccttctctgctgtatttttcttcttatcaacttccagcattctacatattttatgtatttactctctctcttccctacaaagttataaactccacaagcaaaggggatttttttgtgtactacagtattcctcattcctgcaataataccttgtacatagtcctgtgaatgaaaatgcttataatttgtctatactatttcaccttttgataggtttaggtgatggactcctttttcacactaactcagtggtttgagaaacttccaaaatataagttcctgggccctaccctacaaaattagaatctctagagttggtacttggtacatacagcatatgtattttggaaaaaaactcctgattaagaattgcttaaaaatatttttaaactatatcttaatatcatttacattttttaaatttaaaagcatttaagaaaataaatagttgttttatttttaaaaagccttaacttttttctagcagtacttagcacttaactctagcccatcctttttgcttgatgtcactgagtatgattaggggttcaatttcttctgcctcagactgtttctgatttaagacaaatttttctgttgttagccctttgtctcctttctgccttcggtgagggtatatctatttcctaagcattttcagcattctggaagggctgcttcttcctggcatctcctccttcaggcacatggacttgaccttcttttgctctgctaagtcatcaatcattcttctatctgctcttaatttttatgtaattggttcatatatgcctcttagtcattaaagttggaggtcatattctgtttcgaattgtttaggggtgattttcaagaagaaagtggggagctacatcaaactgccatcctaaaactagaagttcatccaagttaaatttaattttattgtttttagtttattgtgccaacctgcatcccagaaccttattacccaacttttatttcctattgctccctgtcctgaattggatttttttttttttttttttttgagacggagtctctctcttgtcacccaggctggagcaaaggggcacagtcacggctcactgcaacctctgcctcccagattcaagcgattctcctgcctcagcctcctgagtagctgggattaaggtggtgcccgccaccacacccagctaatttgtgtacttttagtagagacggggtttcgccctgttggccaggctggtgttgaactcctgacctcaggtgatccacctgcctcagcctcccaaagtgctgggattacaggcgtgagccaccacacccagccctgaactccattctttaatcagacaaaaccacaaaccattccctatataagctccatgcttttccttctctgaatccagattctctttctctttattattgcatgtccaaattctgttatctaacatgctcctacgattgcgtccactaaatcattccagattctaaacccaccaacacacgtaaagctagaagtaatagctccttttgttgacctatccaatgactttaccggtattcttcctggagtttgtcacttaatactctgttttatgattatctgtacatatttttgtatctccagttgaaaatggaaccatgagagggagaatggtatcttgattaatccgtgtattcattttaacaccttacccataaaggtgctcaatcaatatttgttaatggactctatatgtaatcctgcatatgatctctccttcttcactttgtgctacctggatatgtataaatatgctctcatttcttcaagttatcaatttaaaatatttttcaggactaaaacaagaatagacccagcagaggtcttcctcaaggttgacatgaatctgccaatcattattttttggattatgattattgaaccatctataaattcactccttcttcttctgttttctaagcatatcatgagtgactgtcaaaatttccaacaacagatgtaggctacacatttgacaatgcccaggaattttctttccttggcataatcactaccagaattcctgtcccttcttcattatcatttattttggcctttgtgttcaaacttaggcgcaaatagttgcatgtttgcctcattgctccctttattgaggaattaaattttcagtggggcaacttaggaatttatcaggtattctaatataggcaaaattaagctgctagtacctgtagatggataatatcccccgtcatgtctgtatctttctgcttgtttacagtgttttaagaaagccttatctaaatcttccatccggctaggtagctaaaaagtatgccccatctgataaaatttctgccttcttttagcctcacttaggggtttctttatctcatgttcaagaatttccatatatgtgtatatattttgatttacggttattgtcctctttctgctgggaaacattgtaagacatttctttgaaatgccagttctcatacacaagtttcttcccattaagtgttagcagtccccaagatttacttattttgaaatttcagatttgctgtatttacatactcacacacacacacacacacacacacacacacacacttttttttaggctattggatttgtttgctgtttacattttcctcctaataatttcctggcagttattccactgttttttccctattatattattgttattcgtaggtctagtcttaaaattttaactgaggatgttttaatcttttgatttcagcgtaaagcttcttgaacatacctgtgggtattatgtcaacataatcttttggttcttccaaaccacttagcacttttccaagagtacagtcattctaatgtcataagttatcacctaaaatattattcttcagcagtatctgcatagctagttgtgtttcctatatccattccattaccaaattataacttttaactggaagagcagataacagtaccactttgctttagaaaatgcctcagagaagtggagtgaagaacaatcacgagagacctattataatttgtaccattgaaccattcattttctgtcattgacatggaaagaatacagatagctttgtatctctatacctcaggatggtgatatgccttcctattttctgtgtttgtcttctaatcagttgttcactctgaaaatgtggttcaattctttgagtataactgagaacaaacagggttcagggggatatagataaaaaagcaaatttgaccactggctataaggaggagcctaaccccagctaattctagagggtgacttcattacagactaccttatcatactgaaaagtgtttcactttcccaacaagattttagatatgtattaaaatacctaatttttctcaactttaggggtgactaacatttgcttacccaccactcaaaattcagttttagttcttaatgcagagaaagaccgataacaacataattctttaaatgagttctaatttgtccattagtatgaccttgagtagtttaccatccattgtacatatgactacagcttatagaaacagttttagaagcctacatgtcagcttttagggaattgtttatattaacacaaaggaagatgacatagtctcaaaaaaaaaaactctttctgaaaaaaaaaactgtatttataccaacaatatctaatcctttataccaacaatatctaatcctaagatcttaagaataaccatctctatgcattcaaaagggaattaacagtgccacaaggtctttcaccttgtgaaagggaaataataggatttgtctcttttcagttgcctttatattcttgtcatttaaaaatattagttactgccccataagaagagtcttaatacctctattacaattatactgagtttctttttccaaagtgtaatatactttcactcagtatcatcttgatacatacctcctcaacaatcttttaatcatttctcctactattttaattattgtttagaacgatttttgtcttctgtaataggatagaattgtgtttttcaagacctttcagcttcttctgtagcatagaaagctttaatttgcagacttctgatgtgatcattcacttcagatatgaatgaaagtcttgcgggttacaaaaacagatttttcctgattttaagacttcctggatatcaggatgaactacagacccctttggcttcctctctaaactgccatgaaaactccctcttcctgggtactaactatcgcctggaatgccttgcttttatatgtgccttgcttcacttgccacatacctgtaaatctattttacagtctagataatgaaaactatttaatcaatataaactcctttgtacaaaaaccaacacagtccttcactaatcacaagtaccagttgacagagtaataagtaataccttgttttttggtctccatgcctttttctgtcactgctggattactaccctctgagagataaaacaatgattagattaaaacaatgaaagaaaagttgttctttctctgggagaaaatttcattgcctaggaatacacccagatcttttcccagtacttctggaatacaacatggtatagtttcttagctttgccatcacatcaagtcatgtcacctctcaagacttcagttccctcatacataaaatgagatctgaagttccttttagatttatgatctattaattgatccccaaatttggatctcattactaatgaatgttcctggaacacctgctggcattttctgacttttttttcctttttaaccaagttttatacaagatttttcagtgagtaatactgttgtgttccaaatgtggcagataattgattttgatttaatgtttgtcataatagtgcagcacaagcctttactaaattacatattgcttttataacttaactggaattgtgtacatagatcacttttccaacaattctcccctttttactggcagatcatggtgaatcctctgccagtaataaattgtgcattgggcaagtccgacttccacattaagaagctaatgacttgtattttttgaaaccatatttgccaaaacagtctcttagacacttagatttttttaaagctctattttctttggctggcttaaaatgtgaattgaataatctctttggttctggtggttctgatgcatccattgccagtggtggatgttggcctgaggaaatgtgacttccattacctaaggatgaggagcttctaaatgattattaaagatgtccatcaagaaggtatgcaccttggaccttgtgaaaccagtcaagcatgaagtagcatgttctttagatgacaaacaagatacagttattgtaagagtaattaaagtctttaaaacattttttggatatgaccccaatgtggctttccatggtttagagaactccaggtagtttcctcatcagtgatcaacagtatagtcaaagtatagtcaaaaaggaggagctactggttcatacataatcatagctgtgaaaaacactgttacagatttagcttaataacgatgtgatttcttttttcattgttttttaactataggtataatattaatatgtatttcatttcttttataatacctaaggtttactaatcaatatcaagatcagtattttttgagtacatgaaggtttgtgggatgggggaataacttttgtgttgttttagcctcattctgtttattgaaaaataaaagcttcatgaccaatgactttgatttgccacacttatgaatataaagaaaagatacaaatgaacatttatctgtttaattaattgtataatttagccaactttgaaaattttaagtaaaaatattttattcttcccatgaactaagtaagttaggcaggtctgactacaactaaaagaaagaagcaaagcttagcaaaatagtaaactatatgaatagtaactttgagttgggataattgggattcaagtgacctctgacatttgtcctcctccttctactttctagcttatatcaaatgcatcaaggtttggatagagttttcccttaagcagaaaactgtgacagccaccaactggaagcccctgccatattacctatgctttgccatggccccagtatacagaggacctagagaaagataacttttgtcatacttttgacaagaaatttcaaaaattactctctgctaaagtcagtgaactggcctctaaagaaatcatgtgtgaagaatgattatgccagttttacagattaggatttttccatcattttagctgccttttgaaccctccatgttgccttgaaagttagggagcttagaaccagtcatactgtgtacagatttaatgttgaaacgacattaaatctgcctattatgtatttgcccttttgcatatttttaaattttcttgttataaatgtttgttagagggcagtaagcaatgatactgctaaaagttcaggttttaaatttcttgctttttctggtgtgtgataaagctagaagagtgaaggaagtactggccatgtagtgggcagatactaaatagttatatggttgtcatgtcagtacctacttggtaatactatatatgcctccctcaattctcatctatttattcttcactgataccactgttgtcataatcatatagctgagaatattttaatactaatatcacattttttattatagccatccttagtgacatttaattgctgtgaaaatgttcatttttgaataatttgtttccaggaactagttgtttaccaaatattttctagatctgtataggtcattagaaataaagtttccattttttttaggtagccgtattcattttacagtgattaaaaaatttatttaaattaattgatatttcttcactgaaagcttcgaggagaaaaggtcattgagcatttgttttcttttgtgttatgatttgttcagtgaacaataacccattatatataatatttaatctgaaaatttcatcctaaatgtacatcctactaatttatttcataaaatacaataattttttttttttttttttgagatggagtttccctcttgttgcccaggctggagtgcaatggtgcaatcttggctcaccgcaacctccgcctcctgggttcaagtgattctcctacctcagcctcctgagtagctgggattacaggcatgtgccaccactcctggctaattttgtgtttttagtagagacacggtttctccatgttggtcaggctggtctcgaactcccgacctcaggtgatccgcccacctcagcctcccaaagtgctgggattacaggcatgaaccactgcgcccggcctcagtaaagtattttttaaataggactgttgaaattcagaaggcaaagatatgattgagtccattttattaagttaaattttaagtaaaaggagcctgattgggggactagctgccttttaacaacccgtagcgttttttcaaattctactagttcccgtgctctgcaaagaaaaagttttttccaccaacgtattcaatagatctattttttattgttgccttaggtagggaagaaaacttcatgtttttcatctttcataattgaattgttacaattcacactcttaaattaagaggaaaaactctaaaatataaggagcatttttagttatttttaaacaaggaaagtcatttatctctcttaaattgacaatgaagttgtttttcccccttctaatctaaaactttaggaaaatttcaacatggtttataaaaggattttgtagtttgactttctttaacacaataagaaataaatgtaaatattggcaggactataaacctccaaacagttttttgtgatataagaaactagtatttaactattagtgctgccatcataatttcattagtgtggcttctttacacactttctccagtgacgcaaatacagacgtgattttttggaa

SEQ ID NO: 110 - DNA, 32742 bp, Homo sapiens
  source 1..32742: mol_type = other DNA
tttcgtgaccttgtccagtagaaggctatttaattttcacaactgcttgaattttgacatacaagatgaagcaagatgcctcaagaaatgctgcctacactgtggattgtgaagattatgtgcatgtggtagaatttaatccctttgagaatggggattcaggaaacctaattgcatatggtggcaataattatgtggtcattggcacgtgtacgtttcaggttagtctacaaaactgcaccgaatgacagtgaacatatttcactactaagagaacttacacaaaccaaatctaaactttgaaagtatattgagtttgaatgttaaaaaaaaaaaagataagatccatagagaaagatgttcccagttatatgtgcctgagatttatgtaaacattatatagatagtgaaaaagaatggtatgaggcttcacttttgcctcatgatcattaatggaatattctgataagtgaaggctatgattaactgaacattggtatgtacaggaaaaaaacaatataaatgagatccaattaattacggtttttctacatcctgctttgacatacaaaaccagctaatgttgagagcccaaaaaacaatcttccaggagattttatagcttttataatattcagctttcctattagtatgctgtcatactttttgtgcatctaatgtatgcagaatatggagtcatattaattgagcaggcagttaagcatagccattaagagcatgaattctagaactggaatgcctacatgtttactcctgctttacttacttcttactagctatgagaccttgaataagatatttagcatctcctgtaaacatgaggaaactaatgcttgaattttagtatatgtaaatatactaaataaaaattccaagagggcatctgacaacattgtaatccatatgtatgttttagttgtcattgatacgagcagtggtaacactctcaggtttaatcaccaaagtaagattgctttgtggtgaacataaaccatgttttcccagaggaaagctagttttacatgtaagagagacttggaacaatgaaggttcaaccctcaggactatctggttaatcctttgtctatcagagtattattattatttttatttttttttttcagacagagttttgcttggtcgcccaggctggaggtcaacctcggctcactataaccttcatctcccgggttcagttgattctcctgcctcagcctcccaagtagctgggattacaggcatgcaccaccacacccagctaatttttgtatttttagtagggggtttcatgatgttggccagactggtctcgaactcctgacctcaagtcatttgcctacctcggcctcccaagtgctgggattacaggtgtgagccaccctgcctggcctagcagaatattattaatagaaccgtatttctcaaattataatgagcacggtaatttggaagtgtccaattttcaaagatttaaaataactatcactaaagtgatagttattataaatgttatttcctcctttactgagaaggcaattctgtttttgttttgttttgttttgagacggagtctcgctctgtcatccaggctggagtgcagtggtgcgatctctgctcactgcaacctctgcctcccgaggtcaagcaattatcctgcctcagcctcctgagtagctcgaattacaggcacgtgccaccatgcccagctaacttttttgtatctttagtagagacggggtttcaccatgttggtcaggctggtcttgaactgacctcgtgatccgcccgcctcagcctcccaaagtactgggattacaggcgtgagccaccatgcccagcggcaattctgtatcttacagtattctgacatcaaaaatgcaatttggcattttatagcacaatgaatatataaagctttacaaattggaatatagtcatatttaagaggaagtgtgaattgaaagtttcagtttgttgctgtctgagtagaatatgacagctcctagcctatttcgtactgtctgtttgggtgggagtagaaattaatagcttttagactaaatatgaccctagcctgacttacatggacatggtttaggatcataaaaagtcatatgattaagacaatgttacgtacttgaaaaagactgaggaaaaaccatttctctaatgcaagccaccaatgtacaaaagagtaaagcagcctcctacaggtaaaactaatttttacttcattacttttaaaattaataacaacataggattgtattcgcaaacactgaaaaatgtttatctcatttatgattaagaaatgttgagggagaaagtcagtggagaacaaattaggaaaagagaggcaaagatgagagagggagaagttgggagaaagaaggaaaatgactaacatgagaaaaaagaactagtataaacatttgtgttctgttatagtttatggtcacatgtattgtctcagttaccctcatacctgtgagattagcaatgtaggtctcgtgcccaaattactaaggaaaaaattagatttttattaatttggacaatagtaaacacaaattatattctgcatcagacattggaaatacaattaagtaagtccatttcaaaataaattattgcttttctgtggagttattttttatctagctaaacactgttaaacattactattctgttgtcctagaaccttcaagttccattgcacccagtttcatgcctcttgtcttgagagaaaactaagtaaaggtaaattaagtggaaagattttcacattcctgacagaaagataatccttattttaaggctgtttagaaaacgttgtagatatagtgaatttgaatttcaataaagcatttttcagaatctcatgttgtccctttgattatgatggacatatgagcttctgaatgatagtactgttaactggtgtcgtgtatttgtcaaattttcattaagtgcatactgggtgccaagacatgaaaaaagcaaggaccatatccttaaggaaatatttacatataaagcagtgcaataagaaaactgctataaaaacctttgttaaagggcagaggagcatgaacatatatgcttgcctaaatcaatgttctcatccaagttctactagaggcctcaattcactaatgaagaccccttgaatagacttagaaatctggtatgtattttacactttttaaagtgtacacatatcaaatagaactagccacatttcacgtgcttcataaggtcctgtgtggctagtggccaccatatcagacagcacagttctctctgcatcttcctctgtaaatcgacagtaatctttaatataataataatactctgtagttctcagcagtatattatgattcagagaagataatgtattttaatacaaatttcagggtagtatctaaatgtttaaaactgtgaaagaggtattagactcaatggtaaatggattttatgttatttgtcatctctatttgaatggacagagttgttgcttataatgctttcaggctgaggctgaatctgctgcttagtgtgtcttcacctagaggagatcagctatggccagatatttgtcatcattaagttagactgatttggtgtggttccagagatggaacgtggaataatgagtagaatttacatggaaacagattttggcttaacgttaagaactcttctaataattagagctatcccccaattgaataaacttcccaaagaaatagctagttccctgtcactggaagtgttcagagaggggttgtgtaaactctttttttcagatgctctcctagggattcaagcattggggggaaagaattgaactagagaaacttcacagtcttgactaactgaaatttgtatttggccttaaatgggtgtggtgggagggcctgccagtttcaaacccttataatagcccttccatcaacctggctttgccccaacctcaaatatgccgaaaccttgtataatcatttgtattatagcaagttttccaaagtatcttaatttcctgcctatacaattctgcttataccccaaactaaatccaaaatagcatttgtctctgcctataccacacacacacacgggccttttagttggctcagtggcaaacagtgctgccaggaaaacaggtttcactggtaaaacaaaaagcccaggctgtacagtccctgagatttctttatccccatgaccacccagtaattccatatgtgatttgggtaacaaattaaaggacttgattgtcaacaatattgttacagtagcaagatgatgtgtatttacatgcaaaaacttcatttttaggagactgatttgtcaagtttggaaaaatagatgtaatccaaactgtgaagtcagctatgattaggctcctaaacttattttaaaattgtttagtggctgctgtcttggcatatctggctgttagctatacaactattatacacacaaattacgaagtagtaaaatttgacagtgtttttctttccttgataagtgtatttctttcatttgtggaaaaactttttgctgttaactcttaagttcacctgaaatttgaagttattttcaaagggtatctgaattatgcagagaaagatgtgtagtatatttgtgaaatgactttactgggatcccataggctatcctggaaaaatcagtatatctacttggatttcattcgagtatacattataaaactttgcatttagattctgggtgaatggaatgcttagatcaggccttcaagtaattcctatcaatatagacatacgtatttcattaaatatcaagtttcacctgctggattttttccctgatactttataataccatacacttttataaagaaaactgtagttagcacagaagattccttggacaaatttgtcgcgaaaatttggccttctttagtctcaaacccagttcaggtattgatttaaataacagaaggatgatttacttatttttaaaattgcaaaatttttttatcattttcttttttacctttcctatggtgctgagcagtattttaatgcttataaaaaatgtgttatccataaaggcataaagagtaataagatggatccctgtatacctgctgcttagtttaagaaaaggaacattagcaattcttttgaagccccctaagtatccttcccttactcatggtaggtattttgcatggcaggattttctttttgtttgtctgttttttcctgctttccccttaatcgggccctggatctatgcagaaatctctgatctggcatccttccttgtgcaggcactaggatttgtctcttctctcttgcaaactgaagctttaaatcattgcatgtaggcagatacccttataacagctgcataccttggtagtcgtttgcttgtctgtatttgaatttttgcaatgttgtaatgggagaacttttcaggttattgtctccattgccagcgacagatggcttgacttttaaagttgattttttttctcaccttcccgtgaggataaactgaaatcattttagtagggctgaactggataaataagccaactttattaagcatttattcccagaatcaaatatctaaaactaaattagccagattatttattacatattcactattcataaacaataatagttcagatgaattatttgtagcatcttacacacatataatgccacatgtaacactacatgaaaatcattgacactgattataaagactttgaggtctttataaggtcccaaagtattttccatgtagtgagaatgtacagtgtatttttttaatattgtcagtagataatccggttctggtaattcatttacctagaatatcttgattctttagagcattccattttctttgttttctttttttataacgtagacacaggtctcactgtgttgcccagtctggtctcagactccagagctcaagcaatccttccacctcagccccgcaaagtgttgggattatagacgtgagccaacacgcctgaccaagcagtccattttcattgaacttattatgaaatgcctcctaagataaagtagaacatgtttaccatttgtttctagttgccttagagagttattttgtgaggcttagacaactttggatttttttttaattcaatgaactagttaaatcttaatatgtaatttgcttttgaacttttcaaaagcataagcataacctcctgataaattcattataatgaaatacagaatattatattgtttgttctcattacttattaaaacatttactgtgtatgcttaggaagaagaagcagacgttgaaggcattcagtataaaacacttcgaacatttcaccatggagtcagggttgatggcatagcttggagcccagagactagacttgattcattgcctccagtaatcaagtaagtttaacagtaccaaatgcattccttactaatgtactttgattgtgttacatgattggaagtctgatcatagatacttttttctcaatttccattttccacaatccaagatattagatattttgatatttgctactacttaataatttaggcttatcatctgaatttgtgatttaaatatacagccatgactatgatgccttgaccatgtgtttgagccaaactacaaaaccttttacgtgagattcatctgaatcaaggtctttacagattgttcactgaatttacaactttattgaaagtataacttaaaataactaaatttggttgagacattaatgagctttccttccccacccataggccaagatcacatttttttgtccaacagtatataaatctgtaagttctggtcctggacttcagtttttgtgaaagtgtttaaaaggaatgatggttttctgagaaaaaaatcctagcaatgcctgctgaagccctctttacaggggcaagaatatgttaggttatttaagatctgttacaaaacactagccttgccttctacaaatgtcaaatctaaaagatgtgtcttcttttagtagacagtacttaggaactaaaagttatcaactattaagctaacttcgttttttttaaattaagggataatttagatactctgaaattctcagctcttaagggtatagtttgatcagttttgacaaatacgtatatttgtacaacccacaccctattcatgcactgtttctgtcacccaagaaagtttcgtcatacttcttcccagttaatcattgtaccccactccctgcagaagcaaccattgatctgatttctattaccagaaatcagttttgcctattctagaacttcatataagtgggatcatacagaatgtcttttgtgtctggcttgtttttgcaatttttccacattgttatgtataccagtgctttttaagtagtactccattacagtgtatcaatagaccatagtctgtttattcattcttctgtaaataggtaccaatacagtttctaggctttagttattattttttgctgaatactgctttgggtggttatatgatttaatttaggagtagaattgctgagtcacagggtagatgtatgtttaacattttaagaaaatgccagtttctaaagtggttctaccattttgtcttttccccaataatctaagggtggtcttcctactctccaacactcattcattcattttgagacaaggtctggctctattgcccaggctggagtacagtggcaccatctccactcactgcaatctctgcttcccaggctcaagccgtcttcccacctcagcctcctcctgagtagctgggactataggcgcccatcatcatgcctggctaattttggtattttttgtagggacagggatttgcctgttgcccaggctggcctcaaactcctgagctcaggcaatccatgtgccttggcctcccaaagtgctgggatgacagcatgagccaccatacctggcctattctccaatatttgctattgtcaatctttcttttttttttttttatttttttggtacatggtctcactctatctcccaggctgacagccagacccataatcacagcttactgcagcctcaacctcccttggctcagcctcaaccctccctctcacctccgcctcccaagtagctggaactacaggcatgcaccaccactcccggctaattttttgtattttttgcagtgatggggtttcgccatgttgcccaggctggtctcgagcacccaggctcgagcaattcacctaccttgacctcccaaagtgttaggattacaggcatgagccactgtgcccagcctgtctttttaattttagccattctggttgatgccacaatgacatttccatgatgagtgataatgctgacgcttttttggtatatttgtttcttctattagaaatctttgtgtgatttcttataggttgtgaagatgttgcatgttttttcctagaagcctttaccgatatttagctaacttaattgaataatctacacaatagcttttgtcagcacacgtaatgtcattgccaacagctggtgtgctgttgatttccttttatattaaaagaaagtggtcacaatatctagacctaaacaagaacaagtctctttgattctttaaatttttaaagctgtggaaacagtcttcttcccttggttttaagttttgtgatacctctttaatctacatattcagctgttgtattctatgctttccttgttgcttagtacttgttttcctgtcctctttttagtgaatttgctgtgtttcatcatttctggttggtgtttttgtttggttggatttttcttattttttggtaaactgtctcaagacctttttggaactatacaaattcagtaacaaattcaaaagacattagcaggccattaattttagactatttttagagcaacctgaaggcacaatcttgttttcaaataaattatttttattataaaataatgaatgcttaataaaatttagaaaacacagaaaataaggagaagaatgccacctatactcccaatacccttttcatttttgtacataattgtacataattgtgattatactatagtaactctctgtactttctttactttgcttttttatagtattctaaaataaatagtagtctatcaccatgactaaggtataactcagcatctctcttatcatcattaatttttatcttacatttagaaatccttcatgatggcttatcattagcatgtagttgccttaaattctctttctccctgcctttctactctttccatccctacttgcttttcttgcgtagtggctagagaattcattgttcatgttatttcagttctctgaggttttctggttcaattaaagaaggacttaaatatccctgaaacagcaaggattcaaagaaaagtggggcaacacaaggctggccataaagttttctgggtttgtttgtttggttttatttagatcccagtaagattattaattttctttttaagtaagtattctttgattactgtaactcctctatttgctgacatttttactgaacttggcttcattttgctattaatacctctttacaaacccttttagttgggatgtttcttttaacaacttccaaaatagcttttatctgttttagagatgacattttgaacaaagttttatgatttcattatgctataactgaggaaatccgtaggagaccctcaacatgagtgatattattgtggcaaatttgtctagagtttcctatgagcaaataaataatgaattcccaaaataataattggacaaattcaaaggagaagaattaggtagaataagctttgttttacagtttttcttaccctttatttgcatgtataaaatataacatacgtgtttaaacacacatagagtatgtattagggttctctagaaggacagaactaataggatagatgtatatatgaaggggagtttattaaggagtattgactcacacgatcacaagatgaagtcccacaataaggcgtctgcaagctgaggagcaaggcagccagtctgagtcccaaaacctcacaagtaggaaagccaacattgcagccttcaatctgtggcctaaggcccaagagcccctgacaaaccactggtgtaagcctaagagtccagaagctgaagaacttgagtctgatgttcaatggcaggaagcatccaactacaggagaaagatgaaagctggaagactcagcaagtcatctccttccacctccatctgtctgttttttctagttgtgctggcagccagttggatcgtgcccacccacattatgggtgtgtcttcctgagggtgggtcttcccctcccactccactgactcagatgttaatctcttgacacccagatacacccagaaacacccagatacacccagaaccagtactttgtatccttcaatccaagcaagttgacacttaatattaaccatcacagagtatatatgtgcattttaacatgtttattataaagtaaacattcatgaaatcacagaggtcaagagataggacattactaacacttgaggctgccagtgtgcccctctccaatcagccttcttccttccccttaaaggctatcagtttcatgtttattaggataatcatctccttgcttttttttatagttttatcagttactgatgcatccttaagcaatatagcttaattttgcctgcttatgaactttcttatgaatataataatactatatgtatttttttgtcctgctttgttcacttcacattatatatatgagattcatccaagtttctacttgtagatctagttatttattactatgtagtatttcattgtgagtctgttacagtttatgcattctattaatactatatttgcagtttggggttatgaatgtactgtttgagcattactgtgtgtatatatcataatgtccatgtgcacacttggaccacccttaacatacttgaaacattttcccccaacagccgacacgtatttcttcagtgtttcttaggccttttctttcgcctccttttccccttttttttccttgtcttgtccacttgtgaaagaagtgtgaagaatggttggggagatagactgacaggacaaccaaagggaagctgactagcctagacaggggatgttgaactaaattgggcaaagttctgatatcaaaacttgggcattagcaacctatcataccatgtgtgtgccaaatgcagcataggaggggattattttttttcttaacgtgttgccattgttaccgaaatacaaggggttggtctaggccctgttgcataccacacagaaagccagtgactaagacaacaagtattgcaagggaagaaggctttattcaggtgctgcagctgaggagacaggagataagtctcaaatccatctcactaacccactaaaattaggggtttatatagcagggaagaaatgcaactacatgtggaaagacaggaattgtggggtgtaaggaaccagtcatgacaaacgaggggtctggtgcctcattgtgcagatgcaatgatctggtaagttttagttcctttatgctatctgggaggcctgaaggtcggtttcctgagaaaggaactcagaggagacaaatacaagttttcaggctttaagatcaggagagtcaatctctgtaattatctccaaaccatgaacattagttctgtggggaagttgggccagtttcaccatcaggaccacaaagcggacctggttgggttttggctttccttggttttttttgctttttgccagacctgtaatgtcccaaatcaaagcacctatttttataattcattgttaattaaatataggtatttgttaggttaaatgaaagtaatgataagagtgtacatttgcattttaaaatgagattgatagagtgctttcatttattaatacaaagggcattagaagtaaactaatctagtctcctttactttattgaggaggaaactgagccctgagtttttaaatgtcatcttcaagttgcatagctaagaagtaataaaggcaccactaggctgacttggttaatcaaatgaaaatgttgttaaaatatggcacatttttaggggataacttgatactcaacatctgttaagcaatttaatgaaacagtcatatatttgtatactatttatgatggcgtctttatttcccactgttgccataacaaaccaccacaaacatgatgacttaaaacaacaacagaaatttattatcacagttttggaggcacatattcaaaatcaagttatcagtggggttggtttattaggctctgagggagaatccattccatgcctgttttctagattctgatggtagccaggagtccttgactttctttgccttgttgatgcatcacttcaatctcttacccttcatatctcctctgtgtttatccttttttgtgttcattcattgttaaattttgggcccaccctagatccaggatgatcatcttagtatcctttaatttaatcatgtttgcaaaaccctattttcaaataaggcagcactcgtagttaccaggggttaacacatagacttatctttttgaggacacttttttttttttttttttttgagagggagtcccgctctgtcacccaggctggagtgcattggcgtgatctcggctcactgcaacctccacctcccaggttcaagtgattctccctgcctcagcctcccgagtagctgggattataggtgcacatcaccatgcccagctaatttttgtgtttttagtagagatgggatttcgccgtgttgaccaggctggtctcaaactgacctcaagtgatccacccaccttggccaccggaagtgctaggattacaggcgggagccactgtgcctggcgtgagggcacttttcaacctgctaaagatgacacggaattcttgttgttgttgagacagggtttcgctcctgtcacccagactggagtgcaatggcatgatatcagctcactacaacctccgcctcccgggctcaagagattttcctacctcagtctcccaagtggctgggactacaggcacacgccactgcacccggctaatttttgtatttttttttttgtagagatggggttttgccatgttacccaggctggtctggaacgcctgggctcaagtagtctgcccattttggcctcccaaagtgctggaattacaggcatgagccattgcacccggccatggcattcttgtgcaatgtataaatatatagaggtgcaaaataaatgctaatgtagtgcacagtatcccctttcatataaaccctcactagacaaccaacgaagccaaagactaaaagctacaaaacattgcagaaagaaattaaagacacaaataaatagaaagacagcctgtgttcatggattgaaagatttcatagtgttaaagtgtctgtgctacccaaagctctacaaattcaatgacgtctttatcaatctctgtggcactttttacagaaacagaaaagccatcctaaaattcagatggaacctcaaaggaccccaaatgaccaaaacaatcttgagaaagctgaagttctcacacttctttatttcaaatcgtatcgcaatgctatacagtaatcaaaacagtatggtactggcataaagataaatatgtagaccaatggaacagagtggaaaacttaggaaaaataccttcacatagccatcaaatgatctttgacaaaggttccaaggctacacaatggggaaaaggatagtctgttcaacaaatggtgttgaataaactgagtatcatgcagaatgataaaattggactttacacaaatgagctcaaaatgggacctaaacataagacctgaaactataaaactcctaaaagaaaatatctgagagaagctttatgacaccagatttggcagttttttcttagttttgataacaaaagcacaggcaacaaaagcaaaaaatagacaaatgagactaaatcaaactttaaaactagtacatggcaagggaagtcaacagagtcaaaaggcaacccatagaatgggggaaaatatttgcaacccatatacctaacaagggataaatatccagaatgtatacaaaaaacttctacaactcaaccacaacaaaataaatgatccaatttaaaaatgattcaaaaagacttaaatgaacatttctccaaagaaggtatatgaatggccaacaggcatataaaaagatgttcaacatccctaatcattaaagaaatacaaatcaaaaccacatgagaggttacctcacatgttaggattgccactactagaaaagcagaaaataacaaatgttgacccgggatgtggagaaattgaaacttttctatactgttggtcagtatgtagcaatggtgcagctgctatgaaaaacattccaaaggttcctcagaaaattaaaaatagaattacctaacttgcagtattattttgaatataagtggcaaaaatgggcatccttgtcttgttcctaatcttaaaagagagaccaccatcttctcaccattaagaatgatgttacctgtgggctcgtcatagatggcctatattgtgatgcggaacattttgtctatacctaatttgttgagtttttatcaagaaatgttgtatttagtcacattctttttctgcatcttttgagatgatgtggtttttgtctttcattctgttaataaagtgaaccacatatatttatttgcatatgttgaacattgttgcatcccagagataagtcccacttgatcatggtgaatgatctttttaatgtactcttgaatacagtttgctagtattttgtcaacatagtacttgaagtcctagccagagcaattagatatgaaaaagaattaaaacgcatccaaataggaaaggaagaagttaaattgtctgtttcctgatacatgatcttatatatagaaaagctaaagactccaccaaaaaactgttagaactgattagtgaattcagtaaggttgcatgatacaaatcaacattcaaaaatcagtaacctttctaatatactaacaatgaactatctgaaaaagaaattaaggtaatatgatttacaaaagcatcaaaatatcttgggaataaatttaactgagttggtaaaagatctgtacacagaaacgataaaacattgatgaaagacattgaacttggcacaaataattggaaagatatcctgtgttcatggattggatgaattaatattgttaaaatgttcttactcctcaaagcaatccacagattcaatgcaatgcctatctatcaaaactccaatgtcattcttcacagaaatagaaaaatcaattaaaaaatttatatgaaattataaaacaccccagatagccaaagcaattttgagcaaaaaaaagaacaaacccggaggcatcacactacctgatttcaaaataaaagctatggtattcaagacagcatggtactaacataaaaagagataccttgaccaatagaataagatagagagcccagaaataaattcatgcatttatggtcaatcgattatttacaaaggtgccaagaacataaaatgaagaaaggacagtgtcttcaatgaatgatgttgcaaaactgtatttacacacagaagaatgaaattgaaccgttatttcactccatatgcagaatcaactgaaattggattaaagacttaaacttaagaccttaaactgtaaaatggctagaagaaaacagaaaaagcttcacaacattaatctccacaacagtgaattttttggatctgaccctaaaagcacaggaaacaaaagcaaaactagacaagtggaattgtattaaactaaagagctgcacagcaaaggaaacaacagagtgaagatgcaacctacagattgtgagaaaatatttgcaaatcatacatcttgataaggggctaatatcaacaatatgtagggaactcaaattactcaatcacaagaaaacagttatattttaaaatgggcaaagaacctgagtagacagacatttcttgaaagaagacatgctttattccactacaactttaattttgcctctgagaagaccttggacaaagaatcattccctggtggctttgatctgttttctctaacaactcttgacaaattactggaaaggggtgtagtagcaaaggtctaccaacacatcagggtctgtggattaagagcctttagttgagaaaaaatggctcactgtactcaaactaaagaataaatttagatttgtgtatgatactctttctaccaaagaattgaaaataaactttgtttttcagtatataaatataatttaaatttttttctcagccattgtctcacatcctgagaatctagaaaatttaggattaaagataaactagtttaaaaagtagttgttggccaggcgcagtggctcatgcctgtaatcccagcactttgggaggccaagatgggcggatcatctgaggtcaggagttcgagaccagcctggccaacgtggtgaaaccctgtctctactaaaaatacaaaaattagccacgtgtggtggtgggcgcctgtaatcccagctacttgggaggctgaggtaggagaatcgtttgaacctgggaggtggaggctgcagtggtatgaaatcataccactgcactccagcctgggcaacagagcaagtctgtctcaaaggaaaaaaaaaggagtgtttgctgcttaggttttgttttttaatttaataatccattgattaactactgaaaaacatgttttaaatgtttaaagtataaataatactccagcttttagtaggtataaatattatcagcttttatagttataaaaatagtatcttacttcatctgatttatttggaggaatagaaaaaactaaggattatggataacagaagagggcaaagactaaggtagatgtataacaatatttttaatatgtcttggtgacctggctaaaatgaagatactttttaaaatccatccttttatgcttttaagaaaacgtttaaaattaaattcaagtgctgatttagtgtaaaattctacacttttattactgaagaagcacatccagaatagactaaccttttgtgtgttctcaaaataaaataatatgactcctactttctgtgatggctgtataatactttttacagtagagccacaacattcttctttccccctccataaaaagcatgattatgagttatgataaaagcttcagtgatctgaagggaaggatgggggggagggggagacctttcacttacaaaggctaaaaattggtatatttttgtttttttgcttccagattttgtacttcagctgctgatatgaaaattagattatttacttcagatcttcaggataaaaatgaatataaggtatgttgacaaccatataaatctttagagcttattttaaaacgtgtttgttttttgcttttttaattggatttattccaatttaaaatggctttttatggtcatcattaaagtatataatttagagtctcatttactctactataggttataataactagcttactatattattaagaactaagttcttaatgactgcagattataaatctgatatctcttattaaattgaaatattaggtaggaacaacaaataagaaaactagaaatttacagttggatatagtaggagtataatagacatgaccattcatagagtaagagttgaacttcatgggaacaaatgatcagtacagcatagcacaggcagaattccaaagcggttaagagcacagacacagaagccagattccttgcatttaaactccagtgttattacttagtcgtggtgtgaccttggttaagtaacctaatctctttgtgctaatatccttacctgtaaaatgtgggtaatcatagcagctgccttataggattatgagcattgactgagcaaattcatataaaacgcttagaataatgttgatacatagtaaacgccgtatgtgtgttttctattactataataataaccctcagattgggtcaaaattgcatcatgttttcttttaagaatggtattgccttcttggctttctaataagccaaaatatgaatattgttataaaacaaagataaattacaaacctttccaatcatttagaaaatagtaaaaattatgctgtaagctatttacagtgggcttaatgtactgtatggattggttaatttaaggctgtaccagaaataaccaagtatataaatggcacataaaattttgacctatccaaagttaatatgctagttataatacacattaaacatttacggttaatttagtttgtcttgtagactgtgacagaagctttggagaatgatttggaggacctgggtttgttaaagttgctcaggaatgtttgacccaaatctttttgttttttgttttttttttaatattacatttctacatagtgagcagtactatatagaactgctttaataacctcagaactgagatcaaatttgagtttttggaaagaaggaagggtagaaagaatgataaccattaaagtaattatctgacaggcctatttaggatttcaactatgaagatttagacagattgaactttatctgctcacacagtcctccactgtgcaacttctcatttgttgcttctgtgtcgagattttttgtgttggtgataactatgggcttataacaactagctgtcttcactgctagcagtcacattgagcatgtaaatgaaggcattagatggtgaagtccatcctgtgtgtgtttgttaagtagtgagtatgcagaacagcagatataatgtaaaaagcctagaggtaccctacctcggtacccctaaaaagttttctagctctaatttttatttaggctttatataataagtgagaaaggaggtgatatgaggacaggtacaataaaaatgtgtgtgtgtgtgtgtttttgtaagaaatgcatactagaaaagaaagactaagctaatagtgtgttgaatgatcaatttttttcccaagataaaccttctagaaaagtgggtgtataaatcgtgctttaaaaatagcggattgcttaagaaatatttatagaaaaacaggcagtgaaagcttttaaggcagtgaagcaaaaatattatgtaggaatattgtaggttatttttctgttttcttgctaagctttctgtttctctttctgtcaggttttagagggccataccgatttcattaatggtttggtgtttgatcccaaagaaggccaagaaattgcaagtgtgagtgacgatcacacctgcaggtatgttgcttatgttataaccacatttttaaattgccattttaatgagaattacatttttaaaatgagaaaaaaaaatgtgacttttacataaattctatagagtgttgtaaaagaagcataccttatttgaactgtaggtatggcacaaacatgagtttcaaaaccagtgagatagtcctcatcaccattaatgaaaacttccttgcctcccatgggtgtcttttatctcttatttcagattttcacatttatgaaatccaaatctatattggactgggcacagtgccacatgcctataatctcagctctttgggagaccaaggtgggcagatcacctgaggtcaggagttaatgaccagcctgaccaacatggcgaaactccatttctactaaacatacaaaaattagccaggcacggtagtgcgcacttgtgattccagctactcgggggactgaggcaagggaatcgcttgaacctgggaggctgaggttgcagtgagtcaagcttgtttcactgcactccagcctgggtggcatagcgacactccatctcaaaaaaaaaaaaaacacaaacatattggatcaaattcttcaatattggacaagataagtaggagtaaaatgcagttgtcaagttactttacagatgctgtatgataagtttgtgtggaataatgaactatgactctcatctgctacataagattgatggaaaatttagtgttttgataaattcagaggtttctgcataaggttttctttagatacaatacatttaactattatgttcttctacctcaccccctaatttagaacagatgaggtagctataacattttaatagtgtgtaaagctggagaatatcacaaataaagaacaagatgaaaaggaagaatagcaggtggaaataagctgaggagtcaggagtgaaatgagtgcatcagtcattggaagggtgtcagttgcttcatttgctttaacgatactgtgagggagagaaaaactgctgctctgctgttttgcataatgtttcataaaactatgccaaaatccttagtatttattagtacttatgtacatataaaactatgaaatatgtatgacttcacattagaagtaaagctgctagctactttttaaatttttaatcttcttaatatagctcatctttttaaagtgatagagtcataggccattattctttatgtactgcctgttaaaattttcatgtcagagatatgaaagatttacatgacattaagattctagggccccaggtactacaaaaccaagtttgtatagtgacctgaagagtaaatggaatcgttttaaggtaaaaattcggtcactggaaataaataatggcatttcagctctttaaaacatagattttcctaatcacaagcatttggaataatgaaacctgcaaaggggaaaaatgagtgtctttgcaagccaaggaatggcctctgaatagtgaacgaaagccggagagacctaggatcacactcagtagtctatgtttttgtttgtttgttttcttatgactctgagattttttttgtaaactagcaaaattctctaaaaatttaggggactgacatagggttgctaactttttattttgtcgaatataagacttaagtttactgccttctaccactatcattttgtaaaagaaaggacattattactctaaaaagtaggaaaggaataactaaagagtaagtcttttagtttaaataaatttaattttttaaaaacctgactacattgcctctaagtttctcattttgccagactggttgttgatattattgttcaacaaatatttgctttcctttcaccttcccatgaaaggagattttcccatctaattagccctagctttgtgaattgtttaggccaatgtagcattaacaggtgtgacacagcagaagcttcaaatgttttgcctggcttgacttgacctcctgtgctctgtcatttgctatgagatgagcatgtcctagatagctactgatcccagaatgagaaacacgtggagcagatatggacccatatggcattatggaaacagagcttcccatagacccatgtgcaagaaatttatgcttatttctgtaaaccaccgagattttcgggttgatgcacaacatcaaactaggagtatttttagaatttacagcttagttcaccaaccaaaaataaacaactctgattggttattaaagccaaacctcttaggccaaaacctaagcaatataggtaagatttttttaaaaacagaacgtatataaaaacaagtttaaaatgagaaagagtagatagtatcatacactctcatagcaaggaaagaaggaattctaagaggacatatgtgataatgtaagattcttacaatatcacatatatattcttacattatcacatatgtgacaagagagtatatcatatgagcagttctacaatatgtattctgtactgtaaagagcagacccagtgcttacttaagaaaatttaaaataacctcaatattttgatctatgcatattttctgatgtttcactttgacatttccaagaaagacactatattataatcagctagcagaattttgccctaggaacactattttaaaacaatctgtgacctgaataggttcatgaaatgtatgtgttgtattgaaaattgccaaattctgaatcaaacagaataaagagtcgtactgtgaacaaaggtacctctgataatacaaaatgttattatggaagatgatagattacattttatctaagactccatctaattttactattctatgatctgtgcaagtttataagaaaattgggttctcattaaagttggtctttatcagttccaacactgcctttctaacaaacattttataatgcctaccacacctttttaaatgaaactcacagaaaatgtagccttccaaatatataagtacagaaaattattatcgtcccttaattttatgatatattctataaaaggaaaacaaagagaataataatgcattgtgtataagctcagataacaactacatatgaagacataggtagtctttcttcttctttacaatgagtaagactggatatcagaaaaataagataacatgaaaatgtaaggcagaggcaaggcagtcaagttgcacagttgtagagatttatgagttgtgtagagtataatgtaaatagtgccatctggagttctacagtgtcatagcgctgagcagatctacagttttaggataaaagctcatgttagtagtaatacaatgaaattaaatctcattagagaaatagggaaatacaggtaatcaaaataggaataacatagcaagataaatcataggatgtcaagttgaaaaagtaagataatattcttgcaatattttctgtatgaaaagtatgacaagtatatatcttgatgaagaaatatgtatctttatgaaaaaggtgccattactgaaacaaaaagcaagcgtctgatagatgtgtttaataaaagaaattcccaagtaaagcatggggttgctagtcattcagccttatattctacaccattttctttatgatccctcatcatgtctaccatatgcagatgcactcacatgcatatacatgtatatataaaaatatatgcacacatatatacacaggttgataaaaatactgatgctttatgtgtgtgtttgtatatgcatatgcacagaaaaatataaatacgttcatagttatgacctagtgtcattgaaagaaggctaaaattattacagtatttgagaggtaaagaagtgcatattcatttagaaaaaattattatctcctcctccaaaagaaggtaaaagtgtcatttaagtatttagtgggttaagcttattattttttaaaactcactaatacagaacatctcattcccagtcattgccaaataacagatgttcttgtatattagaaacagtaccattctgtaagaacaagtcagatcaacaagtatttattaaacacatttagtatacccaatattcagtactttgggggatacaaaagaaatacaagacctagtacgcactgtaactacaaaggatatcagtagtaaatcccatccctcctcctcatccctcaataatcttttaaaatattagataaaagtttatggtgaaagaaaactgacttctagaaaccagggaatttttagtttaataaaatataggtgtgcatataatgtgccattcactttctctataaaacatgaaatatttgtagttgtcatgttctaactgggatcattttttaaaagaatgagagaagggtggcatataaaaaataaagaataagatattagaatgtaaccaaatcactgtataaaggaatactaaattacctaagctattcactaagccagtaatatagttgtttaaaaaatgttgcaagaggaaaaatgatttttatcaaatttgttctgtgtaccacatgcaagctatgtgtttttcatattacctttgtttatgtacatttgaaagtctttaagatccataattaagatggagtgttcttcctccacccccaccccaattgagatcacaaaatatgcagtatacctaaaaatagtccttgtgggaaacagcaaaaaggaaactgagagccttctgaaggtaggccaatgaaccattctttggaaagtaatccacgtctgggagtgcataaaccatgcccaggtacaaagtataatcaggataatttacatgatttattatactgttatagttaaaattcaggaaaagttccctgcttgtcttctaaaactcactctaattttttctaacattttgaatcaagatcagtaattgcatagttctaacaagagccttgagaatggggtaaaatggacactttgtgttgagcatggcaatactttagctccagtgatggaacatagagattctttgtcgttaaaagaactctccaaaaattatactaaaacacatttatcacttttgcagacatttttaaattcaatgcagtgaaatagggtgttaatgaaagactgtaatagagtagaagtcagtaaagtgaagaaaacattttctaaaacttgacatgatcatttactggtaaaatcactctctagtagctgatactttgttcttttctgtatgcccttgtagatgaaatacaaaacaagtgcttaataaaatatatcaccaaatcagtgactacagtaatttaagcttgctttatgtggccctcatgtggttacagtaagtggattataaaatgggaatcatatccataaacagtttccagattttgaaagaccattgatgtgaatgataaaggagtactttcccttattgatagctttagtattcagcatatagtcaaattttaagttgtaaagtttatcaaaatttttcttggaaaaaatgaaatgctaatatttcctgggtagtgttactgttgcttttgttaaggcttatgttagttaaagaaaaagcccttctactctgaattccttaaagatgaaatcattacacatggtctgtttgaaaactaccatatggtatttctttgcagttgagagtttaatttttgaagtttatttttaaatgtgacaaaatttctcacaatttccatccttcaaaaatttatctgtctgtataagttaaatgagatgttaataattctcctctgagacagcctcagtttcttatctctgtgataataaatgtagtttctgctcaatttgtttacaattacaagaaatcaaaatgaagcaacagcatacaaattgataaaatttttatcctccccaaagcttcatgaagatgtataacagattaaattttgtgtggtgtagtttattagtgttctgtatgaaacagggtacctccttccttctctctccaccctcaaagtacatgcagtctttattatcaactctgattttgacatattattttcagttattgaagagtaaaataataagcctgtacaattatctcatttttgcccttttaattcttgctctgaagtcagtaaaacttctaataataatcttttatcattagtactgctagtacattaaaactactactgctacaactactacttgctcagtagtctcaagtattaaaaaaagaattaatctaatcttattttctaaatatatttggacacacacactgaaagtatcctgctataaaattcttccaactatcctgctattttgttgtctccacctttaaggcttttgcctagctctcaaagttctccatagtctcaaccataaactgacaaaactttatttaccaactctaacctacccatacccactgtaaagatttgtccatctaatctctagatttgggctttcagttacatggttccccacctctgaactccttttgcacttaaaaccagatattttagcactgaattcttttgcaaaatgtttcactttctaattgtgtgctcatttgctaaggaaatacaccacgacttacccttctttgaatcatctataacctgattaacttagtaattgattaattggaactaagagaaaatcctagttttgctctcacaagctcagtggaaaatatgtttcttgtctaagaatgttgagggtccctttcctgtaccagtgacattgtaaagtgcctgctaatccttataactacatctctgtattactttgttcttttctttcttacttaattaatcaatacacagattcatgtgatctagtcatgtcttttagaaagattgtggttcatattttttgctttaccagttagggccaaatggatacagatgtgtcatttaatgtcatccattctttcttttgtgttgtcaaaaaacatttggtagtagaaattcccttctgcgatgaatttcctagcaaacaatgagctgccaaaaatgttaaaaatggagaatgaacaaataaacagaatattacagaatattcctgttgaatcctcggacagaacatctttctttattaactgtccatttaaaagacctttgagaatatctaggatatccccagtatgccaacacccaatttatgggacctttttgttaatttattgggacaataacatttaaataccatatggtagggatacttaatgttctgctgaaaagcactcggcctgaaatgaagcaataatcatagcaataaaatactaaaagtaaaataagcataattcataatcttagatctgaatagctctctatcccatcatcacagctaaatctaagagttctatttaggaccacaatgtcaggagagatggggatgttaattataattatcgttcaaattggatgaaaactgtcattttatttcacttgaggagtgatgctttacttacccagtgccctttgatttggtctgtattggcaccttaatatgtcagcacataactttcccataaaagcttttccttttaaatttcccttgcaaacatttaaatatgtactatgtatgttaatatagatcctaggttttggccaaggtaattaaacctgataacatttattctatacttttatgctttgagaaatggtctatcatcttttcatatgcttaattatgtgtattatgaaggctgtggggttttttttgttttttgggtttttttttttttttttttttttttttttgagacggagtctctcactctgtttcccgggctggagtacagtggcaaaatctcagctcactgcaacctccgcctcccagattcaagcagttctcctgcctcagcctcccgagtagctgggattacaggtgcctaaccaccatgcccagctaatttttgtgtttttagtagagtcagggtttcaccatattggtcaggctggtctcgaactcctgacctcaggtgatccgcctgcctcagcctcccaaggtgttgggattacaggcgtgagccacagtgcctggccggctgtgagcttttaaagcatttctctttctgtgatgcaccactgtcctgaaaagtgtgcttctgtggttataactgactttgcaatagtaataattttggaaatattaaaacctgaattttcaaattttgaatttttttcttttatagtagaaatcctgttgtctgacgtggtctagaccaaaagtttcttagataacaaaaagtcagtaaactcaggaaatcattttaaaagaatgcctacctgccttattttaatatacaacccatgtatattaaaaaccatttgccagtcttttgatattaggccagtgcttttttttcttaggttatgagtccattgattggcttgggaccacttttttggcatgaaccacaaccaaaatacaatgtcttcaatgaaaataacacttagaaaagcagtcttaattcagaatacttctagatttttatttttattatttaatcttttaaaactgtcacacatacctaatatgagtgagttttttttcttttagaaacttaacctttagttagttggcattgacttagtttcattgaaatagctttcacattcatattttgtcagtttatgtaatattatgtaattacattaataagcatgggtttacatcccatacaaccagtggtttgctaagcaaagaagctgtattccctcttcatacacatgcaacaaatgcacatgtgggcatattagaaaatagccttctcattcttggcacttctatagggggaaaaaagaaaaatctgtcagagtcagttcagagagattctactgtacactgtgtttacaacattttaaaacttaggcacatttgtccatacatagatactgcaaataaaacgcaaaaaaaaaaagagttgagaaatgtaccttacaaaataagagcacctgaaaagctgtacctattaccattcatataaatgattaagactgttttagtcagaaaatgagagaaagttttggctttttccactggtaattaaatatgagaggggaaaaggaaatatgaggtgcagccaacttggaaagctatttgatgataactacctgctaaagttgaatatatttgtaagctgtgatccagcaattccatgcctaggtatgtacccagcaggtgtgtgtgtgtgtatgtgatcgtatgtgggtatctatattcactaaaagacatatgcaagacggcttacagcagcattcttggtgacgaccaaaaattggaaacaacctaaatgtctgtcaggagtagaatgaatatatatgttgttgtgtactgaattaattgaagaccgtataaggcattaagaaaaaacaaattgaggggcgcctctgcccggccacctcctctgggaagtgaggagcgcctctgcccggccgcctcgtctgggaagtgaggagcgcctctgcccggctgccccgtctgggaagtgaggagcgcctctgcccagccgctcatcgtctgggatgtgaggagcgcctctgccctgccgcccttcgtctgggaggtgaggagtgcctctgcccggctgccccgtctaggaagtgaggagcgcctctgcctggccgccccgtctgggaggtgaggagcgtctctgcctggctgccccgtctgggaagtgaggagcgcctctgcccggccgccccgtctgggaagtgaggagtgcctcggaagtgaggaacgcctctgcccggctgccccgtctgggatgtgaggagtgcctctgcccggccgccacccagtctgggatgtgaggagcgcctctgcccggccgccaccccgtctgggaagtgaggagcgcctctgcctggccactgtgcaatcttccaagtgtgaagtgacagcctttctgcaggtgtacccaacagctccgaagagacagcgaccatcgagaacgggccatgatgacgatggcggttttgtcgaaaagaaaagggggaaatgtggggaaaagaaagagagatcagattgttactgtgtctgtgtagaaagaagtagacataggagactccattttgttctgtactaagaaaaattcttctgccttgggatgctgttaatctataaccttacccccaaccccgtgctctctgaaacgtgctgtgtcaactcagggttaaatggattaagggtggtgcaagatgtgctttgttaaacagatgcttgaaggcagcatgctcgttaagagtcatcaccactccctaatctcaagtacccagggacacaaacactgcggaaggccgcagggacctctgcctaggaaaaccagagacctttgttcacgtgttaatctgctgaccttctctccactattatcctatgaccctgccacatccccctctccgagaaacacccaagaatgttcaataaatactaaaaaaaaaaaaaaaaaaaattaaaacaaaaacaaaaacaaattacaacaacatgcaacaaatggtggtaaatctcacaaaacctaatgatgagtaaaagaagtcagaccaagaaaatacgtaacatatgaaaatggacatcatttttatgatgttcaaaaataggcaaaagtaagcaataacatttgaagtcagaatagtgggtaccttttgtgagacagtaaggaagtatgagtagaagggagcgcaagacaacttttggagtcttggaaatactctgtttcttgatttaggtgccattctttttgagtgtattctctttgaattgtacatttaagatttgtgtatttttattatatatggtatacttcaaaaattttacccaaaaaaaagtgactatctcatgtaagtaatattaaccagatgagctatatagtaaagacacagaaaaatgagctgagctccataaaaggatttgagaagggcttaattaaggaatctatcaaaaaggaaaataagacttaacaacttaaattgtgccatctgtagctaatttagttaggataactagtttcagcccaatttgttgtattttacatacttactacttggattgtgtaaccactaagaattatgaataagcatataattataaaccataaatcattttatcccaatcccttgaaaactaatctggatcaccctcctcatttttaagtcaggtttttgtttgtttgttagttttcttaaatgtcaggttctgttcaggataaaatactggttaaaaattaggtaaaactttggttcattggacaggaatacatttcattaactgaccagtttttatttaatatttttatccatattttctacctcttctgtttccttcatttgaaagaaaaaaatcatgaaaatattttggaatgtatttactcaatttatataatagccaacaaaacaaatacatattagaataagatcaaaagaatggaggttttaaaccatcctctcatgggacttgctgaattttcaagacaaattcatactatttcagtagtggttaaaatatatgctagcccaacactttattttgcagaaagcaatagagaagaaatacttgatcagttgccataattaataatctaattcatcgtggggagtgaaacacagttgcataaacccctgctaaatgtgatttctctcttcaattaaattgtaattgtctcccttgtataataaatacagatgaaaagtattgatttggcaagagaacagtatgcttctaaattgtttaatcattaagataatcattttgaaaaacatctgtgttcatttgtatgtaactatgatatttcaacatttagagacccaataatttctacaaggaagaagaatatttgaagttatgtgttttggcacagaatagtagcattgtccaatacatactctactttctttgaaataaatttttgcctacacattgaaaataaattcctcaaattggttaaacctgtttggtttaacctcattggttccctaatgagatatgaactataaaacctagaagaaaaattccaatgaatgaattcagtcctttttttattgttggtttttgttgttgttgttttgagacagggtctctgtcacccaggctggagtgcagaggtgcaaacgtggcacattgtagcctccacctcctgtgctcaagcaatcctcccacgtcagcctgccattttagcctcccaagtaatagctggggctacaagtgtgcatcactatgcctggccaatttttatgtgttttgtagagacgaagtttcactgtatttgccaggctggtcttgaactcctgggctcaagcaatccttctgtctcagcctcccaaagtgctgggattacaggcatgagccatggcacccagtcaagttcagttcttaaggatcagaattatatgtgcactttgccagcctcccaccgagttctgtcaccggctgtactctgtgccatactctgtgccagtgcaatgtaacagtggctgagtatggagaatgagcagtgggtgagggatagcattctcacgacatggtgccatgactgagatttctgagtcttgctctccctctgcaatggtaaagcaattgaaatggagagccatgttggtgagtaacctggtccttgttactgtggatttgtaactattgaggaaagtgagaacaggaagaaccaaatgcctctttcaacccagctttaatcgtcaaccatggccagcttggggagagaaaactggaaaagtaagccaaattacaaaaggtataaataggaagtagccactgggttggaatcctaaaggtagaaggaataagcagtatggaagatggccgtgttgctaaatttacataacttcatattagcttctctgtatgttgttttgaaaataaaaatactcggcttgcatgcgtgtgtgtgtttgtaagcgccccagtagtaattatcgtcagttgaaatgactactgaagtagtcagacaacctgattagtgacctagaaacctcaagattttgcccacaaaataaagagtatataaataatttaatttgattaccatgtaaaagtgttgctgtgatagattaattagagggaaaatgtgtgtgactcttttgtccatgattatggtaaaatttaaattcttcatcctactttcatattacttaaaagtggtgttataattttctttaaaaagatatacattaagtacaaatgtctgtcttataatctgtagttaatagctttgaataaattcatggaaatttaattttttagtaatgatatatcaagaacaattaacattatactgttattcttttattaggatttggaacttgga

SEQ ID NO: 111 - DNA, 32742 bp, Homo sapiens
  source 1..32742: mol_type = other DNA
aactgtattcagcggcgacagcggcgactgcggcggccgcgggagggcatcccgttggggatccttccgcacactgaagagtacgtcttcgggtctacccctaatcacgtaagtctcgcgtctgccctacctgccctgtcgcatttttaagtggtgattcaggctgtggcttttgagggtgttttgcactgtaatacctcggtcgtagcaaagtgccgtgggaccgaagtattatggtgcagtgacttgacgctcgagcctggttgggcctgggggctgtaggcggagttcacagtatctagcgatggagctggtaggtcctgagggttcgtctgcagcttggaagacaggcccgtagaggcctgcttaacttccattagttaggcaggaaacctgggttctagtcccactatgtacacggactccaattcctcaactttctcctactcctgattagttacagcctcccaaggaacctttgggacttgcactcgaacactgataatgatgttgagtgcaatttttaaattgagcacctactaaatgcctggcactaggtgggttatgtacttgtttcactaacgtctcattctgtgaggtaggaattcccttcctggttttgcaggtgaagaaacttatgctcattagagattttaaataccgaaggactacaggtcataaagggggagcctggaagtgatatctgactcggaagtgtagttctttcaaccatttcacactgcctgcccagtgacaattttctgtctcacagtttttgctctagagcaacttggaatccaattttttaaaaacaagtgttatcgctgctgcctttggctactgtttttttgtatagtgcagcctgccattcagagtgcttgcatatttattgtctcattgacttctcacaagggactggaaggcaagtatttctgtgtgatgatgcctccacctaggaaccacgtgtaaggcttatggcataggctcccacagccagctagctacaggaagagctgggactagaccaggggttggcaaactggctgtgctgcctgtttttgtgcagccagctcctgagctaagaaggagtgttacgtgtttatatggttgggggaaaaaatgaaaagaataatgttttgtgatgtgtaaaaattacatgaaattcaaatttcagtgtccataaaaaaagttttattggagcacagctatactcatttgtttgtttatgtatgtccatggctattttcacactagaaggtcaaagtgagtagttgtgcatgcctcaaatatttactgtttgttcctttagaaaaaattagctgatccctgaatgagactcttggttttctgtcaccatagtaatgctcttttttttttttttttttttttttttaagacagagtctcactctgtcacctaggctggagtgcagtagtgctatcttggctcactgcaacttccgcctccctggttcaagcgattctcctgtctcagcctcccaagtagctggggttagaggcacacaccaccacacccagctaatttttagtagacagggtttcaccatgttggccaggttggtctcgaactcctaaccttaggtgagcctcggcttcccaaagtgctgggattacaagtgtgaaccaccatgcccaggcaatgctcttttacttttaactcaaaacaacttagaaactcataatgcatgataatagctaatgtgcttttatacatgccaggcactgttctaaaagctttacttgtgtttatgtcgttgacttgtcataaaaccctatgggatagggttttcattttcattatgaggaagctgaggcagggaaaggtgatgtaacttggccaagatctcgcagccagtaagtggtggagccacatttcagaatggcctaattcccaagtgagtcttcattcatagcaatcaaatctcataatactacctttaaataataccagtaagtaatttactcctaaaaatgtatttcaggcaaagtgaccatgtcactgaagctgacagttcttcactttcttttttctttcaagagatgagggtgattttttgaagagaaatacaattcttagctatttactaggatttgcatttatgtaaataattaatctctaatcttctacctgtatctttaagttgcatcatagattgtgtctataatttaattatattgcaagtggcatgtatctttgctcttgattatacaaaccaaagtaaacatctaggattctgtttatgccacataaaaatagaagaaaaggatagcagaaggagtcaggaaatggaataagtacaggaaaatacccaaaataagatgatgggcatgtgagtatgttgagacttgagtacttaaagtaggaaaaaaacttttagcaggcatgtctgtaaactcagagaaaggaattggatgccttatatagtcttgggtatatgaaacattggcactacctcaaattattttgaaaggcttttgtgtgcatcaggagaagttacttaacatgatgctttaagaacacagcttatagagttagacatattaagtttatgctgtttgtccacttacaagctgagtgacgtggaggttattaggtaaaataaggataataacagacctgtcttattggacacttatgacagtcgagtgaggtaatcaatattaagcttttgaaaagtatctccaccaagttagctcctaaatattagttattttattggttatgtagtacggtgtaacaaaccatttcaaaagttaaggttttaaaataaccatttccttctgattctgtggatcagcagtttgggtgggacactgcttggtgatactctagtggtcatacaggacacaattcctcctgttgtaataggtggtgacaacacatgtgaaatgtctaccagggaagcttattagagacttaatgcccagggtttttattgggggctaaatgcaaaggcatccactgtctgacatgtaccaaaattccagactcgcaagtgtttagcataaactatattgtttgtatgaacagtttagcacagtgaaccactcttactggaaacactcctgaaatctaagctcccaaactggactccagcttcaaaggagagcattcaggcctattgtattagtacttctgcacacaccacttaaggcctaagctcagaactcccacagcgtcattcttgccacattctattggttaaatcaagtcacaagcctggtccagattcaaaagggtagaaaaataggccacctcttttgggacaacgtaggatgggaggaaattggctttttaggtttttttttttttttcccaatttatcagacttattacctatctcaaaacaaatatatatatttaaatacagctttaattaggtatatttgtaattataagtttgcagtaaatttgcatgtctgtttttgtgtgaattttcagaattgaaggctacattttgttctttcagaaggtttggcttaagaaaccaaaggggagggaaatatgattgcgcagaaattgtattattttgttttcctaaatttaattaaaagcaatcttggtaaatatgaaatgacctctcattcactatatgtttttctctatctgtgcttgcctatacatgttaaatgttaatttcaggttaacataagatactttaactttgtattctgtcctactttaagataatggctgtgtttaatcagaagtctgtctcggatatgattaaagagtttcgaaaaaattggcgtgctctttgtaactctgagagaactactctatgtggtgcagactccatgctcttggcattgcagctttctatggcggagaacaacaaacaggttggtaaactatatttgggttaacttgtttttttaaagcaaaatttcattgctgcccatttgaataaacttaagcttaagaatattaatttctttacattatgtgcccttctgtgataatacaccattttcacaaatgcctctgtgtatctgtgtcagaatgttatgatagaatttgaaatgaattatttcaaaattaagctcttatgtatggttatacacgggacatgcatatttgatgtttaataggaagatttaggataaacatgtaactattattattgtggtcaaattatttttatttaataagacttttttcattccctaaacttttaaaaactactggctcttgtaccccaatcctggaaattcttccaatctgcaccgggatactggaaactgcctttaaaaaatttccacaaagtgattcttacttaggtagcttgagccaaactagcgtttggatttaagccgtagattaagggttagaggtgttcagatgagagaaggatgaatgtaggatagagtggtaaggaaaggctttgtgatattagatagattttagataaaggaagagaaggctgtagaggaggtatgatgaggaaagtcagttcagaagaagggttcaggggaatcaaagtcatggtatgaacttggcaaagatactggcttgactagagaagaggatttttgaagggtagaattagcttcaatgggtctgttgggctagatattgaaatgacattctgatgagttattttaattttatatgtcagtagtttccagatttttagattccatagacagtaaaatttctaaaaaattattagacactgacagattttaaccatttctcatttttgcaaataaggccattgagaaaaaatagttactatatactatgatcatcattttgaaaaaggaagaatattttaacacttaaaaattaaaaagtataaaatcttaaaacagggatagtgttttctacctgtgaatagttggcagttttgcatattttaaacaatgcatgttaagataaattttgaatctcgaaaacaatgacaaaatgttattttattttatgtagtcagtcattttttgaacaaatattgagtttttactgtgtgttagacatcattgtaaaaattgggaatacagtaatgaaagaagtcacttcttatggagtgaaccttctagggagagatagctagtactgtaagatatttagtcttttaggacataataaatgctattaataatagtgttattaatatgtacataataaacatacagaaaacaataaaacatgcgactaaggaatatgcagattttggggtgaaagggttgttggaatttgaaatagggtggtcagggaaggcctcacctggaaagtaccatttgagcaaagatttgaaacaggggagggcattagccatggggatttttatgggaagggactaccgcaggcaaagggaggagcaggtgtagtggccctgaggtggctctatgcctggatgttccaggaacagtaaaaaggccaatacagctgtctgaataaatgttaatctccttccctccactaattacttttttctctttttctatttttgagcttctactataagccaggcattgtgatatatgttggggttaaaacggtgagcaaaactagacttgactcctgccatcatgaaacatattacctagtagataaggcagacattatgtagaggatcatacaaatacatgtaaactaatagccataagaagaatatgatgctcagacaccagataattgacttcgtcaaagagatcaagctgagcccctcagttgtactctttggtctagaggctcttttttaccctctccagggaatgaaccttcaattttttgccaagttagatgattattctcccctacctcaacagaaattaattattaggcaaaaatcaaagcaaagattacccagagagataagcacaatactggaataacttctagaatcacttcattggcaaatctcttcaccaatgccttccactgggcagattgtttttctaggagacatattaagagtgttgcctttcaaaggctttggctttatgtggcggggtgagcagaaagggttcctgattcagctttctaccttttttttggactctcctttgtctttcaaaatttgcgctcagggtttataaaaactaggttctagagtgccagggagtagtagatgccttgaaacaaacacaagccccaccttttgcttacccttgtatattggcactttctctttgtttttgaccttttgtagtttctcttttatagactatttagtcatgctttaaaaaagtttttctattttctactgtagttttaggtgttctgtaccaggaagtttttctgcaaatcaagttagccatattgcactgttggtgtgtctgttttaaagttgtaacagatggggccgggtgctgtggctcacgcctgtaatcccatcactttgggagactgaggccggcagatcacatgaggtcaggagttcgagtccagcctggccaacttggtgaaaccttgtctctattaaaaattaaaaaattagctgggcgtagtggtaggcgcctgtagtcccagctactcgggaggctgaggcaggattatcacttgaacccaggaggcagaggttgcagtgaggcactgcactccagtctggccgacagagcgagactctacctcaaaaataaataaataaaataaaattataacagtatcagctctttctgtatcttgtttttttccatccaacattattttcaagatcttttcaggtagtgatagacagaaaagttaatctaatttattcattttatcactctcacatgttcctttaatatgactgccatattctatttattggtggatctttagactgaagttcttttgtgttatgaatagttttgccttgaaatgaaatgtttgcactgagcaagaggttttttaggttccttatttaagtagttacatgatagacacatttttatcttacacgtggcagtcagaatttacatttatgggctagacacactgactcatacctgtaattgcagcactctgagagtccatgatgggcagatcacttaagcccagaagttcaagaccagcctgggcaacatggcgaaacctcgtctctacaaaaaaatacaaaaattagctgggtgtggtggagtgtgcctgtagtctcagctacttgggagactgaggtgagatcacttgagtctgggaggttgaggcttgctgtgagccaagatcactccagtgcactctagcctgggcaacaaaacgagaacctatctcaaaaaaagaaaaaaaaaaaagaaattacatttatgtcatcaatggaagagagtgccatttttttatccctctttccatattagatgtcagagtttattagaaaagattaaaaaatggtatttcattttatttttttggacagctaccatgtttaaaaatttgtttaaatgcttatttgatcatttggtatctttctttttcatagtagattcatttttaataatgaaataaactagaaatattctacatgtatatgacctggaggttggttctatatagcattgtaaaccaccagtagaatagtgtgcaataattaaatagcttgggtacatgtacatttattgacatggaaaaatattcaaaatatattgttaataaaacagagcagtttgtattatggctaagagtaaatgctagggagtcagttggcttgggttcacagcctaattcagccttttgactgagtggccttagacaaatcacttaatttttaaaaaaaattagttttttaaattgacaaaaaattgtatttatttatcatgtacaatatattttgaaatatgtatacattgtgaaatggcttaactgagcaaattaatatgcattacctcacattcttaacatttttgtggtgataacaattaaaatgtattctctgaacagttttcaaggatacaacagtgttattaactagcaacaccatgttgtacaatagatctcttgaaattattcctcctaacagaaactgtatatactttgatgagtatctccccatccaccccacccactgtgtccccacatcccctagtaaccatcattgtctttctacttctataagttcacctcttttgtttttttgatggagtctcactctgtctcccatgctggagtgcagtggtgcaatctcagctcactgcaagctccccctcccgggttcacgccatttttctgcctctgcctccctagtagctgggactgcaggcacccgccaccacacccggctaattttttgtatttttagtaaagacggggtttcaccgtgttagccaggatggtctcgatttcctgacctcgtgatctgcccacctcggcctcccaaagtgctgggattacaggcatgagccaccgtgcccggcctgtaagttcaactttttaacacaccacttgtaagtgagattatgtggtgtttgtctttctatgcctgtcttactttccttaatataatgttttccaggtacatccatgttgttacaaatgacaggatttctctcttttatggggctgaatagcattccattgtgtatatataccacattttctatccattcatccattgatggatacttaggttgattccatatcttggctattgtgaacaatgcagcaatggccataggagtcctgatctctcttcactactgatttcatttcctttggatatatacccagtattgggattgcaggatcatatggtagttttattttttgagaaactttcatactgtaatgcttatactaattacatttccaccaacagtatacaaaggattcccttttcttcacatttttttttaacacttttatcttttcaataatggccattctaacaggtcataatttattttggtttccatttgcatttttctgatgattagtaatgttgagcattttttatatacctcttggcaatttgtgtgtcttctttttggaaatgtctattcagatcctttgtccaattcttaaaaaacgattatttttaaaattcattttattatttagagacagagtctcaatatgttgcccaggctgtacttggactcctaggctcaagaattctcctgcctcaacctctgaagtaattgagactgtgggcatacgccactgcatcctgctcttttgcccattttttttttaatggggttgttttcttattgagtttcttatatattttggatattaaccttttatctgatacatgatttggatatattttctcccattccataggttgtctcttcactctgctgattgtttccttggctgtgcagaaagtttttagtttgatataatcccattcatgtatttttgcttttgttttctgtgcttctgggtttatgtccaaaaaaccattccccagaccaatgtcatggagtttttcctctgtttttttctaggacttttgcagtttcaaatgttaaatttaagcctttaatacattttgatattcattcttctagccaatgagcctggaatgtttttccatttgtttgtaccttctctgatttctttgagcagtgttttgtagttttcattgtagagatctttcacctccctggttgactgtatttccaggtattttattctttttatggcaattgtgaatgaggttgcattcctgatttgcctctagacttgactactgcccaaagcaatttatatatttaatgctaatcctgtcaaacttccagtgacattctttgcagagctagaaaaagctcttttaaaattcctatggaacccaaaaagaccccaaatagctaaggctatcctaagcaaaaagaagaaagcaggtggtatcatgctacctgacttcaaactgtattaaagggctacagtaaccaaaacagcatggtattggtagaaaaacagacacatagaccaatggaacagaatacagagcccagaaataagaccacacaccaacaaccatctgatcttcaacaaagctgatgaaaacaagcaatggggaaaggattccctattcaataaatagtgctgggataactggctaaccatgtgcagaagattgaaaccggacctcttccttaaactacatacaaaaatcaactcaagatgagggacttacatataaaacccaaaactggaaaaaccctggaagacaacctaggcaataccattctggacacaggcatgggcaacgatttcatgatgaagatgccaaaagcaattgcaacaaaagcaaaaattgacaaatgggatctaattaaactagagagcttctacacagcaaacaaaactatcaacagagtaaacagacaacctacagcataggagaaaatttttgcaaactatacatctgacaaaggtctgatatctagtatctataaagaacttagacagatttacaagaaaaaatcccattaagaagtaggcaaaaagctgggcatggtggcttactcatgtaatctgagtactttgggaggctgaggcaggcggatcacttgaggtcaggagttgaagaccagcctgggcaacatggtgaaaccccatctctactagaaatacaaaacattagccgggcatgggggcagacgcctgtaatcccagctactcgggagactgaggcaggagaatcacttgaacctgggaggcagaggttgcagtgagctgagatcacaccactgcaccacagcccaggcaacaagagtgaaacaccatctcagaaaaaaaaaaacctaaaaaaaagaagtgggtaaaggacatgaacagacacttttcaaaagaagacatacatgtggccaacaagcatatgaaaaaaagctcaacatcactgatcattaaaaattgcaagtcaaaaccacaataagatatcatctcacaccagcagaatggctataattaaaaaatcaaaaagtaacagtggctcacgcctataatcccagcactttgggaggccaaggtgggtggatcacttgaggtcaggattttgagaccaacctggccaacatggtgaaaccccatctctactaaaattacaaaaattagccgggtgtggtggcatgcacctgtattcccagccacttgggaggctgaggcattagaatcacttgaacccgagaggcagagattgcagtaagctgagattacaccactgcactccagcctgtgtgatggagcgagactctgtctcaaaagaaaaaacaaaagaggtactggcaaggctgtggagaagaaggaacatttatacactgttgggggagtgtaaattagttcaaccattgtgtaaagcagtgtggagattccttgaagacctaaaaacagaactaccatttgacccagcaatcccattattgggtatatatccaaaggaatataaatcattctatcataaagacacatgcatgtgtaggtttattgcagtgctattgacagaagcaaagatttggaatcaacctaaatggccattaatgatagactggataaagaaaatgtggtacatatacatcatggaatactctacagccgtaaaaaagaacgagatcatgtcctttgcaggaaaaggaactagagaccattatccttagcaaactaatgcaggaacagaaaaccagataccacatgttctcacttataagtgggagctaaatgatgagaacaaatggacacatagagggaaataacaggtactggggcctactgaagggtgacgggtgggaggagggagaggatcaggaagaataactaatgggcacttggcttaataccggggtgacaaaataatctgtacagctgggcgctgtggctaatgcctgtaatcccagcactttgggaggctgaggcaggcagatggcctgaggtcgggagtttgagaccagcctggccaacatggtgaaaccccatctctactaaaaatacacaaattagccaggccatggtggcatgtgcctgtaatcccagctacttgagaggctgaggtgggagaatcacttgaacccaggaggtggaggttgcagtaagctgaagtcacgccattgcgttccagtctgggggatagcgacagagcgagaccctgtctcaaaaaaaaaaaaaaagaatctgtacaacaaacccctatgacatgaatttacctgtgtaacaaacctgcacatatacccctgaacttaaaagttcaaaagaaaaaaatccattttgagttgatttttgtaaaagggataagggtctaatttcatttttctgcaggtagatacccagttgtccaacatttattgattagactgttctttccccattaggtgttttttgtatcttttttcaaaaccaattgcctgtaaatttgtggatatatatcttggttctcaattctgttccactggtctatccgtatgtttttatgctagtactatgctatttggattaccatagttttgtagtatagtttgaagttaggtagtgtgatgcctccagctttgttcattttgctcaagattgtttttgctgtttggggtctgttgtagttccatataaattttaaaattgttttttctatttctgtcaaaaatggcactggaattttgataggaatagcattgaatctgtatattgctttggataatatggacattttaacaatattaattcttccagttcatcaatatgggataactttccgtatacttgtgtcttctttaatttcttttatccatgttttatagttttcagtgtgcagatctttcatcttcttggttaaatttatttgtaaaaattttttgtttttatagctattgtaaatgggattgttttctggattactttttcagattgtttttagtgcattgaaatgatactgatttttgtattttgatttttgtatcttgccactttacacaatttgtttattcttacagtttttggtggcgtctttatggttttctgtatataagaacatgttatctgtaaacaggaacattttcacttatttctttccaatttggatgccttttgtttctttttcttacctaaccactctggctacaccttctagtactatgttgaatagaagtgggaagagtgagcatccttgtcttgttcctgatcttaaagggaaatctttcaactttttcactattgagtatgatgttagctgtgagtttgtcatatatggcctttctcatgttgaagtatttttttatatctaatgtgttgacaattattataatgagaggatatttaattttgtcagatgtttttttctgtgtctttagagatgatcatagtgttttgtccttcattctgttatgtgccatgttttgtttatagatttgcatatgctgaaccatccctggtatgaatctgactttatcatcatgagtgatccttttaatgtgctgtttaatttggtttcctagtattttgttgaggaattttgcatatgtgttcattatggatattgtcctctaattttttttttcttgtagtgtcctagtgtggctttggaatccgggtcatggttgtttcataaaatgagtttggaagtattcccttttcatttttttggaagagttcttagtgcatacagaacattcgtcaagatagatcatatgttagcccacaaaacaagtcttaacaaatttaagaagattgaaatcatactgagtatcttttctgattacagtggtatgaaactagaaatctgtaacaggaagaatttggaaaattaacaaacacgtggaaattaaccaacggttcgaagaagaaattaaaaggaaatttaaaaaaaccttaaaaaatatggaagtacaacataccacaacttatgggatagagcaaaagcaattctaagaggaaagcttatagcaataaacacctacattgaaagaaaaaaagatctttaataaacttaacattacaccaaaagaaactaggaaaagaacacactaagcccaaacttagcagaaggaagagaataataaagatgagagcagaaataaatgaaatagagactaaaaaaacaatagcaaagatcaatgaagctaagagttggctttttgaaaagataaacaaaatcaacaaacctttaggtaaaagtaagaaaaaagagaagcctcaaaaaaaaaaaaaaagaaatgaaaaaggatacattataactaataccacagaaataaaacaggtcataaaagactactatgaacaatttgtatgccaacaaattggataacctagaagaaatggataaattccttgacacgtactatctaccaagactacatcatgaagaaataggaactctgaatagaccaataagaaataaggacattgaatcagtaataaaaagtcttttattaaagaaaagcccaggacctgatggctttactgctgaattctaccaaacatttaaagaactaataccaatccttctcaaactcttccaaaagcatgcagaagggggaacactttccagctcattttatgaagccagtaggtaagtattctcctcatagactttctattcatatccttttcttattttactgttgagttgtttttgtctcttgtttttgctgtgagacaggctctcactctgtcgcccaggctggagtgcagtggcacaatcattgttcactgcaacctcgacctccccaggcttaggtgatttttacctcagcctcccaagtagctgggactacaggtacgtaccaccatgcccagctaattcttttatttttttatagagacagggtttctccatgttgcccaggctggtcttgaactcctgggcccaagggatctgcctgcctcggtctcccaaagtgctgggattacaggcatgaaccactatgtctgacctctttcttatttggaatatttctatatgtattttagatattctctttgttataaattttgttggtactgtaagggaggcaaaattttacctccacccttttagggtttttggctgggcctgagaattaaattgacataaggcagatcaacaggagaaaatcatacaaatttaataggagtattacatggcacaggaatatgtataaggaaatgaagaccaaaagacaagttagagttgaacacttacatactgaatcggagaaagagtagtaaaatgaaaatgtgggccgggcatggtggctcacgcctgtaatcccagcactttgggaggccaaggtgggtggatcactaggtcaggagatcgacaccattctggctaacacggtgaaaccccatctttactaaaaatacaagagaattagccgggtgtggtggcaggcgcctgtagttccagctacttgggaggctgaggcaggagaatggtgtgaacccgggaggcagagcttgcagtgagatcgcaccactgcactccagcctgggagacagagactccgtctccaaaaaaaaaaaaaaaaaaaaaaaaatgacaaggcaaaggaacttgggtgtttaattggatggagtagtggccaggaaataaagattagtttaataaggtttgtatagatttccctggacctcagtttacactccttgatgataagaccgttacttgtataaagagggtatctttcacatgggaattttgtcttctgttttgaagaaacggaaggaagttcatagtgatcatcttgcacctgctgtttttcgagtacttttagcctagattttcattttaccaggtggcataatttgggggtggagtgatcttaattatttcagtatcttctagttttacctacaagttttagcttttctccattttacctactttcactggatgcatttcccttacattcttctacctgcatttatgtgagataccattctactgagtcttaaatccagtatgatcatctttaccttgatgtccctgtactgtttccacatcatttttttttgagatggagtctctcccacatcaatttttaaaatagagcacattgtttgctttttcaactgaccttcccgttcatattcttagtcgtattggcatgtgccattgttcactcagtaacttaagctagataccctatttttattttaatttattcttctttggtagtgtgaggaagtagtactaaggtaaatgatggattatgagaatattgaataaatagactagctaagggttaaaccttggtgaccatacactggaaaataatgagagaggaattgaggcaatttttcagaatcagtattgtatagtgattggaggctgttattctggaatcagactatattcaaatcacctcctttcatttatttatgacttacttttaaagaaataagtagattttttcaacaagctaagtgaaatataccctgaaaaacatttaaccctcattgtaagaattttcacatactgaaatattcaatccaagtcagtttttcttcaggatttgtttacgtagcagtcactcagtgtctctttctacttgctaattttctacttgctaattcacttaattcagtgtgaaagttcagactctgggtgggaaagaagaggtgagttgcaactgagattttcacagttcttgtatgtgtgtgcacatgtgtagtggtgtggtaggttgcagttcagttttatttcaactttccacataagagttagcttaggcatcctcaactgtgctctgacttccaagcagtatgaaacaacatacctatatgtctgcgggtgcattcgtgagtagcatatagtaattaaaagtagatagagttggttgtatatatccatgacgtatattttttatcctgtgtttgagctctatttagatttctcttttggtttttgttttgttttgtgttttttttgtttgtttgtttgtttttgagacagagtctcactctgtcacccaggctggagtgcagtggcacaatctccgctcactgtaaactccgcctcctgggttcatgccattctcttgcctcagcctcctgagtagctggactacaggcacccaccaccacgcctagctaattttttgtatttttaggagagacggggtttcaccatgttagccaggatggtctcgatctcctgacttcgtgatccacccgcctcggcctcccaaagtgctaaaattacaggcgtgaaccaccacgtaagtttttaattctctgaagtttgagaacatgagtcttaaagtataattcttacagctgaatttgactacagtaaaacttttgaatacctagtagagttgttagtctgtctaatggcatatttgttttttctcaactgttaaagtgggagaaaagaaaagacatattgaaatactctttaagttttaggtttttagcatgttttttgagggggaaaattttttagcttgaattatataatgcctctctagcagttatatactgctaaagattttttttttttaattctagggtatatgtgcacaacgtgcaggtttgttacatatgtacacatgtgccatgttggtgtgctgcacccattaactcgtcatttacattaggtacatctcctaatgctatccctccccgctccccccaccccacgacaggccccagtttgtgatgttccccttcctgtgtccatgtgttctcattgttcagttcccacctatgagtcagatcatgcagcgtttggttttctgtccttgagatagtttgctcggaatgatggtttccagcttcatccatgtccctacaaaggacatgaactcatccttttttatggctgcatagtattccatggtgtatatgtgccatattttcttaatccagtctatcattcttggacatttgggttggttccaagtctttgctattgtgaatagtgtcgcaataaacatacgtgtgcgtgtgtcttcgtagcagtatgatttataatcctttgggtatatacccagtaatgggatggctgggtcaaatggtatttctagttctagatccctgaggaatcaccacactgacttccacaatgaatgaactagtttacagtcccaccaacagtgtaaaagtgttcctatttctccacatcctctccagcaccttttgtttcctgactttttaataatggccattctaactggtgtgagatggtatctcatcgtggttttgatttgcatttctctgatggccagtgatgatgagcattttttcttgtgtcttttgggtgcataaatatcttcttttgagaagtatctgttcatatcctttgtgcactttttgatggggttgtttgatttgttcttgtaaattttttttaagttctttgtagattctggaattagccctttgtcagatgggtagattgcaaaaattttctcccattctgtaggttgcctgtttactctgatggtagtttcttttgctgtgcagaagctctttagtttagttagatcccatttatcaattttggctggtgttttagtcatgaagtccttgctcatgcctatgtcctgaatggtattgcctaggttttcttgtagggtttttatggttttaggtctaacattcaagtctttaatccatcttgaattaatttttgtataaggtgtaaggaagggatccagtttcagctttctacatatggctagccagttttcccagcaccatttattaaatagggaatcttttcccgatttcttgtttttgtcaggtttgtcaaagatcagatggttgtagatgtgtgatattatttctgagggctctgttctgttccattgatctatatctctgttttggtaccactaccatgctgttttggttactgtagccttgtagtatagtttgaagtcaggaagcgtgatgcctccagctttgttcttcttgcttaggattgtcttggcaatgtgggctcttttttggttccatatgaattttaaagtagttttttccaattctgtgaagaaagtcattggtagcttcatggggatggcattaaatctataaattaccttggacagtatggccattttcaccatattgattcttcctgtccatgagcatggaatgttcttccatttgtctgtgtcctcttttatttcattgagcagtggtttgtagttctccttgaagaggtccttcacatcccttgtaagttgggttcctaggtattttattctctttgtagcaattgtgaatgagagttcactcatgatttggctctctgtctgtgattggtgtataagaatgcttgtgagttttgcacattgattttgtatcctgagactgctgaagttgcttatcagcttaaggagattttgggctgagacgatggggttttctaaatatacaataatgtcatctgcaaacagggacaatttgacttcttcttttcctaaatgaataccctttatttctttctcctgcctgattgccctggccagaacttccaacactatgttgactaggagtggtgagagagggcatccctgtcttgtgcaagttttcaaagggaatgcttccagtttttgcccattcagtatgatattggctgtggctttgtcataattagctcttattattttgagatacttcccatcagtacctagtttattgagagtttttagcctgaagggctgttgaattttgtggaaggccttttctgcatctgttgagataatcatgtggtttttgtctttggttctgtttatatgatggactacatttattgatttgtgtatgttgaaccaggctttcatcccagggatgaagcccacttgatcttagtggataagcttttagatgtgctgctggatttagtttgccagtattttattgaggattttcgcatggatgttcatcagggatattggtctaaaattctctttttttgttgtgtctctgccaggctttggtatcaggatgatgctggcctcataaaatgagttagggatgattccctctttttctgttaattggaatagtttcagaaagaatggtaccagctcctctttgtacctctggtagaatttagctgtgaatccatctggtcctggaatttttttggttggtaggctattaattattgcctcaatttcagagcctgttattggtctattcagggattcaacttcttcctggtttagtcttgggagggtatatgtgtccaggaattgatccatttcttctagattttctagttcatttgcatagaggtgtttatagtattgtctgatgatagtttgtatttctgtgggattggtggtgatatcccctttatcgttttttattgtggctatttgattcttctctcttttcttctttattagtcttactagtggtccatcaattttgttgatcctttcaaaaaaacagctcctgggttcattgattttttggagggttttttgtgtctctatttccttcagttgtgctctgatcttagctatttcttgccttctgctagcttttgaatgtgtttgctcttgcttctgtagttcttttaattgtgatgttagggtgtcgattttagatctttcctgctttctcttgtgggcaattagtgctataaatttccctctacacactgctttaaatgtgtcccagagattctggtgtgttgtgtctttgttcttattggtttcaaagaacatctttatttctgccttcattttgttatgtaccagtagtcattcaggagcaggttgttcagtttccatgtagttgagtggttttgagtgagtttcttaatcctgagttctagtttgattgcactgtggtctgagagacagtctgttagaatttctgttcttttacatttgctaaggagtgctttacttccaacttagtggtcaattttggaataagtgcggtgtggtgctgagaagaatgtatattctgttgatttggggtggagagttctgtagatgtctattaggtccgcttggtgcagagctgagttgaattcctggatatccttattaactttctgtcttgttgatctatctaatgttgacagtggggtgttaaagtctcccattattactgtgtgggagtctaagtctcttgataggtctctaaggacttgctatatgaatctgggtgctcctgtattgtgtgcatatatatttaggatagttagctcttcttgttgaattgatccctttaccattatgcaatggccttctttgtctgttttgatttttgttggtttaaagtctgttttatcagagactaggattgcaacccctgcttttttttttgttttccatttgcttggtagatcttcctccatccctttattttgagcctatatgtgtctctgcatgtgagatgggtctcctgaatacagcacactgatgggtcttgactctttatccaatttgccagtctgtgtcttttaattggagcatttagcccatttacatttgagtttaatattgttatgtgtgaatttgatcctgtcattatgatgttagcgggttattttgctcgttagttgatgcagtttcttcctagccttgatggtctttaaaatttggcatgtttttgcagtggctggtaccagtttttcctttccatgtttagtacttccttcaggagctcttgtaaggcaggtctggtggtgacaaaatctctcagcatttgcttgtctgtaaaggattttatttctccttcacttatgaagcttagtttggctggctatgaaattctgggttgaaaattcttttctttaagaatgttgaatattggcccccactgtcttctggcttgtagcgtttctgccgagagatctgctgttagtctgatgggcttccctttgtgagtaacctgacctttctctctggctgcccttaacattttttccttcagttcaactttggtgaatctgataattatgtgtcttggagttggtcttctcgaggagtatctttgtggagttctctgtatttcctgaatttgaatgttggcctgccctgctaggttggggaagttctcctggataatatcctgcagagtgttttccaacttggttccattctccccgtcactttcaggtacaccaatcagatgtaaatttggtcttttcatatagtcccatatttcttggaggctttgtttgtttctttttactcttttttctctaaacttgtcttctcgcttcatttcattaatttgatcttcaatcactgataccctttcttccacttgatgaatcagccactgaagcttgtgcatgcatctcatagttctcgtgccatggttttcagctccatcaggtcatttaaggtattctctaccctgtttattctagttagctaatcgtctaatcttttttcaagtttttaccttctttgcaatgggtttaaacatcctcctttagctcagataagtttgttattaccaatcgtctgaagtcttcttctctcaactcgtcaaagtcattctctgtccagctttgttccattgctggtgaggagctgcattcctttggaggagaagaggcactctgctttttagaatatttggcttttctgctctggtttctccccatctttgtggttttatctacctttggtctttgatgaaggtgacgtacagatgaggtttggtgtggatgtcctttctgtttgttagttttccttctaacagtcaggaacctcagctgcaggtgtgttggagtttgctggaggtccactccagactctgtttgcctgggtatcaccagtggaggctgcagaacagcaaatattgcagaacggcaaatgttgctgcctgatccttcctctggaagtttcgtctcagagggacacccggccgtatgaggtgtcagtcggcccctactgggaggtgcctcccacttaggctacttggtgttcagggacctacttgaggaggcagtctgtccgttctcagatctcaaactccatgctgggagaaccactactctcttcaaagctgccagacaggatgtttaagtctgcagaagtttctgctgccttttgttcagctatgccccgccctcagaggtggagtgtacagaggcaggcgggcctccttgagctgtggtgggttccacccagtttgagcttccaggccactttgtttacctactgaagcctcagcaatggcagacgccccccacccccagctgccttgcagttcgatctcagactaatgtgctagcagtgagtgaggctcttgtgggcgtgggaccctcttagcaaggagcaggatataatctgctggtgtgccgtttgctaagaccattggaaaagcacagtattagggtgggagtgtcccgattttccaggtaccatctgtcatggcttcccttggctaggaaagggaattccccgaccccttgcgcttcccgggtgagatgatgccctgccctgcttcagctcatgctctgtgcgctgcacccactgtctgacaagccccaatgagatgaacccggtacctcagttggaaatgcagaaatcactcatcttctgcgtcgctcatactgggagctgtagactgtagctgttcctatttggccatcttggaacctcctcctaaaaatgtaacctttatagattcattgaggacttttgacgtcattatatggcgaatgtatatgacttcattaggaggcaactaatattttggctttctttctttggaattagcttcttagtttgcatctgactgacaatcgtgttaatagaggctattttttttttgccttaaattgtcttattgagaaacttacaatattccattgcataaaacagatgaaggtattaattttatacctttatggaaagcaattacagtacctgtgattgactgtcagatttgaaaatgatgtaactgtgatctaacaagaagaaacaggtttttaaaattgtattgcattttatcaccactctttcccctcaaaacaatgattttactttaaataggagaagagaaaggaaattgacatttttgattacctatcatttgtcaggtgttatttaatctgtgtaatctcattttataaccaaggaaactgactcaggggtttcagtatcttactcaaggtcacatagcccattagtgctcttaagtagacctatcttttctttaatgacaacaaaatgtctagtcaattaaaaatgtaaagtttatttaaaattttgagttattagaaaaatatgatataatgtacaaagtacgaatgctctggaaaatatgtaactcttgattttctcattttattcttgtgcaatacaatccttcttatgtccatcagagaattaaagtggtgaacattttgaacttccttcatatattagccagctggcatgttttcctagcaaaatattttctgatttgaccacagactctctcaatcagttgttactggtttgaataatagaatatgctgtcatggtgggcacctgatcatgaaaactgatatctggagtgcatttttatttggatttaaaatgtttttacaatcccagtataaacactgttaatctagtcaaaactttttctcacaagatcaagagcttgcatagttttactttaactagttatagtcaaaagggtaagaataagttgtgcatttacattacacaaaatcttattttaaacatgaaggatgtcagactaaaaatagtgttaggaatttttgagataaaacagtttagttttaaaactctaaataactggatttatttaatttacatagcatttggaaattttctgatgtgtaacctttgtggggttggggagtaagtgtacagtttttggtacaatgctggaaaattacaaatatgtcctacatttggagaatagatccaatgtttgagagttactgatttttttgtttttggttattcattgaactagtttcatgaaatagaattaatttccattttcatgacacaacaggcccctgcactaaggacaatgaggataatttttttagttgtgtttgtatagatgagtaaagagctgcttattttaaggcagtttggacacttagtcttaaatgtggatagtaagtactaccagtggctaattattataggaagtataaaaatgtagatttaaaagggtcaaatatatagaaaataatatttaggagtacttgatttctttctgtttttgttgtgtaaagtttatattgtagtttagttctagtgaactatagttgtacttgaatacccacccatcttcaaatgcaatgagttgacagatcttggtgttagtggaaactactaaaatattaaaggaacttaactatagaagacagcaatgtattacatttcataaatcatatctggatacttaaaaatatttagtactcatggtgtattaaaaaggagtagttagaatttaatttttgctgaattagggctggcagcttttggaaggcatcattattaatttctagaatattaatggagcagaatggaatcaataaaaaaaaccttcaacttgttcactgagagaatttattatgcagatgttgaagaagactttaaagaaagcattatagttagataaaatattagcatgcaaacatgttggtaacattagtggatctctaagcaactatatgtcactgtagccaggttataatctgttttatttctcgtgggatagatagaaattctgtcaaaaaagagaaagaaaaagaataattttgcctgattactaacatctgacaacttatagaaagaaacctgtgtctttttagcacttgtttgttacagtttcatgtgtccatgagctgagaagaatcaaaattaatctctggctcaaggttttacacttgatcttagccaaaaggccgagaagcaatggctcaaggttttagcactgatgttttgctttcctagtaatagtaatgaaacataattttattgcttcaaagagaataaaatacctaggaacccaacttacaaaggatgtgaaggacctcttcaaggagaactacaaaccactgctcaatgaaataaaagaggatacaaagaaatggaagaacattccatgctcatgggtaggaagaatcaatatggtgaaaatggccatactgcccaaggtaatttatagattcaatgccatccccatcaagccaccaatggctttcttcacagaattggaaaaaaattactttaaagttcatatggaaccaaaaaagaacccgcatcaccaagtcaatcctaagccaaaagaacaaagctggaggcatcacgctacctgacttcaaactatactacaaggctacagtaaccaaaacagcatggtactggtaccaaaacagagatatagatcaatggaacagaacagagccctcggaaataatgccacatatctacaactatctgatctttgacaaacctgagaaaaacaagcaatagggaaaggattccctatttaataaatggtgctgggaaaactggctagccatatgtagaaagctgaaactggatcccttccttacaccttatataaaaattaattctagatggattaaagacttaaacgttagacctaaaaccataaaaaccctagaagaaaacctaggcattaccattcaggacataggcatgagcaaggacttcatgtctaaaacaccaaaagcaatggcaacaaaagccaaaattgacaaatgggatctaattaaactaaagagcttctgcacagcaaaagaaactaccgtcagagtgaacaggcaacctacaaaatgggagaaaatttccgcaacctactcatctgacaaagggctaatatccagagtctacaatgaactcaaacaaatttgcaagaaaaaaacaaacaaccccatcaaaaagtgggcaaaggacatgaacagacacttctcaaaagaagacatttatgcagccaaaaaacacatgaaaaaatgctcaccgtcactggccatcagagaaatgcaaatcaaaaccacaatgagataccatctcacaccagttagaatggcaatcattaaaaagtcaggatacaacacgtgctggagaggatgtggaaaaataggaacacttttacactgttggtgggactgtaaactagttcaaccattgtggaagtcagtgtggctattcctcggatctagaactagaaataccatttgacccagccatcccattgctgggtatatacccaagggactataaatcatgctgctgtaaagacacatgcacacatatgtttattctggcactattcacaatagcaaagacttggaaccaacccaaatgtccaacaatgatagactggattaagaaaatgtggcacatatacaccatggaatactatgcagccatgaaaaatgatgagttcatgtcctttgtagggacatggatgaaattggaaatcatcattctcagtaaactatcgcaaggacaaaaaaccaaacaccgcatgttctcaatcatagatggaattgaacaatgagaacacatggacacaggaaggggaacatcacactctggggactcttgtggggtggggggaggggtgagggatagcattaggagatatacctaatgctaaatgacgagttaatgggtgcggcgcaccagcatggcatatgtatacatatgtaactaacctgcacattgtgcacatgtaccctaaaacttaaagtataataataataaaataaaaaaaattaatctttatgaccatatttttagactaaacccttggaatattgtgttatatgggaattcactatggcaatgagaattttaaatacgagattaaaaatagattcgccaaaagaacgaaaaggaactaaaaagaatcaaaattttcccccatcaatagtacttaagtatagtttactgcccacccatccatccattttgggtagaagaaatttgacgaatttcaagaaatgtaacagcggctatgtatttaccagttttatcatgtgcaaacttgccttagttgttcatattttataaaatcatgaaaacctttttcttttatatctggtttccaaaattgtctcatagttcaacttgggtgttctcttcaaacccacaaaaattgaatgtagactttaccaaaatttaatttgtatttcttatctcagttataagttattgaatattctggtacccaactttattttttttttttttggcattatctttttcagcacagtggagaatttacagtctctctcagtgatgttttattgacatggaaatacttgctccatgagaaattgaacttaccagttgaaaacatggacgtgactgaccattatgaggacgttaggaagatttatgatgatttcttgaagaacagtaatatgttagatctgattgatgtttatcaaaaatgtagggctttgacttctaattgtgaaaattataacacagtatctcctgtaagtattttttaaacaattctattttaatcaaattaaaatttagctctatttattttgaattatagtatcaccagttatagtaacttggtaatgtttttgctttgtgaatcatgttaaaaatgggaaaatttagctacctgaaagctacttattacttgaaagaaagattttgtggtaaattttcttggacttgtgttattgttatttagttgctatacggatagcttcttattagatcaaaaatccctaacaaagaaattagtcccaaatgcctgatttctttttgaatcatgtcaaagattgcttttgtattcactttcttgatttaatgtgcatctgttcatttggcatatgttggataaatgattggtgtgactttttctatggattaataatgttattttactacatataggtatcatttattttatgaaaatagtattatgcaatatacatgagataatagactattctttttttgcacaagcatttttttaatggagtataaatgtaaaaattaaatggagtagtatcccttgcagtttggttttgtctacgttagaatttataaactgttttagaatatatttgggtgtatctagttatttttaaagtgttggaaatatttttagttatttgaacatttactgagtgccaataaagtagtagttaaatagtggcaataaataactgaagctggaattagaggaaaatgtttgctatattttgtaagataatcaattattttataaatatttcaatacaatacttgagaacagtgttttagccgattataatagaaacctccactacaatagttattgagagaaaaatagaagtataactcttttatgtaagatgtctaaagatatgcaaccaagactgatatgatagctccatggttatcagagacctggactttttctatcattctgctcgcccattttagtccttggttcctaccctctagaccattttatggtccaagatgactgttggagctccagccattatatccattatattggtattccttgtaccaagaactagtaaggaagaacagcactttgcttttctcttaagggtacatagctttttctttcatgtcattgccaaaaggttagtcacatggccacaacaagctgcaagggaggatggagaatatagatcttattctgggtaatatcttgccagaataaaaacaaaagctctattactagggaagaaagggagaatggatattggcaggcagcttgctgtctttgcctcattgaactatcataaaaacctttgccttgttacagcttcctcaaaacatatccgcacacatgtacaactacactatggtaaggatacttgtaaagatagctttttaaattcttccttagctatattttatttgcttgcttacagagatgatttttgtctatttttcacatagttgatttagagaggcttaatcatatatcagtactggattgtaggacaacaaagatcttaaaaaccagtgacagtataatctacctgaggtctttgggcgcattgttttccttctattcctcgcccttgtctaagtcctctaataagtttcctcatttgagtgggttaagttatagtatgatatatatcagggtacaagtttgaggttgtctctgtgggatactctctccaaatgtcatcgtgtcatcaggagtaaaattgaagctgctaagatggtagtacatgaagtagaaaatgttctgcattttaaccgtggaagatcaacaacttaatctctgatactattgtttgttctagggaaatttccagtgcggggaaaaagtagacaggaaaatatatccctagattgatttctcaaaaatgcactaagtataatcccaatttttgctgaaagtctctttcaaggtacatattagaatattccaaacagttttgaatgtcatgatcctgaattttcataatcctgataaagtttctttgtttcatatttgttgtagctgaaataaggtagggattatgaggaattaagataaagctaagtcagggcaattttgggaatgtggtcacttaaacagtgccccttccctcttcactccctacttacgattcctctcctaaggaaaatggattcagggcccatgggcatctcggagcatacaaggccttagattgtaactggagactaagtagagagatttgatacagggcttgctttctcatgaactgagcaagtatctggaagacaggatcagagacctggggtgaggagcagaaatggttaatcctgagaagagcttagcctcagagatctgtggacgtctttgggggaaggtcagcaaatgacctctgtaggtacgctcatattccctgaccctcaagccaagaagtagctgaatagatgggctcacttcttgttggtgaggcttgggagaacacaagactcttccttagcctcagcagatgactggtagcctgtttgtttgtccactgctgctctgtaagtatagatacaatttcaacttctattacttgtagaactgtcatcacttaagctacttcagcagtcagatctgagtcccaaaaagctaatgaagaaaacaacacaccatttaagggtttccagcagccagagaaggatgagttagctgcaacacacgtgcgtaacagaacagagctactggggggaatgacagcaacttgaatacgtataaatgttaggtacttgggaaaattcaagaatagcacctcaacataaaactatggatctggcaaaaaagaaggcagtgcacctgcgtgggcctgggtctgggtgggggtgccgcgggtgcttcatgatgctgggctctctgggatggggggatggcagagggtgctgcaactacccacggaagaatgcagctgaaggcataggtttttggctttaacttctttgtgatgagaaggccacccttgagaaagctcataaaatgtagcacctctgcagaaatggtccttagttggagcctgcggctgctgggagatgcatcaacatcagtgaatggggtcctttgggtgggtccctgatgcctgcacactttttaggaccttctgatctacctggcaggggtcaactatacagccaccttcagaaagaggaagcttgctgctgtctaggccagatctcttggctcctggggaagatccaccagtgtcagcctcattgactctggagcggcagaagggagagtccctcttagcatggagctggtccctaaacttcagattgcctgggattcccatcacggtccagaagaagagacgagacctgaagaagctggcagctgtcatgcggcaagtgagacaatgggaaagccacccgcttcagaacattgaagaagccacctggcaccaactcactgtccaagctgagaagaaggaaccagggacccaaggagcttcagtttaatataaaaccaggagcaaacctccgaagtccaggcatctcagagaaatgctttttttgtgtaccatggttaccaaatacagagctagattttatttttgtaaatatttgcatctcctgctttatcaaaaagttttcttttttcttcctaaaaaccaaagaatgcttttatttccaactgcatcccttgctctgctgcttcctcgctcctcttcctagatgttgggcaggtgggctgggtcttctcagggatgcagatgaaagcttgttgctagagtggaataaaaaagggcagcccctgttcgaaatctcagactggattgaaaaacacaggacataatatagtctaagtccatctaggatcttctgttttaagagacaggtgtaaagatttactctcaaactgcaggatgggtggaaagtattccagatcaaggttccagttctccctgggagcacccacatttcttttaaggtttctagcagagatgtaatgatgaaattactcacaaaagggattagatgcaggctggtagttgcagttactgggttactataaatttcgtgtattgatgttctacatatgtggtaagaatttatttactgtgtagtatgtttaaacatttgtaagttttatgagctagttcctcctgtgtaagctgacaattcaagttgttcactgttttcctgtgacagttattatctggttataaaattatcagataaaaataagagaaggttattactttttcaaatacaacatgaaagtataaaaaagcagactttcctttgtaattgcataacattgagataaatacttcagagtaatttcatctgatacttattaaaaatcattttcatgacgattaaaaaaaaaagggttcccaaccctttggtagatcaattcagaccaaaattagtttcttgaaaattaagcacaataaatatttaaagcacaaagaaaaatattaggtaaagaaatcatgaagtacttagtaattttccaagtaga

SEQ ID NO: 112 - DNA, 17596 bp, Homo sapiens
  source 1..17596: mol_type = other DNA
attggtgggttcatgtttcccgtcccccgcccgcgggaagtgggggtgaaaagcggcccgacctgcttgcggtgtagtgggcggaccgcgcggctggaggtgtgaggatccgaacccaggggtggggggtggaggcggctcctgcgatcgaaggggacttgagactcaccggccgcacgccatgagggccctgtgggtgctgggcctctgctgcgtcctgctgaccttcggtgagtgattctggaggagcagacgtcccccctccacacacgcggccgcttctcgaaggtcctgggggcgttgaacgtgggaggggggatcccggggcctgcggtgggccaagggacgtcaccattcctcgaaagagggcaagggaattacgtttattctcttcttcctctggaaataaaaaaagagagcaacatcatctaactgccctacagatctaatagtatctcgcccggaggtctcagcgacctcggggtggggcctctctgaggctctggctcccccgggagctgtgcgagtccctcccccctccccgcccggaggactttttcggccaccgcaaccttcggccatcccagctttcccgtcccctaattccccagactccgactcctcgcaagcccgtgtcccttcttagatgctggcctcgggagcgtgaggcctggggccagcggaatggcagtgtcagcgtgtttgattcagttttgctggagttcggttcttaacatttctcccccttctcatgcctctgggctcaatttcagttcccctcgccagaggttgcataaatcctatttgcattctgacctgtgctaacgaaggccgaagttttggcttgatcagttgggaggccttggctcggcctgcgcgcaacacgtgtgggtgtagaagaggcctggtatcagtctgcttaacgttatttataaatgatcggagacacactgtttagaagtggtgactgcctccgtatttcaggatctactggagacttcagcatctgaacttaaatagatgttctgtcttggctttacctttggtatttaaaccagggaatgcactctttcatccccacctcccttagttaccaactgaattttgcaacccctacccttccctatttgatcatcctccttggagaagtgtgatgttgaagagtttgcccgtgttaaatcttcagggtcggtcagagctgacgatgaagttgatgtggatggtacagtagaagaggatctgggtaaaagtagagaaggatcaaggacggatgatgaagtagtacagaggtttgtgttcatttgaacttacgtatacagataagccgtgtgaaccttgtgagttacggtcacttcttatgtatctcttctccaaaggtccagataaagtctaacaccctgtatttaaatacccggtgagttgtgtgcatacatacctcctaacttgtccctaggagtgatgaaaactgagtgaattcctttgaaaactatattgcagaatactagcaccataaactttgtaagactttatagaagatactttcagttggatttgtattcattaactgtgtacaccgagtaagtttaaaaatgggatttctgtcagttgaacaatattttaaaatttggcctcttgggacttattgacagttttgaagtcctcactgtggagcataaatgagtatgactttgctttttagtagaggaaagttgggatttttttttttctggcaattttaagaaccgagtatttccagtgtaatgttaaaggtagcctactgctgtgctaacataatgagacggtatatcagttatattttataaaggtttccattttaacccccaagacaatattcagaggcccctgtgctttcatcataattcctctagttttgaagggaactatgccatgcaatatttgcttacctaactgatttccttagagaggaagaagctattcagttggatggattaaatgcatcacaaataagagaacttagagagaagtcggaaaagtttgccttccaagccgaagttaacagaatgatgaaacttatcatcaattcattgtataaaaataaagaggtaagcaacatgtggttagaatattttatctctgtatggtggcatacttgtttacttaaatttgcttaatttactgcaaaagtaatgtagtatccaagtaagtaggtaacaacctttaaatacctaatatgtccaagaattgctaccagatatctgggaagaaagggagtgtcagacattttccttttcctttacctctaaataggttcacggcctgataatagttgtgagtctaagggcagtcacataaactaaacttcttgcattgcatacctgaagatcactgttaggtgaataagagtgcttttataaggtacagagaagaaataaatgggtttggcataaaatcgaatatcttaatgcatcttgaggatagtctaagtgtattccctctggcttccatttagattttcctgagagaactgatttcaaatgcttctgatgctttagataagataaggctaatatcactgactgatgaaaatgctctttctggaaatgaggaactaacagtcaaaattaaggtaagtgtaaggcagtttttctttcttttaaaggaaaaggaatccttaaaggtagaggatccctatcagtcaagataggctagattattttgcagtggcaaaaaaaccccaagtctcagtggcttgaaagtcatcaaactatggccaaatctaacttgacttgtttttctaagtagttttattggaatgcagccatgcccatttgtttattatctgtgactgcttctgtgcttcaacagcagagtcaagttgttttaacagagaacataaatctcccaaagcctaaaatatttactgtgtggccctttacagaaaaagtttgccagcccctggcttaaatcattgatcacaggctgcctgtggtctttgctctgcctcatcctcaggctgggacagaggcgtgggcagccacctggagtgtgtagccggttgccatggtgcagagcaagcttagagggtctcatactattataattaaaggctcagcctgaaaacagagctctcctttacaactcattggccatttataactcattggccaaaactagtcacatggccttagccattcttaaatggaaagtagagtactcctaagtttctggaaggcagacagccaggaatattgagtgaagaatattaatgatccatcacagattccaaatagaggaatcattcaagttgttttgtattctagtaaagaaataggcaagacataaaattttatttttcttgaattgttttccttcaaaggtaacttgttttatttaggtcagcctctaacctttgacatttaggccagtctgcccatttgatattaatactttctcaaatacataaattactttaagatgtacactttcagaaaaggccataaaaaactatgtggaggaaaatatctcagtttagttttctgtattggaattgatgggacccaaagctggttagttcctcaatatttgtttggcataatgtaaatattaaatacaactatctggttcttgtcttgcatttagtgtgataaggagaagaacctgctgcatgtcacagacaccggtgtaggaatgaccagagaagagttggttaaaaaccttggtaccatagccaaatctgggacaagcgagtttttaaacaaaatgactgaagcacaggaagatggccagtcaacttctgaattgattggccagtttggtgtcggtttctattccgccttccttgtagcagataaggttattgtcacttcaaaacacaacaacgatacccagcacatctgggagtctgactccaatgaattttctgtaattgctgacccaagaggaaacactctaggacggggaacgacaattacgtgagtatgaccaattccttataagaattaatagtcatggtgaggatcttgactctccagttctattctctgagcaaatgacttattctgggccttaattttcctgccttataaaatgaggaaacagaactgttgtcacttgaagaaatgtttgaggacctgcaaagggccaggcacaaaggtttgtgattgctgttgtacatggagggtataaagtaggaaatagcagcagcttccccaagggagaaggcttcttgggtacccacagaggaggcactgcttggtcagtttcccaggttagaagagtaatttgtctgtggagcatcctgaataaaggcatggaggcatagcatgctcactagatgaacagagttcttttcggtggcagttatggatagaatgtgatgaacttttatttatttatttattttgagacggagtctcactcttgttgcccaggctggagtgcaatggcacaatcttggctcaccacaacctccgcttcctgggttcaagcaattctcctgcctcagcctcccaagtagctgggattacaggcatgtgccaccacgcccagctaattttgtatttttagtagagatggggtgtctccatgttggccaggctggtctcgaactcccgacctcacgtgatccacccacctcggcctcccaaagtgctgggattacaagcatgagctaccgtgcccagccagaatgtgatgaactttttaagattctcaaggtggtgtggaggatgtgaggagtggacaaggggagactctttgggggaaatattcctcttgaaaatattcaagatgagtggtagcaaccagggctggggctggcttgtagagataaagggcttaaagaaagttcatgaaagttgtgaaagctgtggaataaaatacgtcatttaaggatagttacaagtttttaaatttgaattaagatccctcttaagccagtaactgttgtttgtatgggtgagacagagccagtgccctacagtagctctcgttgcttatagcactgtgacgtagacagggcagctttttgcctttttaaaattttaccatcttggagatgaggaaattctatttcagaggtcagttggcttgccaactcctgctaagtgagtaacagaatgtgcccacagcttcaatttttttttcttaattcagttttaagttttcttaacattaagggaaagaagcacatacttatcattgtgaccaactttcttcatcctagaaagtaacatttcctgtttttactgcagcagatgttcttttaatgaagactaattagatgactgcattttagtacttttttaacttgtgttcccaatttaccttcccctgccttcgtcactaacattgatgtctccaggtttcatttggaggcatcactaagagttatgccccagtgccctctctttttaagcactgggctagatgttggagaaggatagggcaatcattcccaaggaaagatagaaagtgatgtcccaagagatgttaatgtcaggttgctaagaagcaggtgaaattatctggatataagctccatgaaggcaaacattttgttggaagctccattcccaaagcttaacacttaattggcagccatttgtatgaataagtgaggttaaacaggacagttccatgcagggaacgatggctgctaacacctatccaggacctagtttccatgaccatgcatatctttttaaaaatttcctttgcccacttcttaaatgttaacatacattttctccaagttaagtttcagcccttttctcattgtccatgtgatctttatgtagtcttatccactgccacggcctcaggttccatctctagttctcaaatttatattcttagcctagatcaggagttagcaaactttttcttaaaagagccagctagtagaaaaaaagataaaagaaaacaacaagaaagaaagagccagctagtaaatatttttagcttgtgagctatatggtctgtcacatgtcccaactctgtttagcttgaaagcaggcatagacaatacataaggatgtgtcccagccaagtgtggtggctcatccctataatcccagcacctcgggaggctgaggtgggaggatcacttgaacccaggagtttgaggtcagcctggacaacataatgggatcccatctccacaaaaataaaaaataaaaaattagcttggcacagtggtgcatgcctgtagtcccagctactcaggaggctgaggtaggaggattgcttgagcctggcaggtcaaggctgcagtgagccatcatcacgcctgggtgacagaggtccaaaaaaaaaaaaaaaaaaaaaagtgtcccaataaaatttctaatgggtgccagctgtacagctatagcttgccagccccttgtctaggtctcactactgggctctgtgttcatgtgtttaattgccttttaaatgcttctacctaagatatctaaccagcagcttctacttgcatccaaaactgaactcttaatccccaaatcactagaacatgtgctctgagaccaggggcctagtcactcactaggctttgtcatatcatggctacttattggccaggtaccactaaactaatgagccttttgagacagggagggaaccatagatagaccatttcccatacttaattgggaacacaagtatcaagatatggactacctactgtgcttaagagtaggttctaggccgggcacagtggctcacacctgtaatccccgcactgcccggtagaattttatataatagtagaaatgttctatatctgcacttttccattttggcgatcaccagccacatgtgactgttgagtacttggaatgtggcagcataactggaactgaactgtacattttatttaaataagtcacatgtgcccagtggctgccattttggatagtgcagatataaatataaaccagattaattttctagcttttttaaggaaaatgttttcattaattaggaatagttatctacaataatcattaggtttctggaataacagtaagagctatgagagtgcatgattccatttctctccagaatatttcagtgctttctcaccttgaaaaatgaaaacaatctattcagacggttgggaatattttaattttctacttaaaactaaggttattctccacttgaggtaatgtagaggagattcttctctttactgtatctacatgtgttacattttagctcacaaacccttgttggtgatggagagttaacatgaataattaggacatcttggattatactgaactgctggctattaccatggtatttaaatgaatttataatcagatcttctaaatgttaggtgtctctaaacatcgaatttttcttgcagccttgtcttaaaagaagaagcatctgattaccttgaattggatacaattaaaaatctcgtcaaaaaatattcacagttcataaactttcctatttatgtatggagcagcaaggtaaatctatattgattaaaaacttatatgtattaccttggcacgtatttaaatattcaacactaaaagaatgaaggcaggccggcgcggtggctcatgcttgtaatccccgcactttgggaggccgagacaggtggatcacctgaggtcaggagttcgagaccagcctggccaacatggcgaaaccctgtctctactaaaaatacaaaaatgttagctgggtgtgtggtagcacacgcctgtaatcccagctactcgggaggctgaagcaggagaattgcttgaacccgggagacggaggttgcagtgagccaagatcgccccactgcactccagcctaggtgacaaagcaagactctgtctcaaaaaaaaaaaaaaagaatgaaggcaaaatgtggtctattagttaaggatactctcagggttttcttacaaaaacctattttttgacctgtaatgttatatcatattctgtagacaaaatcagaattgttaaacaaatgagtttaaccataattctcttatttcaacagactgaaactgttgaggagcccatggaggaagaagaagcagccaaagaagagaaagaagaatctgatgatgaagctgcagtagaggaagaagaagaagaaaagaaaccaaagactaaaaaagtaagtctggtttatctccctgcataagatattgtttaacatgtataggcaaaaccaggaaaacctaagtatgcactggctgatttgaagtcagcttcagttcaggtgctaagtccatggagccagcttttaaaataaggcctttgtttgtatgttgaatacattgtcctgtagaaagttttaagtatcaaacccaggtcatttttatgaagagttttctaacttttatatattgcctaggactggtggcttatatgtttggaattttaaaatcttaaaaagccttctgagtcctcttttgtctttttatcatgcagagattaaccataaaaatggttctctggcttgcttaggtagcagactaagaagtattgatcatggtggttgagaaatatttttgtaaaatgttggatttctttaagtcatgaaatgggaatatataatatgtatttccttctaacctcaaaacaaatattttcaagaaacatttttgctagttaaaaaataacaatgaagaaaaacttaagtggcttttcatcagttaacaattgtctttttgaattaaatattgagaaaaatactttgcttttgatacagttggcagaaaccttactagataacaggtatcctttggtgccctttttttttttttctttaatttggagacagagtctctgccacccaggctggagtgtggtagcacgatcatagctcccttcatccttgaactcctaggcttaagcagtcctttcacctcagcctcccaagtagctaggaccacagacacacgccaccatgactggctaagttttaaaaattttttgtatagttggaggtcttgctatgttgcctggactggtcttgaactcctaggctcaaacagttctcctaccctaacctcccaaagtgctaggattacaggcgtgagccaccacaccagtcctctgggtctttacatagtcttttgaaatctactgaagccatggttactgctaggataaccttggtgagtgctgagagagactaatcaaatactataataacttcaggttgaaaaaactgtctgggactgggaacttatgaatgatatcaaaccaatatggcagagaccatcaaaagaagtagaagaagatgaatacaaagctttctacaaatcattttcaaaggtaaatatttataattccctagtttctggttattaatgaatagacaaaatatcaccctcttagtttaattgtatatggtatgtgaccatgaatatgagatggtccattcccattttttcccagtgagaaaattcaaaaaaagacctttaggccaactataatatgtctacttctggtttattgacctagtcacaattaaaatcacatttatgaacctttgagattgacacctcagtagagatggtctttgagagtaattggtttccagaacacaccatttttacttaagttgaattattatactcatcactacttcaaaattgcagcagttattaaaattagtcctagctcttagtgaatagtgaaactacaaaatcaagaatgtttgaaacagttttatggctgtttaaacacaattggtttcctttttattcctgtgtattttgtaatatgtgatttttttaaaaaaattattttgagaaggcatctgtagccttcaccagcttgccaagggttttgtgtgacaaaaaaagattaagaaccacctacataggtagatgtgtgatttccaccacaaaacccgtaaaacatgaaatcatgttgttaagtggcttttaatataatctttaaagagcttgcttatgacatcaaacacttattgtgagatcctatgcctgggaataattactaaatttatgtttccttgcctgtttttttttttcttcttcttttattgatcccttcttgtaactcttaaggatgcaaaactagcattgataaagtttgtttaaagttaatgtttccccagcagcatttagtacaagcagtagaatgctctagtggacttaaccatagctaaataaaacttaatattctgtgtctgtatttgttcttttctctattccatatcctttaaatttcaactcttaaaacactgttggttctgccttcacttttatttccataaactctaaagtcctagtgtctataaacttacttcatataaagcagctgtattagaaatataattaatgtgagccacacatgatttgaaattttttagaagccatacaaaaaaaggaaccatgaaatgttaatagtataatttatttaacccagcataccccaaatagtattatttcaacataatcaatataaaaactaataatgagacattttatatcctttttaaaatttgtactgtgccttcaaaatgtattttacactttaatagcacatctgaatttgaactagctacatttcagtgcttaacagccatatacagtaatagataatgcagatcaagagaatttccaactttgttttacaggtatttacatacatctttgtagccactcttagagctaagttccatggaagaaacatgttcttgagtacttactgtagttcaagggcacactgaagtgttgtatgtaattttgtcatttaggcagggtggtggttttcctattcacttctctcatacgtaagaagtataaactcatccttccttctgagagtttaggaaataatgttattgacaatcatcatcaaaacaaccatgtctagtgaattagaattgcaattctagatatttcttcactccacccttttctttctcttccccccacccttttctttctcttccccacctcccgccagtaaaggaaaattttttgttagttaattgctaaactgaatatgtaccacatagtacattgcttagttcttgcactgcttttctcctgtgtcgtttgaatgactaagataccaactttccacaggaaagtgatgaccccatggcttatattcactttactgctgaaggggaagttaccttcaaatcaattttatttgtacccacatctgctccacgtggtctgtttgacgaatatggatctaaaaagagcgattacattaaggtgagtttttaagtagtacatgctgcgtttaaaatttgaaagtttaatttccagaaagtgacttttttttggtctctttagctctatgtgcgccgtgtattcatcacagacgacttccatgatatgatgcctaaatacctcaattttgtcaagggtgtggtaagtatctgaagtttgggagaaggggtgattgttgtgggggtctggcagtgtagagtgtttgtttggctttgctttcttccagtggttttattgctcactgaactttcttttgccatctgaaggtggactcagatgatctccccttgaatgtttcccgcgagactcttcagcaacataaactgcttaaggtaagtgtctctgggaagaaactctccactttgctgtttgattggggttcagaggacaggctccatttgtggagtaaaaccagattttgggtctggtccatgattcttcagatgaatttcctttctttctggagttatcagatcctaagaatctgattctttttctcccaacatttaataatgaagtttcaaacatctagaaaaaaattaaagaattgtacaggtccaggattaacattttgtcatctagacacatagccacctttttatcaagcctttcattaaacctttcccctccaatacttccataattagaagactctttagtttttgaatttaaaagtatttgaaagtagcatatttgttcacttcatttagatgctagagagagagtatcactgagtcctaaggttagaatataaacattaaggcaatcttgtggctatttgcacggacagctgaatttcagcccaatctgaatgaattggagtgcttcaccatttcctgcccctcaataaatggcaataacgatatcgtctttgtgtttttcacactcctgcctgggtaccttacattctcaaaagttggagattaacttctctaatcagttattctttcattgtgtttaggtgattaggaagaagcttgttcgtaaaacgctggacatgatcaagaagattgctgatgataaatacaatgatactttttggaaagaatttggtaccaacatcaagcttggtgtgattgaagaccactcgaatcgaacacgtcttgctaaacttcttaggttccagtcttctcatcatccaactgacattactagcctagaccagtatgtggaaagaatgaaggaaaaacaagacaaaatctacttcatggctgggtccagcagaaaagaggtgagatgaactcataagtgttgtcagccattctggaaggtagctagggatttatagccaactcttgagggggagaaaaggaaaacttaattgtgtaactggagtagttataaggcctggtcagtcactgacaggaaggtcatttatattctctgaacctcttaattcttcacctgtaaaatggagtttttaataatgtataaacatagcagctgctaggataaacaaatacaccagggccagacttggaaaactttgtgacttcttaattttgtaggctgaatcttctccatttgttgagcgacttctgaaaaagggctatgaagttatttacctcacagaacctgtggatgaatactgtattcaggcccttcccgaatttgatgggaagaggttccagaatgttgccaaggaaggagtgaagttcgatgaaagtgagaaaactaaggagagtcgtgaagcagttgagaaagaatttgagcctctgctgaattggatgaaagataaagcccttaaggacaaggtactgtggaaattacaaattgtggaaatattagtatcagcatttaagagaaagttattttgtgaacaaattaagctgcagctggttactttgtaaccattagaatggtaaaaatttaattaatgtaattaaattattgggagaaagcttaaaactttcgacaatactgctttgttaataacttgttacaaattaaattttatgtttttaaaaggtggtatttaaacttctgactagaaaattcagattatcaagtaagtgcccctacaaattctcctaaaccttaagaaaagctatttttatgacctgcttctgtgtttatgatcttaagtgataaagtcttagacagttgaaagacaattgctcaatgaccttacctgttgatattaatttatatgacttgatttctttccctaagattgaaaaggctgtggtgtctcagcgcctgacagaatctccgtgtgctttggtggccagccagtacggatggtctggcaacatggagagaatcatgaaagcacaagcgtaccaaacgggcaaggacatctctacaaagtaagcatcctcgggaaagtccctgccagggcgttgccccttacccaatctttgttttggagataataccagcttcaatacaaagagtaaaattgccttaaatgtctaccactgtctactataaggtagacaacaagtttacgaagggatttctcctacatttgattgagaaagaaaaggtctttgactcatgattttctgattttattgtatttgatatgtaaatgggaattttcttaatgtgttatgcatagtctttacttttgcattggattatatgcttagcctaatatctgaatttattttacatttttaaatgtaatagctgcacgaggttaatgacaacattcctcaagtgagttaagtccatttcaaatcacgtcccccacacccccaagcattaaattatgggtatccagatagaatgtctcataaagtagacggtacaggacctgtgaattaacagtatttgaactcaagggcctatacctggaggtatagtgagtctttggtactctttattttcaagaaatatagtatttcaagtttatgttttaatgtcacagcaatgatcttgaaaatgacttctcccctacttttattctctcttctttcacctggagtatgtttctgatatgctatctagtcatcatccttttttcccaaggcctagcttaaggattctttttttttttcccccgagacagagtcttgctctgtcacccaggctggagtacagtggcgcaatctctgctcactgcaacctccgcctcctgggttcaagtaattctcctgtcttagcctcctgagtagctgggattacaggcacctgtcagcacacccgctaatttttgtatttttagtagagacggtgtttcaccatgttggccaggctggtctcgaactcctgacctcatgatccgccctctgcggcctcccaaagtgctgggattacaggcgtgggccactgcgcctggccaggattattattcttaaagccttttctcacaaatgtagtctccattgttgtcacaattctaaaattccatatatgtcttttaactataaatttcatgcagagaatagtgttctgtttatctgatatcccattgcaatagtacaagggccatttaaaacatgtccacctattaatttcaggaaatgattaataggaagttaccttgcatccaacaaacatgaagacttactatgtccatgcactgatggtcacaggtagacataactcctgtcttttctaacatttagactagtgaaaatgacaaatcaaagccaggcatggtgactcactcctgttgtcactcaggaggctgatgcaggagtatcagttgattccaagagttcgaggctgtagtgtgctgtaatggcattgcactctagctctagcctgggtaacatagccagactccgtctcttttttatttaaaaaagaggaaaaaaagcaagtcataatccgagccctacatagataatgggtacaccaggatagggaaggatgtggttcctccctgtcctcagagctttaaactagagaagagagaataatcacaaccaacagtaaaaagctaaggattttgaaggtatattcaaaatgcatttggaactgagctcagataaagttaatttttcttggaatcattggcgaaggcatcgtggagaaggtattattattggagcacaatccagaggctacatagatttttctgaacttggggaggcagagctacaattacggtagtaagaataaactaagagggaacaaacaggacattaaatcagttcgtctgttcagcagtgctccaggtacttgggactcatcagtaaataaaatagttcccttcatttcatttttcatctaaccgtgtccacttgctccccaccccacctccccgttaaaagggagcaatacaggctgggcacatggctcacgtgtgtaatctcaacactttgggaggctgaggtgagaggatcacttgaggccaagagttcaagactagcctgtgcaatatagtgataccctgtctctataaaaactaaataaggaaacagtgcagtcatccctttttgtccatggggtgttggttccagaacatcccatggataccaaaatccacacatagtcaagtcccttaggtaaagtcgtgccgtatttgcatataacctatgcacatcttcccatgtactttaaataatctatagattacttttaatacctaatgcaatttaagtgctatgtaaatagctattatactgtattgggttttttatttttttcttgttttgccctttctaatattttcaatccgaggttgattgactctgcagataaagtagactggaaaagtacagtcgtccttaggtgtatgagggagattggttctaggacccctgccaaaatccacaaatattctagtcccccagtctgccctgtggaacccgtgtatatgaagagtgggagctctgtgtgtgtggattccacatcccaagaatacggtattttctatctgagtttggttgctgaacctgcacatacggagggcggactgtatttattggaaaaaaaatagcatataagttcaaacctgtggtgttcaagtgtcaatagtacattttgattttttttttttaccaagagttgttctgtgtaattatgaaagaataagggaaacgtatgaaccctaaaattggatatgttttgttaatgttcatttttatctcttaacagttactatgcgagtcagaagaaaacatttgaaattaatcccagacacccgctgatcagagacatgcttcgacgaattaaggtagtattaaagcagtcctcttgcttgtcttttaatttgagtactttgtatcttttaatattaatctagtgcatcttcttgcatttcaggaagatgaagatgataaaacagttttggatcttgctgtggttttgtttgaaacagcaacgcttcggtcagggtatcttttaccagacactaaagcatatggagatagaatagaaagaatgcttcgcctcagtttgaacattgaccctgatgcaaaggtttgtatccccaaccttcccgcaaaggctggctggctttctttgtttctgttctttcagaataggcctctcatgattgagggatgtagctttgcgacatttgcctaatttctaccttttgaaagaattttattgaatgtttgaatccctgtagtgtcaggcactgcactagaaactaagtcctccttttacgtcctctttcctttttgcctgcctccttttgttagcttggctgttcattctagttaagaggatttagtctgtggttctgaataaacagaagtgacattaattatgattttatacatataaatgagcaaagtggaaataaatccaaggcattaatgggcccataaatgttgtgtttaggtggaagaagagcccgaagaagaacctgaagagacagcagaagacacaacagaagacacagagcaagacgaagatgaagaaatggatgtgggaacagatgaagaagaagaaacagcaaaggtatggcaaatcaagaatgtgacttgcattttcagttctggcaaagttaggacagagttttagttctggcaaagttaagactgtgtaacttacagaagtcagactgagcatttaaattgtttatttcatgcacaaacctgtgagctaggttttttttctgctaacttttaataccttctgggttttttttatttatttacaggaatctacagctgaaaaagatgaattgtaaattatactctcaccatttggatcctgtgtggagagggaatgtgaaatttacatcatttctttttgggagagacttgttttggatgccccctaatccccttctcccctgcactgtaaaatgtgggattatgggtcacaggaaaaagtgggttttttagttgaattttttttaacattcctcatgaatgtaaatttgtactatttaactgactattcttgatgtaaaatcttgtcatgtgtataaaaataaaaaagatcccaaatactca

SEQ ID NO: 113 - DNA, 32742 bp, Homo sapiens
  source 1..32742: mol_type = other DNA
gggggcggggctaagccttccctcacaaggggcctgtggtcaacgcgatttgcttccaagggacggccaccagtcggcacaggaaaggggcagaggcagtgagttcagcgtgtggacgagggtcaacaagtttgggatcaagcggctgccgctcctccaaaagcgaccgaagcgcgagcagattacccctccgagccagtgtagtaaacacacttcagaaacgtgaggtgccggtggtcacgaggggagcgcgccctccaatgaggagccgggggcggggccgaggccgctgacgcggcggcggcggcagagtcacccgggcagcctcgggaccggtcaccggccggcaaccgtccagcggcctcgaccaccgcctctagcctccgttcccggtcctttctcccgggccgagagacagcgtcgccgacaggggctcattcccctccggttctcctcggtgactcacctcgggcgggccgttttgtctttaggggccgccttggtggggcgaggtttccgtgacgaatctcctggggccgtccgtgccggctcgggccgtcgtggcggctcgagctcctggaacttgctcaggctccggaggtccgaggccctcgaagttatgcgtcgcctccaggcggttgcggcgggcgcgggctcctaaagggcgtcacacccggactccgccgactaggcaacctccattcatctttccactgcgcctccggcgcccccgccttctccggtcccctcctcggagtcattttttcctgttccccctctgccgccctttcctcacgccccgggtgaggcaattctcttggaagcgaaggtgtcggctatgagccggagcctccttccttgaatttctccgtggaggacccgccgcgccccccggcatgggggtgaacgccgtgcactggttccgaaaggggctccggctccacgacaaccccgccctgaaggagtgcattcagggcgccgacaccatccgctgcgtctacatcctggacccctggttcgccggctcctccaatgtgggcatcaacaggtggcggtgagtcacaagcccgtgggaaatggatttgggtgtttaatgagtctgatgttaatgaattccatgcgatccgccaaatctgtgaatttagacgtgggactgtcttgcttataccgcttacgaattttaggtgccctaagtattaaatagaattgacttaatacttctctggccaaagagtactgacgacctgaaacactcggtcttcatcagtgagttatgtgtctttctgtgctaactggagctcctcccctgaatttgtggagaattcttagtgctggagttaaagaaacacctttcctgtccttagtggccattgtatatggattcccttggcctttttgtggcattcggaaggattgtgatgtttcctgtttacgtttgtgtctaggtaactcatagtatggagaaaaatcattcattcagtacagcaggctccagatccagtgttcttccaccttgaggttactgtgggaaaagcaagggaaacagcattatctggtttctctgctcggttctttttctcaactcctccttgtggttgccgagacaaagcacagtttttctttctaggcaagttgtagtccttctagggatcagagcactgaaagaaatcttagagatgctttatgatcttttcctgaaacaccaggctacatgattgttaggccccctggtggaaataaaagcatagctcaacagatagactcttgatcacttagcatgtgccaggcactgatttaaatgctagggatatagcagtgagtgaaagacagaaagtcatgtcttcaagcagaaagtaaaatatgtagtattttaggtggtgataagtattgtggaaaaaaatagagcagagtaaagggataaagaatacaagggtagggatggggttgcaattttaagtatgatcgggggaaaagtcacagagaaggtgacacttgagcagacctgaaggaggtggtgggatgcagatatctaagggaagaccattccaggcaaagggaagagtaagggaaaaggcagaaatatgcttgacctttggaaggaacagcagaagaatccagtatgtctggagcagaataagtgagggaaaaatagtagacgatgaggtcagagttgacttagggccagattgaagagagccttataagcagttttcaagatttgggtttttacttagtgaaatgggaataactgcaggattatgagcagagaagtaatgtgatctgacataagtttggaaaagaatttttctgcttgtggttctgaattggggagtggaggtggacaagaagcaggaagtccaattaagaagctgttggcattcatccaggtgagagatgataacggcttgaatcatagtaataatcgtggacgtggtgagaaataaacagatgctggttatattctgaaggcaaaatacagggtatttgttggcagattggatatgtagtgagagagaaagaaaaggagttaggctgggcgcggtggctcatccctgtaatcccagcactttgggaggctgaggccaggagttcgagaccagcctggccatcgtggcaaaaccctgtctctattaatactgaaaatataaaaattaggtgagcatggtggcgcatgcctgttatctcagccactcaggaggctgaggcacgagaatcgcatgaacctaggagacggaggttgcagtgagctgagatcgtgccactgcactccagcctgagtgacagagtactctgtcgcaagaaaaaaaaaaaaggacttatagtttggtgctatataaaaagcaccaaaattcagtgctttttatatagtagcagtttagttactgtttgagaaaatttttggcttgagaaactggaaggatggggctacactttgctaagaaagtgaagccagctggagaagccattgggagggtgattggagttctctttcattaagtcattaagtttgagatgtattttacacattcaaatggagatagcaaataggcagttggatgtatctggagctcaagacagagatccaggcaggaagtataaattggagaattcattagtttatagataatatataaagccatttattcatccaaccatttattgaacaaatatttgtcaagcacctactatatgccaggcactgttttaggtgctagagatccagtataaacaaaacagcccccaattctcaccctgttggagctacattctagtggagccgtgagactgacagcattaataaaatgagatagacaagagatgcaaatggtgcaagggctgaaccttgaatactcttaatgtttataaattgtggagctgtgaaagaaccagcatatgagactgcgaaggagccactagtaatgtaagaagaaaacccagaagagtatggtgtcttagaagccaagtaaagaaagtattttggtcaggcatgtaatcccagcactttgggaggctgaggcaggcagatcacttgaggcccggagtttgagaccagcctggccaatatggcaaaaccccgtctctagtaaaaaacacaaaaaaattagataggcgtatggcacatgcctgtaatcccagctactcgaggaggctgaggcaggagaatcgattgaacccaggaggcagaggttgcagtgaggcgagatcgtgccactgcactccagcctgggcaacagagccagactctgtctcaaaaaaaaaaagaaaaagaaaaaaaagaaagaaggaaaatatttcaaggaagagtgttttacttacgtcagatgctaccgataggtcaagaggagaactgaaaaataaaaattggatttagcaattttaggtcatttggaattttatctggagtggttttggtagtgtcagaggcaaaagtctttttggaatcactcatagtaccaaattcagtgctttttatatagtagtagctcaattattgtttgttgaatatagtgatatcttggagtcaataattttatatttaaacagctttattaatttacttattgactatgggataatgcccaaattccttagcctggcaagatctaccttttggcttatgtatttcattttctgctgtttacaatatgtgatttcaactccagggggaaaaccctcttagttttctttagaagctatcttgtattttcttcggtcaacactttttagacttttggatttaacagaaaagcaaaattttaaatagtattctacctaataagcacattaacaaaaccactttttgatattgccatcctttcatttaaaaaggatgttttatatttaaaaaaaaaaagtttggcagagctcaatgtctcatgcctgcaatcccagctactcaggaggctgaggcaggagaatcacttgagcccaggagttggaagctgcaatgagctatgaatgggctactgcactccagcctgggtacacagagagaccctatctcttaaaaaacaaacaaacaaacaacaacaacaaaaaatttgaaggacattgtctcagaataacatgtttttgatttgggtaaatttacaagctttatgaaaatttgcatctcttagaaaaattatcctatacaaaaacttatacactaacattcacagaagcattattcataatagccaaaaggtgggaacaacccaaatggccatcagttgatgaatgggtaaacaaaatatggtatatccatataatggaatattatttggccataaaaaggaatgaagtactgatatacgctacatgtatgaatgaaccttaaaaacaaactaaacgaaagaagccagtcacaaaattccatgtgttatatgattctgtttatatggaatgtccacagtgggcaaatgtatagagagaggaagcagactagtggctccttaggactggggaagctagggagttgggaggtgatagctaaggggcacaaggtttctttttgagatgatgaaactgttctagaaggtgatggatgattgtacaactctgtgcttgtctgggatgattagcagtattctgaactcttgcaccactttttgctgttgctcctcacatcactcttagcatttgctgccctcatttgtgaatgttagtattgttttattaatagtttgtttgagctgctataacaaaatacctttagactaggtagtttataaacaacaggaatttatttctcacagttttggaagatgtccagaatcaaggcaccagcagattcagtgtctctgctgaatagacgatgctttctctgtctcctcacatggcagaaggggtaaacaagttcctgcagccctttttataagagcactcccttagtctgtttgtgttattataaagggatacctgagggtgggtaatttataaagaaaagaggtttacttggttcatagttttgcaggctttactagaagcatggcttcagcctctggttctggtgaggacctcagaaagcttttaatcatgatggaaggggaagtggagctgacatatcacatggcgagagagagaggggagggataccagtctctttttaataattaattgttctgttaattaatagagtgagaagtcactcattacgtgatagcaccaagccattcatgagggatcttatctcatgttccaaacacctctcacctccaacattggggataacattttaacatgagatttgaaaaggacaaatatctaaactatatcactccacttctagccccccaaatatcttgtcttatttatttattatttttatttttatttttgagacggggtatcactctgttgcccaggctggagtgcagaggcgtgatcatggctcactgtagcctcaaccacctgggctcaagcagttgtcccacctcagcctcccaagtagctgggaccacaggcatgcattaccatggccaggtaattttttttattacttgtagaggtgagatctcactaagctgtctcatactcccgggctaaagcaattctcctgcctcagcctctgaaagtgctgggattataggtgtaagccaccatgcccaccctcttttttctattgtaagatataatcatctctttcaaagtccccagaaatcttaactagtttcaacatcaactcaaagtctaaaatcttatccgagactcaaggcagattccttatagctatgaacctgtaagatcaaaaacaagttatctacttttaagatacaatggtggaacagacattgggtaaatattttcattttaaaagggacaaattgaccaacaaaaagggacccacccaagtctgaaacctacaagggcagacattaaatcttaaagctgtaaaataatctcgcttgactcttgtcccataactgagcacactggtccaagaggtgggctcttgaagccttgggcagccccatctctatggcttggttgggcacagaccacatggcttctttcatggattggagtctaatgtctgtcacttctccaggctgagggtgtgtgctgttttcatccaaaggattcttttaatctttccacttcctcactttccactccctcccacatcctgagcacactggtccaagaggtgagctctcaaaaccttgggcagctgcatctctatggcttggttgggcatagcccacatggctgctctcatggattggagtctaatgtctgtcacttttccaggctgagggtgtatgctgtttacatccaaaggatacttttaatctttccactccctgacttttcttttccttttctttttttcttttctcttttcttttcctttctttctttttctttctttctttgtttctttctttttctttttcttaacagtatttaacacatttgaccacacctttctcttcttctcttggctttagttagactgccaccactgtgggtcctggagggcagtgcccctgttcccgctgctctacagtgagttctctgtggggactgtaaccccatatttccccttggcaccagcctagtagaatctctctgtaggagctctgctgtggcaggcttctgcctggacagccagacttcttgacatatcttgtgaaatctaggtggaagctgccaaacctccatggatcttgtattctgtatacctgcagacttaacaccacttggaaaccatcaaggcctatggtttgcacccactggagtggcagtccagacagtacctggggccttttgagccctggctgcagccagagcagccagaacgtggggagtagcatctcaagaccgcacaaggcagcaacaccctgggcctggcctcccaaaccattttgcccgaggaggcctctgagcctgtgatggaaggggtagccttgatttctggaatgtcttgggggcttttccccattgtcttgactgttaacaactggctctcttttattcatgttaattgctttaacaacctgttctgtcagggcctggtacctggggctaggtagtttggatttctctcctgaaaacttccctctaccacatggttaggttgtaaatttttcaaatttgtatgctctgtttttctcttaattattagctttaactttgtcttttttttgaactcccatatctgatagtaggctgttagaagcagccatgtcaccttttgaacgctttgttgtttagaaacttttttttgccaggtagcttaagtcattactcttaagttcagccttttacaaagtcctaggcatggatacaatgtagccaagttttttgttaacaagcataacatataatgtggccatttttttgttttagtttttaaaaattttatttgagatctcatgaacgtggcctttactgtctatattttaatcagcatttttatcacaacctcttaaccagtctctaaaaagttttaaagtttttcttgtgtatgaggttttttgtttttgttttgttttgttttgagttctctaagctcttgtaagcagctttagtttttgctttttttttaatactttaagttctgggatacatgtacagaacctgcaggtttgttacgtaggtatacatgtgccatggtggttttgctgcacccatcaacctgtcatctaggttttaagccccacatgcattaggtatttgtcctaatggtctccatccccttgcccctcaacccctggcaggccccggtatgtgctgttcccctccccgtgtccatgtgttctcattgttcaactcctacttatggagaacatgcgatgtttggttttctgttcctatgttagtttgctgagaatgatgctttccagcttcatccatgtccctgcaaaggacatgaactcattcttttttatggctgcttcatattccacagtgtatatgtgccagattttctttatccagtctatcattgatgggcatttgggttggttccaagtctttgctattgtgaacagtgccacaataaacatacatgtgcctgtgtcattatagtagaatgatttataatcctttgggtatatacccagtaatgggattgctgggtcaaatgatatttctgtttgtagatccttgaggaatcaccacactgtcttccataatggttgacctaatttacactcccaccaacagtgtaaaagcgttcctatttcttcacatcctctccagcatctgttgtttcctgacttttaataatcgctgttctaactggcatgaaatggtatctcattgtggttttgatttgcatttctctaatgaccagtgatgatgagcttttttttcatgttttttggccacataaatgtcttttgagaagtgtctgttcatatccttcacccactttttgatgggtttttttttttttgtaaatttgtttaagttccttgtagattttagatattagacctttgtcagatggatagattgcaaaaattttctcccattctataggttgtctgttcactctgatgatggtttctttcactgtgcagaaactctttagtttaattagatcccatttgtcaagtttggcttttgttgccattgcttttggtgttttagtcatgaagtctttgcccatgcctatgtcctgaatggtattgcctaggttttcttctagggtttttatggttttaggttttacatgtaagtctttaattcgtcttgagtgaatttttgtatacagtgtaaggaaggggtccagtttcagttttctgcatatggctagccagttttcccagcaccatttattaaatagggaatcctttccccatttcttgtttttgtcaagatcagatggttgtaggtgtgtggtgttatttctgaggcctctgttctgttccactggtctatgtatctgttttggtaccagtaccatgctattttggttactgtagccttgtagtatagtttgaagtcaggtagcatgatgcttccagctttgttctttttgcttaggattgtcttggctatacaggctctttttttggttccatatgaaatttaaagtagttgtttctagttctgtgaagaaagtcaatggtaacttgatgggaatagcattgaatctattaattactttgggcagtatggccattttcatgatgctgattcttcctatccatgagcatggaatgtttttccatttgtttgtgtcctctcttatttctttgagcagtggtttgtagttctccttgaagaggtccttcacatcccttgtaagttggattcctaggtattttattttctttgtagcagttgtgaatgggagttcattcgtgacttgactctctattattggtgtataggaatgcttgtgatttttgctgattgattttgtatcccgagactttgctgaagttgcttatcagcttaaggagttttggggctgaggcaatggaattttctaaatatacaatcatgtcatctgcaaacaaagacaatttgactttctttctatttgaataccctttatttctttctcttgcctgattgccctggccagaatttccaatactatgttgaataggagtggtgagagagggcatccttgttttgtgccagttttcaatgggaatgcttccagcttttgcccattcagtatgatattggctatgggtttgtcataaatagctcttattattctgagtaacgttccatcaatacctagtttattgagagtttttagcatgaagcggtgttgaattttgtccaaggccttttctgcatctattgagataattgtgtggtttttgtcattggttctgtttatatgatggattacatttattgatttgcatatggtgaaccagccttacatcccagggatgaagctgccttgatcgtgtggataagctttttgatgtgctgctagattcggtttgccagtattttattgagtattttcatattgatgttcattggggatattgacctgaaattttctttttttgttgtgtctgccaggttttggtatcagaatgatgttggcctcatataaaatgagttagggagcagtccgtctttttcttttgtttggaataatttcagaaggaatggtaccagctcctctttgtacctctggtagaatttggctgtgaatccatctagtcctgggctttttttggttggtaggctactaattactgcctcaatttcagaacttgttattggtgtattcagggatgtgacttcttcctggtttagtcttgggagagtgtatgtgtccaggaatttatccatttcttctagattttttagtttatttgcatagaggtgtttatagtattctctgatagtagtttgtacttctgagggatcagtggtgatatccctttatcattttttattgtgtctatctgattcttctctcttttatttattagtctgtctagcagtctatcaattttgttaatcttttcaaaaaaccagctcctggattcattgatttttttgaagggtttttcgtgtctctgtctccttcagttttgctccgatcttagttatttcttgtcttctgctagcttttgaatttgtttgcttttgcttctgtagttcttttaattgtgatgttagggtgtcgattttagatctttcttgctttctgatatggacatttagtgctataaatttccctcttaacactgctttagctgtgtcccagagattctggtatgttatctctttgttctcattggtgtcaaagaacttacttacttctgccttaatttctttatttacccagtagtcactcaggagcagattgttcagtttccatgtagttgtgtggttttgagtgagtttcttaatcctgaattcgaatttgattgcactgtggtctgagagactgtttgttatgatttccgttatttgcatttgctgaggagtgttttacttccaattattggtcaattttagaataagtgctatgtggtgtgagaagaatgtatattctgttgatttggggtagagagttctgtagatgtctactaggtctgcttggtccggagttgagttcaagtcctgaatatccttcttaattttctgtctcattgatctaatattgacagtggggtgttaaagtctcccactattattgtgtgggagtctaagtctctttgtaggtctccgagaacttgctttatgaatctgggtgctcttgttttgggtgcatatatatatttaagataatttgctcttcttgttacattgatccatttaccattgtgtaatgcccttctttgtctttttttatcttttttggtttaaagtctgttttatcagagactaggattgcaacccctaagcagctttagttttaaagctgcttttatgtttttagatatctttatagcaacaccccattcctggtaccagttttttgtgtttgtctgtccccatgactcagatacctcttgctaggctccatctgcagtattagagatcaagttttaacatgggatttgaaggggacaaatatgtaaactatatcaggcactaatccctctcatgacagtacaatgcatatgaccaaataacttcctaaatgccccacctcttaatactgtagcattgaggattaggttttaacatgaattttgggggaacatagacattcagaccatagcagggatgtattctgtatataatctctctctcacttaacagatagtaccttcctgaagagaagttgcctcttaaatcaaaagtttattttgtgtccctatccattataggcagtattattgatgctgggtatacagtattgaataaaacagaaaaagttgctgccctattccagtggggggaaaacggacagtaagacaaaaataatgtatcaggtggtggtaaattcaatggagagaaataaagcagaatgtgagaacagggacctaaaggaagaggaaacaggctatacatgtatctggggaaagagcctttttgtgttctccacagcatagtggcttatacatagtaggcattaaatattgttttaatttttcttataaatctaaggttgagggataggacagctactttatataatttatatgttaatgtctatcttaaactcataacttaaaaaaaattctcaatgaacagatttgttttagaatttaaacttcaacatgttcattacacatttgaagctatgacttgtaagctctcttaattttcagtaaccaaatctataaatgtgcctacatccttactagttcttccttctagtatacaacttcagtggaagagatactgctgtctcttttcaaaacgagtttcttcttctgtgctccatttcaaagactttgctcattttttatatttattcttaccttttcttctactttttcttctttttaggttgcctccaatcaacatttaaacatgcttaagatcaaattctgtaaaacatacacaacctgtaacaacaaaggaacagaacttagcattaactgtgttccactcctgcaactatgtatctcagtttctttgtagccaatttcttgagcaagatgtctaatagtggctgacttcatttctttatattctacttacccttgaacccaatccaaactaaggcatgtccggcttcactcccacccactctaccaaaactatttttatccaaaggatactttaaatctgcccattccctgacttttttctttttttcttttttatttttttttaacaatgtttgacacatttgaccacaccttcctcttcttcccttggctttattaaaggactcttctgtgctttcctgccagcgctattagtgttcttccttagcttctccttttctgttcaacctttaaatgcccctgaggtctgtgatctccaccctcttttcatttcacatatttctaggcaatcttatctcctctcataaagtccgttaccatttactcgtctatgcccagaattctcaagttagtgtcttcagcgcaaatctctttcctgatccccggacgtgtgtgtgtgtttgtatgtatcatatatacccatttgcctgcttgaatatatgacattacctcaaactcagcttgtccaaaacagagttcatcttcatccttctctattgcacaaaaacaaacaaaccccaaactgagttttcctgtgttttctgtcttcacaaatgatacttccatttgcccatttgagtccttactgtgtgccaattacttgctaatttctgtggatagcatgatagtcaacaggtaatttctctgccctcagggagtttatagtacagaggaagatttattcagaaataaaatagttacataaatacattcttccctctccattgtctctttagcccatatcaccattctctttgcctaggttgtttgggtagcttacaaatcattgtcccccttgcccttctctaattcattcgctacacagcaagtagagtgatctttttaaaattgcaaatctggtcatgtcatttatgctttaaaaccttttaatgacatttctttacccttaggttaaagttcaaaaagccatagcatggtttcaaatccttgtgtaatctggccctctgcttctttctagtctctggtgattatttcactgaggcagttaaactgaaacttgaagtgtaaagtggatcttaataagcaaggcatggagggaagggaattccaagcagagagaagcaaattccagactgaaagaatagcttaaggaaaggcacagtattctgatagtggtgaggaggctgatgtagctgagtcatgtggtgcatgaaaagataggagatgttgtttagtacttttttgtttgctagttggttgcctgagtcaaacaggcttaagcaaaaagaaagtttattggtagatgtaattgaataacctaagggaaactggctttggacatcgcttgataccaggactcagaagatgttaccaggatcacatttctctttgcatctctgaacttcacttattctgccttgacttctcaaataggctgtcctctggtggcaaaatatagcaataacaatggcatttatctcagcaaaaagcatacacctttggcccagaagtctcagcaaaagtcttatggcacttcattggctcttttgggccagtttctgaactagtcatcatgagtttatgattgtcttagctgaagtgtgcttcactggtggaatcagcttgactgaactgaagtaactgaagtaaaatgagtaggaagtaggtggatatcctaaaacaacattgttgcctattatataagaactcagataagtgggtatagttcagaaaagctgcccttgtttggggaaatataaatttagcagctgagtgaatgttagaagagagagtcaagatactagtttggagactttatcaacagttcaagtgaaagataatacaggcttaaacaaggggaaaggctatgaggaaggggaagatataagaggaagcctgtagaggtacagtgaaaagcttaggtgactgcctggaaaacacagtttcacagaggaggagggtgagggagaaagtagagtgtaagatcctcatactttgtgcctctgtgacaattagacattaagttaggaaacacagaaatagaccataggtaggtgaggaaaagagtgagtttaggttgttgaccaatttgaagcactgctaagatatcaacatgagaaatggagaaaatagaaatttcactctgggaattatagacattggatctgtgcatatgggaataattcctgtataagtaatggatgaagcatgcctggatgagattggatacagccataaaaagttatgttagtcaaaagcccagtgaaaaaactcagcgaatactatgtttaagatgaataggagctggtgaaggaggcgaaagagaaccagagaggtaaaaagaggatccaggagagtgccatattatggaaactgaatgtggcaagagtgattttaccttgcactacaggaggcaggttaggatgagttttgacaattatgtaggaaaaattatcaaagacttagaggtgggaaaaggaaattattgcatatctagaatgctagatgttgtttagaggaccctccaggagttatatgattctgattaagggatatgcatctttgtatttgattgacaaggctgtttcacaactctgtaaaaagggataaaagttaagttgtagaaaactgaaagcagtacaaatgttttctgcccataccaatgcaaattatgtttgtgccatgaaaatgaattttgtaagttgagaaatagtaaatcagattcttatttgaatcagttttaacatcttatttctttcttccttaatcaatgaattacgtaaattttttgccagatcttcatttcatgtttgtatgagagtcataattttactgttttgaaaattatactttatctgttacaaaggcttttggtgaactttgagataacacttcaatgtaggtgtaaggatagaaatcagattgtataggatgttaacaaaggtgtgtgtagcaggtgaggggaggggagtgggggaaatgattcaggttggaatgtgagggggattttttatgagagaggtaagaaattagctcaaggcataggttctgaacaggctgaggaaaagtgaattttggttagataactagacttttagtcaagactgagcatagtgtattcacaggatgataaataaataaaatatatagataacttttagtcaagactgagcatagtgtattcacaggatgataaataagaaataaaatatatagataaggtgaggcctgaatatgtaattctttgaatgacagactgaagtaagtttagaacatctgactgtactaagacctactttataattcttactttcctattaaatggccgtgggactgaccttgggtaaatctctctcccttcatttagtcattcaggaaaacattcagtgagagcctgttatctaccaggtactgtgcaagtcattggagatacaaagatgaaggttatggttcttgcctgtaaggaaactttcacaccactaaaggacaattagaacatacaatgttaaaaaggacctctgtggaaatctgcaaatacaattgtgaaagcacaaaggaaagacaactttaaaggggtgggaaaaggggtaaaggtgatgagtgtgagttctagaggtgtgtgtgtgtgtgtttgtgtgtatgtgttggggagtgctgggtgtgagatatgagactgagagaggaggaattctagaatgcttctgtagtaggccgttcttgcattgctataaggaaatacctgagactgagttatatataaagaaaagaggtctaattggctcatggttctgcaggctgctcaggaagcatagcagcgtctgcttttggggagcctcaggaaggttacaatcatggtggaaggcaaagggggagcaggcatgttgcatagcaaaggcagaagcaagagagtcggggggaggtgctacacacttttaaatgaccagatttcatgagaactcgccattgtaaagatgtaccaaaagggatgatgctaaataattcgagaaacctgcccttttgatccagtcacctcccagtaggccccacctccaacactggggattacatttcaatatgacatttgggcagggacacatatccaaattagatcagcttcttgaagatacatgagtcagtgtacttacatgaaaagagaggtttttttttttttttttctttgaggcagggtctcattttgtcacgcaggctggagtgtagtggcatgatttcagctcactgcaacctctgcctcctgggttcaaggtgattctcttgcctcagcctcccgagtagctagtggaattacaggtgtgtgccaccatgcctggctaatttttgtatttttagtagagatggagtttcaccatgttggccaggctagtcttgaactcctgacttcaagcaatctgcctgcctcagcctcccaaagtgctgggattacaggcatgcaccactgcgtccagcctgaaaagggagtttctaagaaatcgtctcttatgtgacaccattggaacctgcagttacttgaaaaaggaaatcatttaaaaaaaaaatagaaaagtgtgcattaatttgatagtttttgatgtaaggcttgattccaggtctgagttcttttgctcacttctttatccacatttattctttaggtgatctcatctagttgcatacttgaatacctgataatttcctatcgtgtattacctgcactggcctctatcttgaattccagatttgcctatctagtatttttacttggattcaaaataagcatcttaagctgattttgtctccatctcctctacctcccatggcttctctatatcacagtaaatgtcaacattcacctagttctgcaaaaacccaggagctaccctttcttctttttgtactcaaacttcatatctagtcctaaaacaattgttagagcttttcccttcaaattaaatctcatatccattcaaataacaccctcccactgctatcataatatccaggccaccagcattttttacaagattactgtaaaagcctcctaagttttccacttccatttttgtgcctacctttcccatctgttccatgtggaattcagagtaatatttttaaaaccatagttaggtctggtggctcaatacgtggcacagggtgggtgtcagtatgtccttgtgtattgaatgtataaatgagtattgttctgctgattttgctgatggaatttcaagttgactttcctgtgtaaattacacccgcagactgatattgcctattattcgttaaagttgattaaaaccttcaagaccatggtgaagcaaacttgaatacagaattcctttagtacatttttttcttcccatctagtttagctgtcttatctacagatagttaattagacaaacttttttggtgattcaccttttatcaaggctttttgaagcattcagtttcattttctataaaactttactttttatattctcagtttatataaaatttaaattacgtgatgaaaataagttcagctggcatgaacgtgtttgagaaacacaactgactcttcatatgtctagaactttaactgattggaataggaattggacttattagaaagcagtagcctattttatttttgtcaaactgaaattagccatgtccatcagtcagcatggcctctgtatgctttgcacagggtatagaaggcatttggttatttgtgtgaattgataaattggagatcactagtagtttttgttttttgttttttgttgttttttttttgagacagagtttcactcttgttgcccaggctagagtgcagtggcacgatcttggctcactgcaacctccacctcctcggttcaagcgattctcctgcctcagccttccaagtagctgggattataggcatgcgccatcacacccggctaatttttgtatttttactagagacggggtttcatcatgttggccaggcttttcttgaactcctgaactcaggtaatccacccgcctcagcctcccaaggtgctgggattacaggcgtgagccatcgagcccagcttagtagttttaatgtatgttaactacataattgccaaggtcccttctagttctagaattgtatgatttctgtgatggtaataccaaaataatttttagtattataaaagatataacgataggtttttgaaatttgacataaaattcattctcaaatatttttatttggtttgggttgcatattttaaataattggatattagggtttcctagagattaaaaaatgctatttaaaaaaaagagaattctattgactctggttacttttgccatttttatcttatcctatctgtcttctcaatagcaacagcaacaacaaattaaatatcttaatgacacgtatttttatttagttttcttgttttaagtgatgtaggccagcaggagttaaaaggctgtaatagaatgacttaatattaaattactgtgctacagtgtatatgtcttagagaatgtgctgccaagccttttattggtattatgtatggtatggggtcagattctaattttgaggttaaaataccctttttaattgtctggcttagtgttaatattttttgcaattaggggcataatttggggtaatgtgggaatagaaaggaaagattgaatgaaaggaagataattaaaaagaagaataaccatcagagtagagtgacatgtaggtttttggaaaaggaggagtcactgattatattttgagatcccatgaagagagacataacaaagttaaaaggaactagtttagaaattaggataagcttaattttaggtgtatcaaagtttgttttaggtgtattgaggttagggtaacagtgggatatcccgatacagttggttagcagggactgaagctaggaagagaagttgggactaggtgtgtatttttaattggaaacagtcttttgagaggtgataattaaaattagggtaatgggtgagaatactgaaagaggagcatatagcaagacaaaaggaatggcagtcttttctatttttttgaaacggactctgtctcaattggtcgcccaggctggagtgcaatggtgcaatcttggctcactgcaacctctgtctcccgggttcatgcaattcttctgcctcagcctccctggtagctgggattacaggcatgcaccaccatgcccagctaatttttttgtgtttttagtagatacaggattttaccatgttggccaggcttgtcttgaactcctgacctcaagtgatctgccctctgcagcctcccaaagtgctgggattacaggcatgagtcaccgtgcccagccagtaatggcagtctttatgattatgatttttaaaaagtatattttaggccaggcacagtggctcatgcctgtgatcccagctgctcaggaggctgaggcaagaggatcagttgaaccagggagacagaatgcagtgagccgagatcacgccgctgcactccagcctgggtgacaaagtgacacttcgtctcaaaaaaaaaagagagagagagagaaataaaaaaatatattttacatgttaaacttttttgtattcaaacttttatggtttatatcattagcgataagcctcaatgcccctttcccacccaaagatgatataaatatttacaatgtttttgtaatacatttagagttttatttacacatataaatctttgttccatctagaatttacattgacactgaggttacactctaacttctttttccccaaatgatgatcattttccacaaaatgatggccagttattccaacactacttattggatcatttccaattcagtgaggtaagtaaatataagtgttaatgtaaatttttaatattttacgatcatttctaggctatttaatttttaaaatgtggattttttctgatgaaaaatacaatcatagtaaagaattcaaatgatacgaagaaagtgtctgtgtaatatcacccataagaagataagaaatacaacactggtagtagttttaaaatatgaaaatataaatgtgcatatatgcacatatgtgttaatatgaatgtgtgtttacatggaaactttgacatctctattcacaagtgtgattaattcatatttttcttttgggagctaattttgttaattttaacaatgagatcatgttagccttatagtaacttcctatcctttttatgcccccaacagtataaataacataggacttctgtgttccataaacctttgctagaattcacctataaagcaatttgggtcaggggtttttgagaggagtcagattatttttatagcaatttcgagattcctgtccagtccacacatcaaactgcccacatcaaacccctagttaatacatgaatttagcctctaatttagtagctggtgactctgtaatctactttcattctttctcctctggaaggtttattgagtcaataattgatacctgagctaagctttgcccatttggaatttggaaaagggatgcagagactgtagtcagttggtattgggccttggcactgagtagtcataaaaaatagatatctttgcatagaaaggtggttgtagaaagacaaaagaatgaacacatatgcagaaaggaacaaacaagagagaattcaattccaaaaaggagttgggttctaacattccagaatccttagacttgactatactacttgagcacaagtttccatgaaatactcctatattcttccaatgcttttttttgtttgtatgacctagtttgagtagatttctgttcattgcagtgaaacaattcctgacttagatcatctttgacatactttttatttcatttgtgtttattggttattctaggtttcttgtcagtcagtttgataattgaatttgctattaatgcatattttcctaaaatacctgccgttaaatctagtcttccattctcacatgtattgctaaagttgtataccatatcttttatttaataagtaccacaattgctatgatagtccctttcttacattactaatagatatttatttttttcttctttttctttcttcgacttgctagatgtttttatactttattgatcttttcaaagcataactcctatggaaggaataaagaatattgtcaaagagttacctccacaaaaaacatcaggcttagatagtttcatagttgggttctaccaaagtttaagaaacatgtgacttcagtgatatataaattgttctaaaacatgataaaagaagaggaaacaatgtgtagaattatcaaataggatacagaagcatattttaaatgtatatcctacattcatgttgaaaatgcaggaataattcagtattggaaatatattaatatgtcattatattagtagatcagagtataattatatgatcacttccatagatgctgaaaatacttttgataaagttcaatatttattcctaataaaatttagtactaaaccagaaatagaaggctaccaaatcagctcaaaagtcagcatcatgcttaatgggtaaaatttagaagttctacaaagtctggagcaagatacaaatgctggctgtcatcactattacttattgtgccagaggtactaactaatgcagtataaaaggtataaaaatggaagaggaagtaaaatttattgctgtttttaggacaatattattatatcccaaaatatctaggagaatcaactgaaaaggtactattaataataagagaatccaggccgggcgctgtggctcacgcctgtaatcccagcactttgggaggccgaggcagggggatcaccaggtcaggagatcgagatcatcctggttagcacggtgaaaccctgtctctactaaaaaaaaaaaaaaaaaattagccaggcatggtggcaggtgcctgtagtcccagctactcaggaggctgaggcaggagaatgctgtgaacccgggaggcagagcttgcagtgagccaaggtcgcgccactacactccagcctgggcgacagagtgagactccatctcaaaataaataaataaataaataaataaataaataaataaataaataaataaaaataagagaatccagcgatgtggctagatacaatttttattagccttaggtgcagagaattagtttaagacattatcattacaggtttatgtaaggtctcttccttgttttctttctttagcctcctttattcctatttgaatttcccttctcccatacataaatgcattgtttgttatacagtatacattgtggttatattctaatatatttatctttttgtaactgtgtgttcatgcaaaacagatattgttttatgtgcatttatttttaacttacataaatgctattgtgttgtatttcttattctgtttttttcccacaagcactaaatgtctaagatgtactcatgttgatactgctaatccattgcttctaacagctgtataatgctctgtgagacctttaccatattatatctgttatcttaatgatagctacctgtttacttctagtttcctgacaccacaaattgttctgcactgaacatccttgcacatgactctgtgttaagtatttgtttggagtgtatatacaaatcaatagaattgctgggacataggttagccccatatgtagtttgactaagaaatgccagattgctattcacagtagctgaacaagtctatattcccactaacaatgcatgagtcttctcatatccttatgtcccaacatttaaaaattatccagctttataaactttactgatctaataagcataaactgatgtttgattcttttaatttgtacttttctagttactaagtttgagcatttcttatacatattagttttggaggtttttctttctgtaaattaccttttaattgtcttgttcatttttctgttgatgtgctgtcttttcagttttatttgtcgaagtttaaagtatatatatgtatatatactttatatatatacttaatatatattacatatatactttatatatatacactatatatacactttatatatatactttatatatatatactttatatatactttatatactttttatatatatactttatatatatatactttttatatatatactttatatatatatactttatatatatactttatatatatattatatatatactttatatatataatatatatataacaaacaatggctacaggcacctgaaaagatgttcaacaccattagtcattaggaaaatgcaaaacaaaaccacagtgcaataccacttcatatgcaccaaaatgactattattgaaaaaattttatacaaaaaattagctgggcgtggtggcgggcgcctgtagtcccagctactcgggaggctgaggcaggagaatggtgtgaacctgggaggtgcagcttgcagtgagccaagattgcaccactgcactccagcctggatgacagagcaagactccatctcaaaaaaaaaaaaaaaatttaaacggaaagtaattgttggcgagggtgtggagaaattggaacccttgtacattgctggtgagagaataaaatagtacagctgctgtagaaaaatttgccatttccacaaaaagttaaacatagaattaccagcaatatcactcacagaattccaaaagaatttaaagcaggcattctaacaaaaacttatacatgaatgtccatagcagcactattcacaatcaccaaaatgtggaaacaacctaaatgtctgtccactgatgaatggataaacaaaatatggtctcttcacatgatggaaccataaaaagaaatgagatactacaacatggatgtcagacacattctaagtgaaagaaaccagacaccaaagatcacatattatatgattccgtttatatgaaacatccagaacaggtgaattcatagaaacagaaagcaaattagtggtagctcggggcagggggaaaaatagagagtgattccttaatgggtacaaggtaatcagtacagggttttcatttgtgatacaaatgttttggaactagatagaggtgatagtcacagagcattatcaatgtactcatatgccactgaattgtacattttaacattattaattttgggctgagtgcggttgctcatgcttataatctcagcactttgggaggctgacaagggtggatcacttgaggtcaggagtttgagaccagcctgaccaacatggtgaaaccctgtctctccaaaaaaaatacaaaaattagcggggcatggtggcacatacctgtagtcccagctactcaggaggctgaggcaggaattgcttaaaccaaggaggcggaggttgcagttagccaagatcatggcactgcactccagcctgggcaaaagagtgagacgctgtctcaaagaaaaaattattagttttgtattatatgtattacaattttacctcaaaaaattgtaatcaaatagtttccctatatatcagagattggcaaacttttaatgtaaagggccagatgataaatattttaggtttttcaggccatatgatctctctctcagctacccacctctcctattgtagcatgaaactaattaggatgtctgtgttccagtaacactttatttacaaagaaggcagtgagctggcttgacccatagttggctggccccttgctacatataagcaaccagttagcaaatataacaggaagaaaaattctgtgtataatagcaacaaagagaaatacaacaatctagagataaattcagatacaaagagaatgatgattggatcttgttctctactgaagctcttgttcttatggaatagttaggaactgactgccttatggcccatggaacatcctcggttgagaacatctgtcagaaggaaacctataaattatcattcagtcagtttcaagattccagccttgtcacagactcctgttcattgtcttccttctcctgtcccctacacttttccaacaccttcttccccccattaatctgcagtctggtatctttctgtatagactgttatttactcctagtcatggaagggcctcttttccagatgtcacagatttaaaatgtgaaaaacaaaactataaaagtagtagaagaaaactaaggaagttttttttttttgcctttgaaaagagaaaagtcttcctaacatgcagtcctaaaatcaaaaagaaaagattgggaactttagataatcataaaagttgtgcatgccgatatcaccatgtcagcatctaaagacaacatcccaagggataaaagggagtctgtgagataaaatttgatttccttaatatataaaattctcttgtgtatcagtgaattatgagttccagtagattgtaccttttgtcaatatagagtcgatagtatagactaagtaagggctggcaactttcttgaagagttagacagttaatattttcagctttgtgagccacacatagggtctctttctcatattcttcttttttttatgcagccctttaaaaattaaaagcctttcttaacttgtgggctatacaaaaacaggccacaggtcagatttgtcccatgggccatagtttgcaaacacttctgtagactatttcctatttgttttattgagtccttttgagagaccaaggtgggaggattgcttgagcccaggagttcaagaccagcctgggcaacatagtgagactcagtctcttcaaacaaacaaatacataaataaaattagctgggtgtggtgacatgtgcttgtagtcgcagctactcaggaagctgaggtgggaggatcacttgagcatgtgaggtcgagggtgtggtgagccatgatctccagtgccactgtactccagcctgggcaacagagcaaggctctgtcttgaaaaagcaaaaacaaaacaaacaacagcaacaacaacaaaattaatctaagccaggcacagtgttgcatgcctgtaatcctaacaatttgggaggccgaggcgggtggatgttgagctcaggagttcgagaccagcctgggcaatatggtgaaaccccatctcaacaaaaaatacaaaaattagccagatgtgttggcacatgtctgtagtcccatgtagtctctgttacttggggagctgaggcagggggatcacttggacctgggaggtcgaggctgcagtgagccgagatcgtgccactgcactccagcctgggtgtcaaagtgagaccctgtcttaaaaaaaaaacaaaaaacaaaacttaatctaccatctagaaataaccatcttaaacattatgtaaatcattctgggtctctctatgtacatttaaagataaaaggatgaatggatatagagaaatgaagatgggatcatattatgtacaccattttaaaataaaaagaagtaaatttacttgaatataacaaggaagtaaaatgtaagaatagctaaacttaggataaacttttaaaaattattttagaattatgattttactgaactgtaaagttggtgttgggggatgggcaataatcttcactttcccagtttcggactaatcaaaggagagatgcacacacacaaaggagggttgtactgtcagaaataatattcactttattcctagtaaaaactaggttgtacgactgtgtagtcagaatgagccttatgatactttatttttgaattagacttatttagcaacatagtcatagactgtgcttgtcaaccacagcaggagtggataatgcctctataattttactgcatgggagaatagaaactacatcctatagggctgggttgagcatgtgtacttccttgttttttaatgcagaggcagagataaattgaagatgttccttttactttttcatcttggttgtgaagtagaaattgcttccatttatgaaaatatgaaatgttaggaataagtgtctcattttgggcaacgtccaatttccttatctttcatggtatggatcatttaacatactgtatttctttctaccaccagtgccagattattcttactttgttgaagtttataatagttctgttttattttgttctatacaccaaaattcccagttatttttactcttttttttttgaaacagagtttcgctcttgtcacccaggctggagtgcaatggcgcaatctcagctcactgcaacctcaacctccagtgttcaagtgattctcctgcctcagtctcccgagtagctgggattacaggcgtgcaccaccacgcttggttaatttttttgtatttttagtagaaacaaggtttcaccgtgttagccaggctggcctcaaactcctgacctcaggttatccgcccgccttggcttcccaaagtgctgggattacagatgtgagccaccgcgcccggcctttactccttttttttcagacagagtctcactctgtcgcccaggcttggagtgcagtggcatgatctcagctaactgcaacctctgcctcctgagttcaagcaattcccatgcctcattcctgagtagctggaattgcagacgcgtgccaccatgcctgactgatttttgtatttttagtagagatggggtttcaccattttagttaggctggtcttgaactcctgacctcaagtgatccacccctcttggcctcccaaagtgctgggaaaatggtgtgagccaccatgcccagcccatttttactcctaaataaattcagaacttatcagcagtccttttatctccatttatctgttgtttggcttgatatcattgtccagcttttgcccctccctcaagttcttttagttagagaatgtctgttgctccattagcatgataatctggtggaattatttttcttctaacatatttgtgaatactttttctattccatttgttgtgtttactgtttgaagtttactaattaagttagattggttttgactctcctgtctttttgtggtttctgtcatttcactgtttttctttcaaattattgtgatctcctagaaacacctacatgtcatagttatttggcgatattgtgtggattctgcccatttctatttctaagttattctgtattttgattttcagttttgttagctttgtggtctttttatgtgcttccactgttgatgatttttgtcttctgttttaactttattgaagactgccaaactgttttccaaagtagctataccattttgcattctcactgactatatatgagaccagctgctcctcatccttgtcaacatttggttttgtcaggtttgttctttcccattctaataagtatgtggcggcatctcattgtggttttaatttgcattttgttgttgtctgttttaatgtacttattttccatctatatatctttggtgaagtgtgttactctaatcttttgctaattttttattgggttgattattttcttattactgagttttgagagttctttatgtattctggatattgtctctctttgcctagtttatttcacttagcatagtgtctctacatgcattcacatcacaaatgacagaattttctgctttttaaaggtcgaatagtattccatcccggtcgtaatagaatatttctataattacagaaagttctctcataaccctttttgagtcaatccattcagggaacttaaaaaaaaataagtatactctcagtttctaccccagatctatcaaagaagtaatatccagggtggcgcttaggagatttattttgcaaacccctgtccccccaaccccagtatgaatataatgagccctgattaagaactatgacccagctggacgcagtggctcatgccttaatcccagcactttgggaggctgaggcgggtggatcacatgaggtcagggattcgagaccagcctggccaacatggcaaaaccctgtatctactaaaagtacaaaaattagctgggcgtggtggtgcatgcctgtaatcccagctactctggaggctgaggcaggagaatcacttgaatccaggaggcggaggttgcagtgagccgagatcgcaccactgcactccagcctgggcaacaagagcaagactctgtctcaaaaaacaaacaaaaaaacaaaaactatgacccagctgggttatatattgcatttaccacatggcctagattaccctgtaacatatttgccccctagcctgttgcattttctttccctttaatctccatgtcagcattgaaaaacttgccccaaacatagctttaagtggtgaggcagggaaacaaaagcaaaagaactcatatattagaaatccctaattctcctgagttccagtcctttttatctatttgtcaggtaattgacaactcaaccaagaatatttaaaaccaaatttatttcttaattaatagcgtatcctctcagctcctaagctagaaacttagtgccatttttgaagtttcctcctcttcttggatgtaaaaatcctattggtttccacctctaaaacagctttaagtctgttccatttgtgtacactgcatttcttgcttagaatattaagactccaaaatggtgtcttgagtcttcttaatccaagatcttcctcactgctggcacagttttgtttctaaaattgagttcacaaactgggaaataaagagaacaccatgaaatacatatttttaacttaaaaataaataaagttttgtataaaatcaaatactaccttatatacacagtatcctagtatagcaaatgtcagagaagcaaatgatagtcaagttttaaattgagaaaaacttaatcattaatgaatgttttaggaagtagggaaatatttgccaaaaagactgaaattcacttatgaagctattgactggactgttctggaagaagaggcagaataagctatttgacaatattcttttatcgtatgacgttatggataatcctgtattcatggtatacaatgtaaaagagtcagtactgttaaatactggcttgaatatatatttccttttgtttgaatgcaactcccagtgtgcattgtagaaatgaggtatttgtacttctatggtgtatgtatgagggagatctgcaagataacttactattttatcacagaaaaaccaggagaagaaattcttagtttaatgattcttttgtgactttttttagactggaaaatatatattatgtcagcgctgacacagtactagctttgagcatcaaggaaaaactaagttttaagtgatagtagaataaaataacttgtactgtaatgtaattgctgacattgttttattcagaaaaaagagttggtagtcaacattttgcttcctaatcatgattaattgttgaatgtaatacaaattatgaatataattaaaactataataatcaagtgaaaattgtttcatcttcctgaaaatatcttgagtcaaggctttggtttccatttctgaagtatattataaaaacaaaaggtgctcatgtaagtttttgaaatataggatgagatgaaaacatttattcataatacgatgtcaataaaaagttacttctgtgactttttagtttccggaatagagccaaaataggatttttaatgttgaatgttgaggataagataatagggtttcttttctttttttttttctttttttctttttttttttttttttttgagacagggtcttgctctgttgtccaggctggagtgcagtggcacaaccttggctcactgcatccgcctccacttccagggttcaaggagttctcgtgcctcagcctcccaagtagctgggactacaccactgtgcctgagtagataataggatttctaaagattgaactgtgatggtgaagtttaactccttcccagcattggataattttgatcacttgtttagagaaagaaattaatgatatgctagtggatatggtaagaaaaatgtgtatttttgtgcattgaaataggatttgaagaaatattttccaagtccaaatgcaactaaagaatgtattaggggccgggcgcagtggctcatgcctgtgatcctagcactttgggaggctgaggtggatggatcacttgaggtcaggagttcaagaccagcctggccaacatggtgaaaccccatctctactaaaaagacaaaaaaattagccgggcgtggtggtggatgcctgtaatcccagctacccaggaggctgaggcaggagaattgcttgaacctgggaggcagaggttgcagtgagctaagatcacgccactgaactctgtactctagcctggacaacagagtgagactccatcttaaaaaaaaaaaaaagactgtattaggaatcagtttattactatttcctgaattgaagcatttggctgtcagcttttttagggttcactgaattaacttctgagtgcttatagtagtgagccatcactaataaggtaaagagacactggtaaaatattgtggtagaaaacgatcattgttattattaattaaaatatgtttacattttattaaacattttaatatattttctattaatttacctgaatttagtggtccacatatatgttaaatagt

SEQ ID NO: 114 - DNA, 17795 bp, Homo sapiens
  source 1..17795: mol_type = other DNA
tcgtcgggctcgttgccggtgcaaacagggaggaaacagccggcgttgctgtagcgcgtctgggaattacaccgggggactggccggcccgcttcgtgcctgcgggaagtcgggccgggggactcttcggaaactccgagcctcagagaaatgtgagtcggagggttggactaggccggatccggcgttagggcgggggcccgcaggcggcccgcgcgggcgggaaccggggcggcagtcagcgggcgcgagctcagggcgcctccggggtcctcactgcgctccccacgcgctgtgaccccatttgttgcacgtgcatgttcaggtcgagagagggatgcgacgtgttcggggagcagcccaccttgtgggtggccaatccgggacgggaatcttaaacttttaactcttggtgcaaagactgatccactggcggctttacgggagcgggaaaaaagtatgtgaagcttgccacggtctcgagaccgaggtcacacgttagcagcctgccggctacatttggaccatagacgcagagtgtttgcccccaaaactggaggacctccagaatgagattcttggcgtgcaccaggccttttcgctcattcagccggcgttcctacccaggcactgcatcgaccctacacttgaggacagcttttgggtcaggggaattggtgcctggagtgagactgctctctgctttcaaggctccagctgtatccctacattgctcaggcaattcctctctctaggtctcagcttcttcatctgcaagatgaaaggtctgtcctccatggtagcccaacatacttccgagtgttattatcagtcccctccccggggactgccagagccagggcaggttggtcccaacaggcagccccttgcagcagagagagcctgggctctggtctcagacggacatgaattaggaacccagcttgtttatctcctttacttcctggctctgtgatcctgagcaaatcactttgtaatgcttaacgttgtttttactaaccttgttttttaatgccttaccttgtttttactaaccttgcttttagactctttttttccccttaatcacctagccttgtttccacatgaattagctctcccttagttgagaaagccggatgaactccatctggttccctcatttacaagacatcaaggactccttacccacccctttcctcaaggagttaacttgtgtaagcagaatctcaacatatcaaagagtccaattaactgataaggtactgaaacaagcaatgtacgaagttcccaggattttgctcaaaagataacaccataaaaccttgagttggtgtcgggcagagcacccatatctaacattttatgaaagatttagagcccctgcacctggaactgttgtttctctgtaaccatttgtcttttaattgtttctctgtgactctttgtccttttaatttttgcatgtttttacttatgtagaattgttgcatctgagctcccctccccttcctaaaccaaagtataaaggaaaatcaagccccttcctcgggccaagagaatttattagccgtctcttgggcactggctaaataaaggactcttaatttcgtctcaaactgtggcgtttctctaactcgctcgggtacaacaactttacctcttcaacgtaagtttccttacctgccaaatagcgaggtgattgtaagaatgaaaaaaagtcatatgtattgagtgcttggcacatacatgtgttccttacattattgtctctgtttaagcacagcataaatgcccccgatgtgcctagtctagcaatcttaggacaatccctgtgtctgtctgttgtgttcctggtgatggctggcccacagctgggtgcacgcagtccagaattttttatgtttttgtttttttgagacagagtctcactgtcacccaggctgagtgcagtggcgctatcatggctcgctacagccgtgacctcctgggctcaagcaatcctcctgcctcagcctcctgagtagctgggactacaggcgcaccaccactcctggctaatttttgattttttatagagatgagtctcatgatgtggctggtctccaactcccggcctcaagtgatcctcctgcctcagccacccaaagtgttgggattacaggcatgagccactgtgtctggctaaggtttatttgttttgttttgttgtgttttgagatggagtcttgcactgtcgcctaggctggagtgcagtgggacaatcttggttcactgcaacctccacctcctgggttcaagtgactctcctgcctcagcctcccaaggagctgggattacagacgcccaccagcacgcctggctaattttttgtatttttagtggagacaggggtttcactatgttggcgcagctggtctcgaactcctgacctcgtgatctgcccaccttggcctcccaaagtgctgggattacaggcgtgagccacggcaaatttaaaaggatgatttgcagcactagtggcagatcattttaaaaaatgctggtgcctgggccctactaagttttttgattgaattagtttggagtggggctcagacacggttttgtttgtttgtttgttttaaagttccaccagttgatttcactgtgcagccaaggggtggtgaccactcgttaaagggatgaggccaagctggtgagggttcctgggatttgcagtggctcactttcctcccattcctgttctcagatggcgctcccgacgctgccgtcctactggtgcagccagcagcgcctgaatcagcagctagcacgacagcgagagcaggaggcccggcttcggcagcagtgggagcagaacagccgttacttcaggatgtctgacatctgcagctccaaacaggcagaatggagctctaaaacctcctaccagcggaggtaattgtgcggtaactgccgattggatggaagtggggaccacttgctggtcaggggatgaggccttaaggatttagggagcgtaggatttgccaggcagtatgaattacctgcatggtgatgtttttccagctggaaatggaaaaaaagatcatcagtgcagccatacattggcattgaaaaagataaaatgatgcagaagcatatgatagaatttggaagcctggttgtaaccccatatccccagagacagccacagttaacagtctggcacatatccttccatgctgtttcccactggtatttgtgcttaaatatacacacacaaagctacttttatagaaatacgtgtaaaaacatggaggccaaaagcataggctttgaagtcagacctagatggaaatcctgaccgtgtctcttgctgaatgtatgagctttggtttcctcatcaatcaagtggggctacagcagacctatgctgtaggatttatgtgatggataatatatacattatttatacatttatacattttctttttgcaaaaaacaagattttctcttacacatactattctgtgacctgctgtctctgctttggctggggacacattcctgtgtcgtcatgacacatctacctcagcctcttttaccgacacagcagagcagagcacgttccctgtggctgtagcatgattgattcaggcaggccccctctcacccagcatgcatgcctatcagcgggagaagatgaaggaggagaagaggaggagtctggaggcccgacgggaaaagctcaggcagctcatgcaggaggagcaggacctgctggccagagaactggaggagctgaggctgagcatgaacttgcaggaaagaagaatccgggagcagcacgggaagctgaaatcagccaaagaagagcagaggaaactggtaactccccagagggcttcaggaggctgtggagcaggagtgttcccagcctgagtgtgtcgcacatgtagggtcattcctgggtgctcaggtctgatgagatgccagttaactccagagccagcaggaaaagagcttaggtccttgtgcagggactgggttttggatcagttagctgtagtctctttagccccttcaatcattacatctgagtgcttttcctttcttccagttctgtgggtccacagagatctgggactagtctgttttaccttccaaagtagttatgtgaaacagtgagccctaatctgtgcttttcagcctgctgtattattttgagaccccctagataggacctctgtgtagcatcagattttggcccccttttgtcatcattgcaagagtcacttggtagtgccatgtggttctcagagctgtgcatgtgaagcatgagggtttgaacagtggttgcagtgacggtgtgaagggaggcactcatagcctgagctgacttccactgtgtgtcatccaaaatgtgaatggatttgaaaaatgacatcaggctttccattttgtgttttcttgatagattgctgaacaacttttgtacgaacactggaaaaagaacaacccgaaacttcgagaggtgaaaatcagagatctccattgatttatctaagtagatgaaatcatgtttccagacacttttttttttgaacacgtatcttgtaccgggttgaaacagaggagggaaccttgagccacctgaaaagagcgccaggcagaagatctggcacaggctgcgctgagcggctcattcggttgttgaacaaatgttgattgaacctccgctgcctggtctgccaggtgcgggcatggagattagacatggtttctgctcattagcttgtgtccagcatgggagctcattacagggcaggatgcagggtgctgggccagcctgagaggatgagcatgggccagcgcactcaactctggaggggttggggaggcttcccagaggagttcctggggtggaagagtttgaagggatgtatgtgtgtagaggtgaggaaaggatgttctaggttgatgtgactgtgagaaccaggcttgagactcgagaacagagcgagccctgggagctgaaagtgtctgggtgaggctaggatgtcagatagtgagggagaaccccaagaaatgacgctggcgaggcagagggtgccagacatcggaagagcttgtgtgaccttcctccaaaggggctgggggcagcatacaggatcccagctgcatttcagagagactcctctggtagcaatgtgcccgccgacagggaggggtgctgcgacagcccagccgggggttggtgaaggcctgaactgggctggcaggggagggggtggcctcttggcttggtggccttgttcagtggagatttggctgcagggagatcatccctcactgttattcatttattttcaacttacagtttttgtatacatttggtgccttcgtgttattcgtagttacatttagaaatcgccaggcactaaataatggaacatctggtgcttttgtgcagtttgcactaatctgtgggaggactccttagccctgttggcttcggtggaatcatccagagccgttaaatcagaaaagtttattcagaacattcaagttaattgcctatgttcacagctgtaagttgggaaagattattttaaaacttttttatagagacagggtctccctgtgttgctcaggctggtctcaaacctgggctcaagtgatcctcccacctcagcctcccgagtagctgagactacaggtgggcgccaccatatccagctaattttataaacagtttcccaaacaaaagatttggattgaatgttgtgatccattttctaatccaggagattgtctgcgctcaaatctcttactaacaatgctaaacttgttgcacctactggtgcatcacttgatacagggagtacgtagtccatctgctttgcagaggaaacttcggggagccaggcacagggttgagtcttctcactcagctgtctcccagggcctggcatgcagtacatcaacccaaggtggcctttgaaattgtatttccatttcagcgtccagcccaaccctagggctagtgggagggaagtctctgttactttgtaccagctcaaaagattggtgtaggagtgcctggtcctttggtcttctgattgacatgcattcacactatacatgttgaagtcaccccacgctctctactagacgcctgtgccactgagtccccatgaagcgaagtcatggccacgttcccgcaggtggcacagagggcaggagcacactgtccccacagtgcccatctgtctggtgaggaaattcacatcgtcccccttccatcctcagatggagctggaccttcaccagaagcatgtcgtaaactcttgggaaatgcagaaagaagaaaaaaaacaggtgtggtatgtggctctgggaatagccgcgtattctgctgtgcgagactgttcacgtctttgcattcgtttaccgttttcagcatcagtgactccagttaaggagtgtagtgtactcttttcttagtttacttgacacatgtgaaaactgaatgtttgctcttacatataccagaatcctatgtgataattcccagggcagaataaggccaggtgaccagggctgggaggtggcacatacagcacgcgtcttctttttttcttttggaggcagggtcttgctctgtcacccaggctggtgtgcagtggcgcgactcacagctcactgcagcctcgactggctgggctcaagcagtcctcctaactcagcctcccgagtagctaggaccacaggtacgcaccactgcgcccagctaattttttaatttttgtagagatggggtcttgctctgttgctcaggctggtctggcctcctggccttaaacgattctcccacctcggcctcccaaagtgctgggattacaggcgtgggccacagggtccagctaggacgtgtgtctttaagggcatttttgtctctcttttgatgaaatctgcatcgtaaactcgcagccctggcttactgtaacccctttggggttaagcttccacacctctgtgcactggtcgctttgctgcctggttcattttagaaagtgttttgttgagtggggaggaaacccaacattattgagtccctccctgacttggcgtctgagggcgttgtcatttgggattcaggcaggaactgcctgggccctgtggcctgcagaacggcggcaggaagctaggtttttgttggcttacggtacagatattgacctgtgttcatttggtcccttgtagcaagaagccaccgcagagcaagagaacaaacggtatgaaaatgaatatgaaagggcccgaagggaggcgctagaaaggatgaaagctgaagaggagaggaggcagctggaggacaagctccaggccgaggcactgctgcaacagatggaggagctgaagctgaaggaggtggaggtgggcacaagcccctctcagccgtgacctcctccacagctgctcgttagcatgagatgggcacttgagaggctgccctaagaagaggccatagcagggctgagattctgcaaagggcggcagcagccgggttctccctctcacatgcatccccatctgccttgtgctttcccatcctcctcgtttgcgtgcctgaattccagaacattaacgacatggagccagtagctgttctcttagaggtggttagcggcctgctgttggagaaccttcttagaatctggattttccagtgcactgagtagacacaatttaatcgggtggtctagcacccagctctccgtggggagcaggtttcgggtctcgaggcataactgagggtttttggtccaggggctgtttttggagaacatggcacagtttccttgaaagagatctttctatttagaagagggaggcccatgctcctgtgacctcacttccccttgcccaggccgtgatttagcaactacattcttagtgcctactgcttattctaggtgctgagcactgggttgggaactagagatagagcctgaccaaggcccacagtcctgacctcctggtgggggctgtgtcaggtggaggacagttgttaagttacagtaagagtggaccagtacaggatcctgtgggagtttagagttcagggctcagaaaggcccttgcaggaaatggctcagaggggattggatgagtaagtgagtggtgggaggggatcgtgaccacctgcatggccaggcctctgttggtgtagtgtctgcgaaaaatggagatggagaatgaaggaagatctgattcccacgatctcagatctcagtcgagcttactctcatcatcaccacaggcgaccaaactaaagaaggagcaggagaatctgttgaagcagcggtgggagctagagaggctggaggaagagcgaaagcagatggaagccttccggcagaaggcagagctggggtgtgtgtcagaagggccccccactcttcccaggcgggtgggcctcttgctttttcagacttgcattcgtgttgctgaaaccataaaggagacagcctggtcagcagttatctaacttctatttaattctttctgagatactgaaggcagcccacatttgattctccttcaggcgtttcttgagacatcagtataacgctcaactcagcagacgcacacagcagatccaagaggagctggtaagtctgaagagacagcctgacatctttcttagcctcttttgtaaaaaaggccttccattgcttagtatatgagtgcattctcgtaagaatgaagacagtgaggggttgggggaaaggggagatgttggtcaaaggatacatccctcggttgggagatctgggagtagtgtccatcatgttgatcacagctgatgataccatattgtattcttgaaatttgctaagagagccaatcttaagtgttgtcaccatgaaaaccaactgtgaggtgatggatatgttaattagcttgaccgtaaggatcctttcccagtgtctgtgtgtatacatagatggatagatacaggtatcaaaacatcaaattatttttcagtaactgtgttacttaaaaagcagcacaacacaaagtgagatcacccccttgaccagcacctgcaatctctgtctatccccagaggtgcctgtttagttcacatctttctagatgtatttacatacagagaggtggaggtttttgtttttgtatttaaatctaattgaggttgcattcctcagcatcttcaattaacactaaatctcttaatttttaaaaagatcggccaggtgcggtggctcccgcctataatcccagcactttgagaggccaaggcaggcggatcacctgaggtcaggagtttgaggccagcctgaatgacatggtgaaaccccatctctactaaaaatacaaaaactagccggacatggccgggcgtggcggctcacacctgtaatcccagcactttgggaggctgaggcgggcggatcacctgtggtcaggagtttgagaccagcctggccaatgtggtataaccctgtctctactaaaaaatacaaaaattagccgggtgtggtggcaggcgccttaatcccagctacttgggaggcagagacagaagaatcatttgaacctggtaggtggaggttgcaataagctgagatcaagccgttgcactcaagcctgggggacaagagcgagacttctctcaaaacaagaacaacaacaacaaaaactagccaggcatggtggtgcacacctgtaatcccagatactcggggggctgagacaggagaattgcttgaacccaggaggtggaggttgcagtgagccgagattgcaccactgcactcaagcctgggcaacagagtgagactctgtctcaaaaaaacaaaaaaaggtcattatgcttagattgaacctgttcttttcagatagctcctttgtattcctaagtactttgatgagctcccttgaagtgagggagacagacctaagctgcccttcccatccctgcccactgcggtcagggcaggacatggggcacagtggcatggttggtcctggtgtgcagctgttttttatggggtcttgctctgttgtccaggctggattgcaatggcgcaatcacggctcactgcagcctcaacctgccaggctcaagccatcctcccacctcagcctctcgagtagctgggaccataggtgtacatcacaatgctttgtagagatggggtcttgctacattgcccaggctggtcttgaactcctaggcccaagtgatcctcccacctcagcctcccaaagtgctgggattgcatgcattagccccagtgcccagcctcctgcattattttaatgcttccattatgttgatgtacatagtagctaattccccaccaaggagcattttggttgtttctggtttttccctcttacctaaaagctgcaacgagtgttttgcacttttgtgtcactgtggtctttgttcttataagtgggatttttgccaagttgtattccaaaaagttgtgcaaccaggtgtatccgagggcatgtggtggtggctgggtctccctttagccagagagaagctcctaggcctgtgcagtgtctgaaccacccctcgtgattatccccagtctgttccagaaataatccaggatcttcccatctctgtcttgagaacactgtgtagaatcacgaatgtctatgtagaaaggaaagggagggcaggcccctctgtaggctctcattgcagaaggactctgtccagcccagccacgtgccgccctctgcttcctctaggaggcagacaggcggatcctgcaggccctcctcgagaaggaggacgagagccagcgcctccacctggccaggcgggagcaggtcatggccgatgtggcctggatgaagcaggccattgaggagcagctgcagctggagcgggcgcgggaggcagagctgcagatgctgctgaggtgagtggcagctgctgactgggctggatgctcctggcctcaactctgataccttgaaatgccccatgggtcacctgttactgaaatatctattggctgggcgtggaggctcacacctgtaatcctagcactttgagaggccgaggcaggtggatcgcttgagcctaggaatttgagatcagcctgggcaacatggcaaaactccaggctctaccaaaaatacacaaattggccaggcgtggttgttcatacctgtagttccaactactcgggaggctaagtgggaggatcacttgagcccaggaggttggggctccgattagccatgactacaccactgcactccagcctgggtgacagaacgagactctgtctcaaaaaaaaaaaaaaaaaaaaaagaagaagaagagatagctgtgtatgttgtccatcattcctgaggagcacatcttcataatggacctggcctctgggggtgtttcccttgtattatctgaggtggaaatcattaaggtttagagtaacgatgtgttcatctgaaatcttagaggtttagaaggaaattatttttttttttttgagatagagtcttgctctgtcacccaggctggagtgcagtggcatgatctcggctgactgcaatctctgcctcctgggttcaagtaattctctgcctcagcctcccgagtagctgggattacaggcgcccgccaccacacccggctactttttgtatttttagtagagatggggtttcaccatcttggccaggctggtcttgaactcctgaccttgtgatccgccagcgttggcctcccaaagtgctgggattacaggcgtgagccactatgcccagccagaaggaagttattatagagatgttgaatgctgcttacatctataaaactgagtttgggtcctaaagactaaactagtagattgaaatcatcaaataataagtagcatacattgagcacttactgcatgctggacactgtgccgggtgctttacaggcctcatcttactgagtcctgacatccagccaagtggtggcttgtgagacccggagacttgaagaggtcactccgtccagggtgagctatcagtgacacaggcatgcggtggcagggttcaggcacaggcagcgccctcctctccatgttctgatggtttcattcatctctgtgttaaacagccacggtgtaagtcatcccaattcctttttataaggagatggggtattaaaagggtaacttaaaatacttccaacagggccaggcacggtggctcacgcttgtaatcccagcactttgggaggccaaagcaggtagatcacttgagatcaggagttcaagaccagcctgaccaacatggtgaaaccctgtctctactaaaaatacagtaattggccagacatggtggcacatgcctgtaatcccagctactcaggagactgaggtactagaatcgattgaacctgggaggtggaggttgcagtgagccgagatcgcaccactgcactctagcctgggcaacagagcgagacccatctcaaaaataaaaaaaatgaaaaacttccaacagtactttccgtggatgctgtccttaattgtaatcttttcaaagtgcatgtggatgtttatctgcagtgtggtcctgcagaagccatgtgccctgcagccctgtctgttccgtagctcgcttcctgccagggcggggaggagcctgctgtcatcccttttgtgtttgcccagggaggaggccaaggagatgtgggaaaagagagaggcagagtgggcccgagagcgcagcgcacgggacagactgatgagcgaggtaatcccagctgcggcgatgtggaccggctgttgggtcttgggcaggtgtctggaagtccatggtcagtcaccctgccagatgctctgggaacagagtcttctctggtcattttaagtgggctttaaaaatcattgaaaaagtaatatgagcttagtagaaaagaattcagaagtacaggaagtagaaatggaaaaaagtcccccagagcccatcctgtatgcagccgtagctgctgcttctgtctgctcttctgtttctatgcctgacattttttctacatgtatttcttactgtcttgtgctatttggcttcaagcgttgtgacatgctgttacatctttataaacggcatgtcaggggctgtatcacggactgtcctctgtcacccgctgcctttccattccctcttatgggtgtgctgtgttgttctaattggaagccattctgagaaacgctgcagagagcctcttggtgcctgaggctcttcccacacgtttcccccctcggggtagatgacagccgtgacctggaggacataactgctttcctggtcagtgtgtacactgtgcgtggaagatataccccaaccgcagagaaatctgggaggagaagagagagtgttacccatgggctgaaagctgttgtaaagtggtttcaaatgagaaactctacgttgtgtctggtagtatgctgtattttggaatccacaggaaattgggtcgtgattggtgatgttttgctcttgtaaataccaagaattctccagtgccttttgattttcctcatttaaatttccctcctgatggcggccactttctgttccccccagccctgcagcctaactgttgagagtgtcaggtggttttctgctcctgactgtggcctgggctggagttcagatgtcacacggctctggggccaggtctcaaacacagcaggttcaaaaggttagaggaccaccccagctccacctctggtcatctgtgtggcttgtggctctcttgtttttggaacccgctgataggaaggagactcaccttgttgctccaaggtttctctggccccggggagacagctccatccccatctcctttgatttctttggcactcagctgtctctccatagtacacagtctggatacattttgtgtgtcttgggttgcgagggaaacatttcttgtatactggcaagcgtggccgacatcgtgagagcaaatcctgtcatctggctctgcctctgcgtacctgggcctgaggcccaaggatgaggctgggccttgctgtggctgcagcctgtccaaggcttgtagaaccaggatctgttagggtcaacctcaaagctgcccttttctttctgctgaggttaggttctgacagggagacaacagcaaatacaagagaagattgagcagaaccgacgggcacaagaggaatccctgaaacacagggagcaacttattcgaaatcttgaggaggtgagagagttggctcgtcgcgagaaagaggagagtgaaaagctgaaatcggccaggaagcaggagctggaagcccaggtagggctgagcccaagggcgggaggcaccgggcctgccaggttctctgcatcatcatgggacagggttcagagccgctggactgcctggcagggcttgcgcacgtttgagagcacggtgctcccgtttccatcccagctgcagtcctcatcctcttgactgtggcttctttccctccacatcctccatgtcgtgtgggtgaggccggtactgctgtctgttctctttactctgtctgcttctgcaagcagttggcttaccgggggccatagatctctcttcatttcagtccctgatacataagacagaacagtcctccaaacacctggccacaggccgagcttttcacgaggtacacgccacgcatatgtatagcctctccagctttccatgaggtacacgccacgcatacagcctctccagctttctacgaggtacatgccatgcatacagcctctccagctttctaccaggtacacacaatgcatacagcctctccagctttccacgaggtacacgccacgcatacagcctctccagctttccacgaggtaagcgccacgcatacagcctctccagctttctatgaggtacacaccatgcatacagcctttcaagtcccgcatgctcccttccgttccttggcacgtgcattgctgttgctcagctggattctccagtctgggtagggccgcaggcttaccttcctcatcagaggcagggctctgccctgtgggccttgtcttggggtggtgactttgctcttggcactcaggttgcagagcgccggctgcaggcatgggaagcagaccagcaggaggaggaggaagaggaggaggcccggcgggtcgagcagctctcagatgccctgctgcagcaggaggcggagactatggctgagcagggctaccggcctaaggtaggaagtctgccaggatataggccaacaccggcaagacagactctgcccggcccctgctcccctgggcctgctcatcgccccgcgccggggtctgctctccggccgtccgggttattccttgtttctcttctcttgtatttctctcttccctgaccagcagggagccctgacacaggggctgttccagtccttggttgggcctcaaaccttgaagtgattttgctctggccttgcctactaagctgcatgcctgtccaccctctttggtcaatctaagaagagctgtggccacagctgctgagaggggtcagagcagtagatctaggcctcaactgttgagacagtgaagcccgatgaacaagagaccagtcctcctcctcacctcccctccctccctcctgtgggtgtcctcttcctcccctccctcccgtgtgtgtatctgtttctctgcctctcagtgtctttgttcccggacctgtctgcacagcaccatggggagcacagagaagcaaatgctgccttccctgccctgaggaagctgatgactgaagcacctccactgctggcttgtcccctctgccctcctttacctagggccaccctggccacccggtgcctagagtgcattccccaggacacatgctgcagaatgagggctggctcccttgtggtcagatgacactgggaaactgagtgaaacataattagagcaggtgctgcgtttgccataggccactcgccctcaaacactgactgtcacagtcacagggaacagcatttcctaaacccacttggccgtggatcagtgagagtgtcagggtcagggtttcacagatcatatgtgaaagtgtttcttagggctagtactcaaaaccaaaaagatatcaagtgcctcatttatggcttagggtcagattttttcagctggaaatgaaacagccatttatattgttcttttagcttgtagttaaaacaaggttaattcctcatgctgcagatactgctgatctgatcactcttatgttttctttcttttctcagccttacggacatccaaaaattgcttggaactgacttcatgggtaccataagtacagagaacaagggatgctgaggcttctgatcccagccgccaggcagttttacagggctctgttaacagtaagtgcccggggcactgtcagatggctcagcagtgcctgctcaggttcatcattgaaacatcccagtgtttggccagacattaaggtgtcgtgagagtccctttcatgcctttcttacccaagcaagggtctttgatgggcacgtgtttacagcgctgctgcatagtcttgtaatatattaacagtcacatcaactgaaggtcaatactaagagccacaggttgtacctgtgatggggcgtgtggtttcctgttgtctcacctttaattgtcaacctccagtgttgactctagaaatatgaggaaagcttttcagtttttaaaattgccatttaaatttagtctattaaaaacaaacctagaggtcttggtgcagttgatttcagagtttattaatttagtggtcccaaaagtattacatcttttatattctggaagaaaagaactgtgaacaaattagaaccccggaacactctgacgtccatggacgcattccagaaaagtggcaagagatgagtctttcctcctccaggaagcattttggtagaatttccatagagcattgtctgtgagtgactgatcccaacatgtatgttactaagccccaaaacgaacttcaaactgggtgtggtggcacgtgcctttagtcccagctacccgggaggctgcggcaagaggattgcttgagcccaggagttcgagtccaacctgggcaaaagagtgagaccccatctctaaaaccaaaaaggtaccttagaaggtcacctggttggctaaccttttaaaggcaggggcgtgacacgtaggacacattgggaatgtcttggctactacatgtagccttctgggatatatgtgcccagagggagaagcactgagcctgaagaaactagatgagtctcagaaccacagaccggccagaaatctctcccaccattatatcagcgtgatacaggtctacattcatttctacaaacaggaacaagttccttgcagcaataatattattttatgacttgtatttttactatacccttcctctgaggtttagttttcatcacattatgttcaagattccatatctccgtaaattacagctaattacagggcattgttccatggttattaaaaatcagagtttattaaaaatcctgagtcttaagggctgtcttacctttcacttccactgtcctgtagaaacagatcaagctgcaaaccacgtccttcatctgttgttcattttcttgcaactctttgactctgatcccctgagcagcacgttcatcacgcatgctctctgttgcgttccccatttcagatgtccagtaatggtgaaataaaatcctgcttcgacagca

SEQ ID NO: 115 - DNA, 16235 bp, Homo sapiens
  source 1..16235: mol_type = other DNA
ggaggggcaggagcgctgcggtcgctgagcgtttgcacgtttgcacctctctgtggaagcagtgcgtcacaggagggaaatatacatgctccccaaaacaagaggtgccttccacttcagtattccagatcctcagcacatttgcaaatcgcgagggtcaccatacaggtcaaacgtctgcacgcaaaccacggaccgaagcacgtggcgcaaggatgcggagctttatctgttgtccgttattactcaggtatccaagcttagacagcatcccaacggccgatttccatcaactacttttgcgcacgcgcaaatcctctccctcgcccctccccttttttctcaggacgcgtttctcacgggatttggcccgcgggctgccccgtagtaggaggtgtggtagaactggaggcgtagaaagaatgtggattgcgattggttcgcacttcactttcccggagctcagtgggcgtcgcgcgaaggctaagggagtgtggcgggcggctccgggagccaacatgcctcggtatgcgcagctggtcatgggccccgcgggcagcgggaaggtgaggatctgcggggacaaggagagaaaagtaggagttcgtggaaggcgggagattgggtcctgagggagtgagccggcgggtgtgtgtactgggaaccctgagaccccacgcaactcatttctgctgtctggcttcacgttcttttttgttgttgttttgaaagggaaataatggtagttgttaatatttattgtatacttaagccccaggcagcagatgaaacgcctcgcttatttctacaacaaccctgtgagagagatctcatttttctcattttacagaaaacgagatacagaaaggttaattaagttctttgccccgcaaaaaaatataaatccagttttgtctcaactccagaatccggccctgtctcgctcccaggagggtaaagtggggtctcattaattactgtttctcagaacttgggacatggacttttggtatttaaggtgcttttaggtggtaggtggtacatggaccccacattaaggagcatcagataatgtgttagggaaattgttcccttttcatttctctttcagttctcaacttcgcatttaggagaagttgtgctcggtgctagtgtgtatcttcagcacttctttaatccccaggtcttttcagagagcagttcttagtctcagagcttttaataggcacctgtatttagctaaaaatagaacatttaaagattttatataattttatgtctaatttcacgttatgtcaaatataagtggttttcagtttacagtagggataaaattttttcttgtaaacaaatattaagggaatgttaggaacattcaaatacagtgagaatggtgaagatatggatcaaataacatatgtgtgggaaacatagccaggcgtggtggctcacgtctgtaatcctatcactttgggagatggaggtggacggatcgcctgagcccaggagtttgggaccagccttggcaacacggcgaaactctgtctctacaaaaaaatgcaaaaattagccaggcctggtggcaggtacctctagtcccagcttctcgggaagctgaagtgggaggattacctgaacccaggaggttgaggctgtggtgagtggtgatcgtgccactgcactccagcctgggtgacagaggtactgtcgcaaaaaaaaaaaagaagaagtgtggaaacactagagtctgtggaggtgttgtgtggcctcagtctttaacaaacacattgttctaagctgttgacttattctgggtaaaaacatgtacatgtaactaagatacctatggcctttaacttacccagagtctgtagtcttttggggaagacaaatagatgacctgtcaattaagatacagtgtgatgtggccaggtgtggtggcttaagcctgtaatcctcgcactttgggaggctgaggccagcagatcacttgagcccaggagttcagggtcagcctgggcaccatggtgaagccctgtctctaccaaaaatacaaaaattagctgggcatggtggcgagagcctatagtcccacctactcggggggctaaggctggagaatcgcttgagcctgggtcaaagctgcagtgagctatgatggtgccactgcactccagcctgggtgacagtgagaccctttgcaaaaaaaaaaaagatacagtgtgtgatgtatggagagggcattccagacagagacaacagtatgtgtaaaggcactgagaggacagcatgatggatgttttttctatagtctattttaatttttgggctgattgtattaaacaagtatctttataagcttttgatgcttactatcagaaacattccttgagtacgttctttatcccaggcactgttttgggccctgggggttgtatggggaaaaaaacatgcacacacaaaatccgtgcccttgtggagcttatctttaaacataataagtcaattagaaacaattatcaagtatttattatgtactaggtattgcgctagtccctgtgcttgggaaactgaataagacacatctctgcctttaaacagagtatgacacagacaagtagcctagagacttttttttttttttgagccaggagtcttgttctgtcatccaggctagagtgcagtggtgtgatctcagctcactgcgacctctgcctcccgggttcaagcgattctcctgcctcagcctcctgagtatctgagattacaggcatacgccaccacgcccagctaatttttgtatttttagtagagacgaggtttcaccatgtcggccaggctggtctccaactcctgacctcaggtgatccgtcgacctcagcctcccaaagtactgggattacaggtgtgagccactgcacccagcccgagatgttaacatagtacggtaacaactacataatggataaagaattatctaaaccaaaagttacaaactgatagccacctccagactatttattgatcttggcgttctttcatcttggaatgctcttccccttaggttggcaaactccttctcatatactcatatctcccctactcagagacatcatccctgaccatcctacctaaagctttgtttgcactgtacaagtcctggtagagacactgtgttaggtgttacactatgtaaccagaactcttccctttaaataccgcttgtcacatttagaacagtaaggagccttagtgattatggaggacatcccagttagagacacgaaaattgaagggcagagtggagaagtaaattccccagaggtacccatgagtctaagtcaggtttgaatctgcagcccagtcaggtatctttttcccttgttgtcagtcagcctcttggttgatgaaggcatagttttgaccttagtggatagtattccagagtatggaaggtagcactacactacctgttgctttaacctctcatgccttgtgacattacagagcacctactgtgccaccatggtccagcactgtgaagccctcaaccggtctgtccaagttgtaaacctggatccagcagcagaacacttcaactactccgtgatggctggtaagtcctgagcaaaggctccccccaccttcaggaacagtaagggctggggaggcagtgagtactagctgcttagcactgatacttattatagtctggatccctggtgttatggtaaatagcatgagcttgtcatttggtcacatctgttcatggtgatatgtgtgacagtatcctttcttggtctttgatgtaagatttaaaagtaaatggggccgggcgcggaggctcatgcctgtaattccagcactttgggaggccgaggcgggtggatcacgaggtcaggaatttgagaccagcctgaccaacatggtgaaaccctgtctctactaaaaacacaaaaaaatcagctgggtgtggtggcatgtgactgtaatcccagctactcaggaggctgagaaaggagaatcgcttgaacccaggagacagaggttgcagtgagccgagattgcgccactgcactccagcctgggcaacagagcgagactccatctcaaaaaaaaaaaaaaaaaaagtaaatggacacttccctcagcaccctttcattctgtcccttttgtccttagtcctgctgtagtgaatcatgtggtatattgctgatcactataagtcaggagcctgggtttgttttttttaattctttcaatttgttcattcaagtgtctgttgaacacctgttttacgccagacaccggagttatagcagagaataatacagacattatccctgcccacaccaaccctttaggaaataggcaataaacaacatgatgaacatgttacagaatgtgatgactgcagacaggctcatgagaagtactcattgaggttgctttagctagaattgtcagggagaatggtgactctgaggaggggatctttgagcctagacctgaaggatggtaatatgctcctcaggctgaggaaagtccttccaaaatgagggaacatttagatcaataaatatgccaagctgggtgcagggacatgtgcctgtagtcccagctacttgggaggctgatgtgggaggatcacttgagcccaggagttcaagtccagcctgggcaacattgcaagatccatctctgaaaaataaaataaataaataaatagcctggaggtgagaaaggatttggtattctccaggaaagctaagatgtcagtgagctaaagcgtaatgtctgaaagaaagaagtgggtaggggctaacaggacatgataagatgggattttatcctgttgtcagtggggtgccactagagggttttaagaagaggaaaggattgacatttgatacacgttttggggtttttttttttttttgagacagggtccagctctgtcgcccaggctggagtgcagtgacacaacctctgcctcctgagctcaagccatcctcccatctcagcctcccaagtagctgggactacagatgcgtgccaccatgcctggctaatttttatacttttttttttttttttttttttttttttttttttgtagagacagggtttcaccatgctgcccaggctggtctcaaactcctgagctcaagcaatctgctggcctcagtctcccaaagtgttgggattagaggcgtgagccactgcatccggcctttttttgtttttgttgttgttgtcgttttgtttttgagacaaggtctcactctgtcacccaggctatatagtatagtagcctgatcacagctcattgcagtctcaacctcctggactcaagcaatcctcctacctcccaagtagctgggactacaggcacacactatcatgcctgggtaatttttgtattttttgtagaggcggggtttctccatgttgcccaggctggtctcattgcccaggctggtctcgatttccaggctggtctcaaactcctgggctcaagtgactcacccagcttgacttccgaaagtgctgggataataggcatgagccaccgcacttggcctgatttatgttttaaaaaataactcaggtgctcagatgaaaaatggactctagtgggttgagagtagaagtacaacctgcatggctgggcatggtggctcacgcctgtaatcccagcactttgggaggccgaggcaggcggatcacaaggtcaggagatcaagaccatcttggctaacacagtgaaaccccgtctctactaaaaatacaaaaaactagccgggcatggtggcgggcgcctgtggtcccagctactggggaggctgaggcaggagaatggcgtgcacccgggaggcggagcttgcggtgagccgagatcgcgccactgaactccagcctgggcaacagagcgagactccgtctcaaaaaaaaaaaaatacaaaattagctgggtgtggtgacacatgcctgtaatcccagctactctggaggctgagacaggggaatcgcttgaacccgggaggcagaggttctggtgagccgagatcgtaccattgcactccagcctgggcaacaagagcaaaactccattttaaaattaaaaaaagaagtacaacctgcactgccgctgttgtagttagccaggtgtacaccaggactagggtggtcacggtggagatgtaaggaagcagacagattcaatatattttgcaagttgaattaacagcattttgtgggggattgaaccaagaaggcatagcaaagtaaggaatcaagggtgaggtcttacagctttgttcagtgtatgatataatttcctgtggagggagacaggtcgttttaggtttggggacgttctctttgcactcactaagtgcaaagggaaacttctgatttctgttaatgagtgagcaggttgcggggaggcagattgaagggagaggaggagatgtgaaatgcttttctttgagaaaaaaggcattgtattactttggaaccatttggctgcagcaaacagaaaccactctaagctagcttagttaaaaagaggacttaggatgggcgctatgactgacacctgtaatcccagtactttgggaggccaaagcagatggatggcctgaacccaggagttcaagaccagcctgggaagcatggtgaaaccccatctctacaagtcaatacaaagattagcctggcatgctggcgggtgcctttattcccagccactcaggaggctgaggtgggaggatcacttgagcctacgaggtcaaggttgcagtgagccatgattatgccactgcactccagcctgggcagcagagtgagaccctgtctaaaaagaaagaaagccagattgattgtcccaatttggatcagttatctgttattgattgctgagggagggggtaggaaggtgttgtcagtataaatgtgactgtgaatgaagctcagtcctttgtgaatggagaatgtaggtttgagcacaaaaataagtaaaaacctaaggtagaagattctatatactgattccccaaaattagtaagataaccataccagaattttttaagcctctcctgttggtgattttttttttcctgagacagtctctctctgccacccaggctggagtgcagtggtaccatgtcatctcactacatcctctgcctcctgggttcaagtgattctcctgcctcagcctcccgagcagctgggattacaggcacatgccagcacacctgactaatttttctatttttgtttgtttttgtttgagatggagtctttttttttttcaattttataactttatttgatgtatttgacgatcagtgattagttctcatcgacattgtctgtagatttttgaaagtggtgacaggtacataggtaaccaaagtatatggcttatttggtgaatcttcatcctcattacgttttctggacagctgcacacggattcagtatgggacattccttattcctttggcccagacagctttgttgagcctggtatcaatgcgcacatctggagttcccatctccttcatggcaaatttctgaatctctttgagtgcctgaggggcacgcttcttgaagcccactccatagatgtgcttgtgaatgttgatggtgtattctcgggttaccacttcgttgatggcagaatggccctttttcttctcgccacccttctttgcaggagccattctgctgggtccaagttggaaagtgagatggagtcttgctctgtcgcctgggcttgagagcagtggcgtgatcttggctcactgcaacctctgcctgctgggttcaagtgattctcctgcctcagcctccggagtggctagaactacaggcgtgcgccgccatgcctgctaatttttgtatttttagtagagatggggcttcaccatgttcgccaggctggtctcgaactcctgatctcatgatccccccacctcggcctcccaaagtgctgggattacaggcatgagccaccatgcccagcctaatttctatatttttagtagagacaggtttcagcatgttggccaggctagtcttgaactcctgacctcaagtgatccgcctgcctcatccaaagtgctgggattacaggcaggagtcaccgcacccagcccctgatggtgattttgatatattatctcatagttctcatccttctaacccaggataaggaaagtgaggctcaaggaggtgaaatagtttccttagtgtcattgtgttaagaaatggtaatctgttttctttttttggttttgtacttttttggaataggtaatacatattcacatggttcataatgtaaaagtactaaagagtaagtatacaggaaaacatcttcctctcagctctgcatcccagcaatcagctcccctccctggcagcagccagtgttaccagtttctggtgtgttctttcatagcctgtgcacataaaattcaagatgtatatgtattatgtctatgtagtgaatttttgtcttttattaacaccaatgatagcattcttacacagttctgcaccttgcatttttcactgaacaatatacctaggagattgtattattattaatacttaaagagattttccccatttatggctgtgtagtattccattgtcgggctgtacaataatttatttgctcagttctctattgatggacactgctacagggaaaagccatgtacataaataatttcctgcatatgggttttttatgtaattattaacttttatgttctatttctagtaaggataacaatttttgaagggacacatatattctgggccctatctgtccttttcagacatccgggaactgatcgaggtggatgatgtaatggaggatgattctctgcgattcggtcccaacggaggattggtattttgcatggagtactttgccaataattttgactggctggagaactgtcttggccatgtagaggacgactatatcctttttgattgtccaggtgaatcaacaatttgaatgcattgtcttccttaaagtcttgatagttccatccttagtaggagaaaggagagtgagtatttgtagctctaaactatactgcagtaaagtaccaagcttattcaatggctgtcacttactaagtatatctgttgaggccgggcgcagtggctcacgcctgtaatcccatcactttgggaggccgaggcaggtggatcacgaggtcaggagatcgagaccatcctggctaacatggtgaaaccctgtctctactaaaaatacaaaaaattagccaggcatggtggcgggcgcctgtagtcccagctgctcgggaggctgaggcaagagaatggcatgaacctgggaggtggagcttgcagtgagccaagattgtaccactacactccagcctgggcaacagaatgagactctgtctcaaaaacaaaaaaaaaaaacaaaaaaaagtatatctattaagtgcttgctttgtacactgggaataccatagagcacagatggccatggtctctggcctcatggagctcacatttggcagaactcgagacagtacaaacaaaaagcatccaaatgattatttaatattcagttgtcattgagtattccacaggagtagcacagatcatcacacagataatggcggttagagaggcatctgaggcggcctttcagctgggctggaggctgagggtgaggaaggcagagggcacagcctgctgaacacctcccaggaggaaggaacaaagctgttttaaggcactgaaaaggccagtgtggctggagcataataaacaaagaggcaattgtcatgaggtgtgactggtaggagacagataatagcacatcatggcttctgaagccaaatcgtgaattttcttttttttttttcttttttttgagactgagtttcattcctgtcacccaggctggagtatgatggcgccatctcggctcactccagtctccacttcctgggttcaagtgattctcctgtctcagtctcccaagtagctgggattacaggcacccaccaccacacccggctatttttgtatttttagtagagacagggtttcactgtgttggccaggctggtctcaaactctggaccttaggtgattcacctgcctcggcctcccaaatgctgggattactggtgtgagccaccacctccagcccaaattgtgaattttcaacttgagcctaacctggctttgaccatttatggccctcacttttttccccttgcttttaattgaccatacatatacccacagaaaagtatatatgtcataagtatacagcttgatgaatattcccaaactatagatatctttgtagcacttatttatttatttttgtagagataggatctcactatattgctcaggctgctctcaaagtcctgggctcaagctatcctcccaccttagcctcccaaagtgctgggattacaggtgtgtgaaccatggcatctggccaataacactcatattgattggcagaaaactaaagtgtgaagaacctcattttctttctttctttctttttttttatttttaaagacagagtcttactctgtcgcccaggctggagtgcagtggcgtgatcttggctcactgcagcctcctcctcccgggtttaagcaattcttgtgcctcagcatcccacaggcgcgcaccaccacgcctggctaatttttgtgtatttttagtagagatggggtttcactatgttggtcaggctggtcttgaactcctggcctcaagtgatccacctgccacagcctcccaaagtgctgggattacaggcatgagccaccctgcccaaccagagaacctcattttctacataaaacttaatagttagggattcctatggtggcagtaccttaggttttatgattgctttgagaggctgtgggccccttaaaaatgtgttggcttttatttttgtccatcttatggggaaaatttgtttcctctaacttgatgatttaacatacttgctatttctaaaattcttgcaatactcttcatgtaggtcagattgagttgtacactcacctgcctgtgatgaaacagctggtccagcagctcgagcagtgggagttccgagtctgtggagtttttcttgttgattctcagttcatggtggagtcattcaaggtctgaagctaaatctcttacagattttttttttttttttttttttttttttgtgtgtgtgacagagtcttactctgttgcctaggctggagcgcagtggcgtgatctcagctcactgcaacctccgcctcccagttcaagtgattcttgtgcctcagcctcctgagtagctggaattacaggtgtgtgccatcatgcctggctaatttttgtatttttagtagagacggggttttaccatgttggccaggctggtctcaaactcctgacctcaaacatcaagtgatccacctgccttggcctcccaaagttctcttaaagatttttaaactatgagttcaagcagatgacagttcctttaattattgtgtgattctgaacatttcacaaatgattccagagttactttatcccttttattattaaattataacatgttgttaatcaaaaatagtaaattattatatcatagagatttaggaggaactgcttaccaagaaaaaaactgaggttgctgggtgaagtggttcacagctataatcttagcactttgggaggccaaggcaggaggattgcttgagcccaagagtttcggacctgcttgggcaacagagtgagaccctgtctctacaaaaaatataaaaattagctagacgttgtggcacatgcctgtagtcccagctacttgggaagctgaagtgggaggatcgcttgagtacaggaagcagaggttgcagtgagccaagatcgccaagatcgcaccattgcacaccagcctgagtgacagagtgagactctgtctcaaaaaaaaaaaaaaagaggaagtagtgggggagaaaaaactgaagcagatggctattttataaaatagtctatttttaattttctgaggaccttttgtccagtttatgaactaccaagatcaaattttttattaatagctcttaaggaatattagatgggaaaggaaattaaaatgctgtctaaattgaaatttgtgatcactgtatgttatctatatcttccctcacctttgggaaccaagaatcaagcatttgattcccaatgatttgggaacatttttttctatatggctagcattacttttaataaaatataaataattttgccttttccacatgttctgaactggcatttctttttttttttttttttttttgagaccaagttttgccgttgttgcccaggctggaatgtggtggcgcaatcttggctcacgggaacctccgcctcctgggttcaagtgattctcctgcctcagactcttgagtagctgggattacaggcacatgccaccatgcctggctaattttgtatttttagtagagacaaggtttcaccacgttggccaggctggtcttgaactcctgacctgaggtgatctgcccgcctcagcctccccaagtgttgggattacaggcatgagccaccacgtccagcttgcatttcttttatttaggccagttctgttccagtgaggaatagaagactctttatgcagaccaggtaactgttggcaacagtcagttcatcttcccttttctgtttcctccttcagtttatttctggcatcttggcagccctgagtgccatgatctctctagaaattccgcaagtcaacatcatgacaaaaatggatctgctgagtaaaaaagcaaaaaaggaaattgagaagtgagttcactgttcttccattattatcagatctcagttgcagagatgaaccttctgttttatttagatgggaagtttggctggtttataaacctagtctcctgaattcatcagtctttctgtcttttaaagatttttagatccagacatgtattctttattagaagattctacaagtgacttaagaagcaaaaaattcaagaaactgactaaagctatatgtggactggtaagcttttaaagtttggattttttggccaggtgcagtggctaatgcctgtaaccctagcactttggcaggccaaggcagcaagattgagtccaggagttcaagaccagcctgggcaacatagtgacaccctatctctaaaaaaattttttaaattaggccaggtgcagtggctcacacctgtaatcctagcactttgggaggccaaggcaggctgatcatttgagatcaggagttcaagaccaagcctggccaacatggtgaaaccctgtctctactaaaaatacaaaaaaaaattagctgggcatggtggtgtgcgcctgtaatcctagtactcgggagcctgagacaggagaatcacttgaactcgggaggcggaggttgcagtgagttgagatcatgccactgcagtccagcctgggcgacagagtaagactttgtctcaaaaacaaaaaaaaattaggccaggcgcggtgacttacgcctgtaatcccagctctttgggaggccgaggtgggtggatcacctgaggtcaggagtttgagaccagcctggccaacatggtgaaaccccatctctactaaaaaatacaaaaattagccaggcgtggtggtgcatgcctataatcccagctattcgggaggctgaggcaggagagttgctggaacccaggaggtggaggttgcagtgagccgagatcttgtcattgcactccagcccggtccaacaacagcaagactctgtctcaaaaaaaaaaaagccaggcatggtgctgcacgcctgtagtctcagctactgtggaggctgaggtgggaggatcccttgagcctgggaggtcaaggctgtagtgagccatgatcagatcatgtcactgtgctctagcctaggcagcagagaaaccctatctcaaaaaaaaacaaaaacaaaaagggcgccaggtgtgcagtggctcacgcctataatcccagcactttgggaggccaaggcaggtggatcacttgaggtcaggagttcaagaccaggctgaccaacatggtgaaaccccgtctgtactaaaaatacaaaattagccgggcatggtagggcacacctgtaatcccagctactcaggaggctgaggcaggagaattgcttgaacctggaggtggaggttgagcaacaagagcgaaactctgtctccccaaaaaaaaaaaaaaagaaaaaaaaagatgaagttttttgggtttttttcctaaacacctggtcaagtgtttgcctgtgtccagtcatttgccatataaaaagcacagttcaaccctattttctgcaaagtggagggaaaagggctgtgggctggtcagtcagcagtttaatttagaagtagttattggtagtggccaataaataaactaacatcttattatttcaagccatttggagagttcaggactgtttgttctcttgtgaaatttccagtggttgttgaattcagataaatagccgtgaaacagtgtctagttaaagtaataagctaacaagtgttctagcagatcagaagtcagaaaaatcaatgatttactctctgtgtctagctatcccttctcctcctcttcctgtaaacacatcagtgtttttattcagaagtacaaatggttataaaactcaaatataagttgaaaattatgtattttgcacaacttcagaatgaacttttcttgaaatccacaacttgtagattgatgactacagcatggttcgatttttaccttacgatcagtcagatgaagaaagcatgaacattgtattgcagcatattgattttgccattcaatatggagaagacctagaatttaaagaaccaaaggtaatttctggtttggggtgtttgttagcttttgataaaaatatttgccagcactcactggactcttgcataatccaggcgactccttaaattagttttttgtcttattgatggcagttaactgggcttttctgggtgatctctgaaattaacactgtactccacaagcagtatcacttttactctacttttgttgaggcagtatgatgaagcctgtgtgtacttagagcttgggtgtatgtgtaaagaggaggtgaaattgggctgccctcacgtatgtcattgagaagactaatgatagtatcagctaagcatttttttatttttttattttttattttcctgaccactagactaccagcgaagtaaagcactatcacaggaaattagccaagaatcgtcttgaatgtaaattcaaatgagaaatgcttctgggatagaagcacattaatttactacataactggaaaaaaatctgtcaatcatgccttttcttactattaacagttacctataagcagcacctggagctggtgctgggtaattagttccacatagggtattacctgaaaaatatataaacacatactagttctgactgaggggaaatgaatatattttctattttgtgtttccattgtgtcaggaacgtgaagatgagtcttcctctatgtttgacgaatattttcaagaatgccaggatgaatgaagagtttactaaaagtaaccatctaaagagcttgtggccaaaccagcagaacattcttctcttcaaaggatgcaatagtagaaagctacttattttaatgaaaaaaagtaaaacttcgttctttatcagcctcatgcctgaatcaaatttttaattattctgaaactgctgctgtttaaagtggaatcttttagtattataacagcatcactttagattttgtaagtcaaaattgaaatgaatgcacatagatttatatataaattagcacctgagctaaggttaaggctggtctaaacttattttcactttttgtattatttttgagatgcaggaattactgtaacaaaatatgtatgtccgaagggaaaaagctgcaaggatatatataagaccactgcttatctgtatcttcccattttcctatattgaaaatgtatattatttatataacttaaaaagtaaaaataactatgttttgagatatgtatgtgtatatataaaagaaacaaaggtttttaatgattcttggacctagataacaagt

SEQ ID NO: 116 - DNA, 23170 bp, Homo sapiens
  source 1..23170: mol_type = other DNA
taaagaagtcccggccgggccgctgcactccccgcgcgcatccgtgcgccgcccgaggctgtctaaggagtcggcggccattttgttcttctcgtggttccagtggggagagaaggaggaagtagggagcggggtggcaggggggggacccgccgcggctgctgccaccgccgccaccaccgcctctgctcgtggcgtgggaaaggaggtgtgagtcccgggcgcgagccggcggcggcgccgctgcgggagggtcggcggtgggaaggcgatggcggatttagataaactcaacatcgacagcattatccaacggctgctggaaggtaaggggggcggcgggcggctgaagggggaggcgggcctgagggcggcaggcggccccgggggctcgagggaggggagttgggaggccggttgggcttgcagcaccgtggggagtgagctcctcgagttggcccacgggccggggactgcagccggagggaggccagcccgggattcccaacttgtcgccagctgcggaccctccaggctccgctcattcattgcacgaggatgcaggcttcctcccggccgtggaatttgaaaactccgctccccacccccacgtttcccgcccctacccgtttgcccccgcgcactggacgggtctttggagcgatggttggggatcccagtccagcctcctggacgacgtgtgccgtgctgtgcgagatggacttttcggtgctcgtcctctcggaaggcagtttgatgagggcatgagttccgccgggtttgggggctcttttcctgcttgcttttatttttatttttcgtggttctggggtcttggggggcccatttcttgttacttggtaacaagcgttcatgtctcaagaggtgtgagaacctgtcttcgcctgccctccaaatccttttaagttgttctaatcttggagaggtctccgcgctcttttcctgagcgtgcatctgaagaggaagccaacgaggctgacgctatcattatctttccaatgtgccaggctctgtcttaagcactttgcgtccatgaattattactgtaatcataactgacgcttctaaagcgcttactgtgtgtcaggcattctttgagcacttaagacagatttcatttaattctcccacccattgcaagatatttgcaattttttttgtttttgttattttacagaagaaactgagatgaagtcacttaaccaaggtcacacagttagtgacagttggatttcaaatccacatagccgggagctagaaccctctacagacaacactgtcaccttatgtaggaaggaaggtggccagtggttaagtaaaggttaatagaaagctttaaatttcggctcatctaagacttgtgaggtgcctggcaattgattcatgttgatgtgggagaggggcgaggttcagcttttaaagacggaagctgaaatgagctgctttcagattcaagggcatgtcaacggatgctaacatcttatccaagactttgtaagaattcagtcatatcccctaacttggacacttcataatgggaacttggcagtttcaactgctttttgcctttatacagtcctaaaatattgttggactataaatgctgtgagtggtggagtcgagggcatgaacagttggacagctctggtgttagaatttacagatcttttaaagtaagttattaaaatgaagctcctgaaaatatctcgtccttttcttaatctgtgcattctttccttttatgctgtctttaaaaaaaaaacaacaaaaaaaacactaaatgtcattaaggacccctgaaatgctcttgaaatgttattgcaggtgaaaaccttgtattgtaggtgaaaaccttgtcattcttttaatgccaggtatttatataagaaccatactttttcatactagttaatatagttctttaatttattcgaggcagcagttggtcagaaactgattaaaatagtttgctgtaagaaaggaactttttgttaaatattttctttctaaattttaaaattctgcttatctctgcagggatatgtgtggctttatttctctgaggaaacaggaaaagttggaatttgcatggattagaaacattagaattttaagatcatctaaggcttgctaatttaagttctggtttgcccataactgcctctattcataaacagcttttgttaattttgatctttaaaattgtaataagtactttgcctggtaagtaatgatacatctaaaatgagatcattgtttcttaatagttcctcttgttatgtggcacttgaaaaccaggttttcttatatttcattttttgctgaaattaataaagcagtgcattttaatgccttgggaataggctaactgcaaagtatacttaaatttctttttttctcgtgggtgttaaattggcagagaaacagttgaagatgatccattgaggatatgtagatatctaagttaaatgatgttggtaataaattctgttttacaattttttatttaaaaaaattaaatttaataatttaaaatagaaatgagagtctcactgtgttgcccaggctgttctcaaactcctggtttcaagcagtcctcgcacctcgtcctccccaggtgctggggttatagtcatgagccaccgtgcccggcctaaattttattcttttcataatgcccccaaaaccttttttttccctaaataagatgtaagtatatctgaaagtagagggaatatgacttgtgactttggccagatttttttacgtgtttagaattgatcttttaagcttgcgagcagtataacctagttgagaagtagctgagtaatagtactaaaaagctaactgaaaagtgaagtcttaagaaaaacagcatgttggtttagatcttagtcactaacctttgcagttcttttcttctctgaactctgagtatttctgtaagcgaggcatcacctctgcaacccaccatggatgcttttatccaagctctgccttgctgatgataaaacttaaggttgttaactccttagtataactgatgttagttatttaaataactacacagtaaaacggcattttgagagaaaataagccagctgttgatttggtctgatgtattgaagacaagtgagatttggggcagttttactttgtaaatgacctccttcaaggagccatggtggctagcattttttttgcatagcaggtggttgtaacttacttcacatcttggtttgcaagaagcatctttgctttgaagaaggccattgtcaaagtgcaagaccatgtcaggctctgcagaattgcctgacttgttttagtgatttaaatatgatctctgccctggctcacagaaagtgcttacagatttaatcctctgatacataagggttgttctgaaggtagggagtgttcagatattctgaaactctaagattgtttaaataacccatatgttcatctttttgatgcagtataaaacgttcatattctggtgtttagccatccctggtcctaaagataataaaggacaaacataatggtttaaaaaggggaaggtttcttaatatgctaaccaaaaaaaaaaacaaaagtaatctttcctaatgaacacctgtaattatttatttttttattttattttggagacagagtctcactctgtcacccaggctggagtgcagtggtgggatcctggctcactgcaacctctgcctcccgggttcaagcgattttggtgtctcagccccctgagtagctgggattaacaggcatgcaccaccacgctcggccaagtttttgtatttttagtagagatgaggccaggctggttttgaactcgtgacctcaagtggtctgcccgcctcagactcccaaagtgctgggattacaggcatgagccaccgtgcccagcctgtaattatttgtttacagagcaggtaatttttacactcacatccaagttgtcagtttctaattccctcattgataagaactctgatgtgagcccttgcccttcctttcccatcagtatgttggtcatatgcccacttcctctcctcctaggcaaggtgggaaagctctgttggagacagatgatctgcagcttgcaggagtccttttttaaaccacagcattgaaaaaggattactctccttgtgcccgcagtgccctcttgcctgtcagtagcaggaggcagcagtgaaatctgacagaattgtgtgtgacgttgtgcttgcgggggatgtgacacacaggagcgctctgcattctgagcctagggtgttcctcctcataactgggcaaatggacatgcagttgtagcccagcagtggtcagctgtagaaattagtgaggtgatttgatgtctttgaaagcacagtcctattacaacctgtaacctgttgtgcagaatcacagtaccagtcagcccacttgactaggtgaggattcctgatggtgaagcagggaaattattgatgttatgtggacttcaccatttaacttaatttacaattgaggccattagttgacctgagagattaaaatatgaaggagataatattctgggtgtcagtcgctttgtagataaagaactggaaagtcattcaagaccaagaaggaaggatttcatttccatggagcttatggaattccaggatagagtttgatattttaagatcatacctctgtatccaaagcatcaagaacagatgatgtgtttgtggatcttggtgatttgtctgaaatctccagcttccccacttcactggggtttactgtcatccctcttctagaaggtagtggtcatcaccgacagtaaagcttacagcaaatgaaaactcaaaatgtagtctactcagtggtatattaccgaaatgtgttcttagactgtgaaaattaaagtttttaatggattggctttactcgaggtgtagaaaactcaagatgctttattgagaacagtagacagtgttttgcagccacatcctatctgccttgaaaaaaatggtgtcacttttattttttttactagagactgggtctcactctgtccccaggctggagacctgaactcctgggttcaagcgattcttcctcctcatcctcttggctagccggatctataggcacacaccaccacacctggctaatttttttttctttttctttttttcttaaagacaggggtgttgcctaggctgttctttaactcctggccacaagcagtcctcccacctcagcctcccaaagtgctgggattacaagcgtgaaccacagctccctgccttggtgtcacttctcaatgcctgaagtgtaaccccatctgttaggaaaatcaggatgggagagggcagggtgtggaaacaattgtgataatcagaacatggaagtctttctgctggtgactttgcagagaaacttaaagggttcttttttcttttcttttcttttttttttttttttttttttttgagtctttctttgtcacccaggctggagtgcagtggcaggatctcggcccactgctgcctccaccacccaggttcaagcgatttctcctgcctcagcctcagttgttgagtagctgggactacaggcatgtaccaccatgccctgctaatttttgtatttttggtagagatggggttttaccatgttggccaggctggtctcaaactcctgacctcagctgatccacccaccttggcctcccaaagtgctgggattacaggcgttagacaccgcatccggcccaaaggattcttgataacatttttgtggtttatactttttgcagaaaagaactcagtcgtttatgggaatgcttaatgttggaagtatttactgttttttgttttggtttgagtcttattttcctaaatctgtcaaatatcatgaggctattgatttcactgaaatgaatatgatgtggcatattgttaaaattatcacctactttttaacaggattattttaaaacagcaaaatcttcgttggcttatttttataccacttgtgcctttcttaggttctgaaacttcattagaattcagctagggcttttttagtatatgctatttctttaatatgtttttatttaaacaattaaggggcctttatgtggcaaggaaaatacttttttattccttataaataatctcaaacttgtcttaaatttccttccatagtttccatctttgctttgctttttgccagcagctaactttcaaaagttagtattgcttatgagaaagagctggtgttgtaaataatcaccaatgctattttatttatttatattttttgagacaggatctcactctgtggcccaggctggagtgcagtggcatgatctcggctcaatgcagcatctgtctcccgggctcaagtgatcctcccatcttagcctcccgagtagctgggactacaggcgcacgccaccatgtccagctatattttgtatttttggtagagactcaatttcaccatgttgcccaggctagtctctaactcctgagctcaagtgatcctcccacctcggcctcccaaagtgctgggattataggcccaagccaccacatctggctgctattcttttataattcaaatttttaccagtttgttttcaataaaaatgtgtggaagtttttattattgctcgtgtcagtgatttgccagaaaaatagatcagatacatttctacagagcaaccttcgcttttaacagtaataatacgttttcctgaatctccctttctagccagataaagaaatattaatacttctactgaaaagtcacatccttaggtctaagttggtgttgcttttttgttgttgtttgtttgtttgttttgagacggagtttgtttgtttgtttgtttgttttgagacaaagtcttattcttgttccccaggctggagtgtgatgatgcgatctgggctcactgcaacctgccccgtgggttccagcgattctcctgcctcagcctcccgagtagctgggattacaggtgcctgccaccacgcctggctaatttttgtatttttagtagagacggggtttcaccatgttggccaggctggtctcgaactccttacctcaggtgatccgcccgcttcggactcctaaagtgctgggattactggcatgagccaccgtgcctggccgagacggagtttctttcttgttgcccaggatggagtgcagtggcacaatctcggctcactgcaacttccacctcccaggttcaagtgattctcgtgcctcagcctcctgtgtagctggggttacaggcgtgcaccaccatgcccagcaaatttttgtatttttagtagagatggggtttcaccatgttggccaggctggtctcgaactcctaacctcaggtcatccacccatctcggcctcccaaagtgttgggattacaggcatgagccaccgtgcccaaccttctcctttggttttgaagttcaatgtagaacagattcttaattgggaattaagaatgcaccactagatgtagcatcgcggcctcgtgtccttaagctctgtgaccttggactaagtcactgtaaaatgggagatgacagtgcctgacttcctaggatcgttgacaggattgaatggcaatataaagcccttagtacagtgcctagtggataagtgctcagtaaatgttaactacaacgagtaaataattctgtttgatggacattgaaaatagtgaagtgggccaggcacggtggcgcacgcctataatcccagctacttgggaggctgaggcaggagaatcacttgaacccaggaggtggaggttgcagtgagccacgatcgcatcactgcactccagcctggcaacagagtgagactccatctcaaaaaaagaaagaaaaaaatagtgaagtgaatttgtatgcttttggctgatatggcaactttttttttttttttttttttcttgagatggagtctcactctgtcgcccaggctggagtgcagttgcacgatctcagctcactgcaacctccacctcccgggttcaagcgattcttctgcctcagcctccgcagtaaccagccaccacgcccagcctgatatgacaacttttaagaactctccagtgttcacttggactgccaagccccatttgaaatctctgttagacaattcaacgtgaaatttaagagtaattctagattttcatactttgaaaaatactccagtaaagcctggtaagcaagtggccctattgttttataattttatagtgcagaaacaggctttttgctcatcaaaagtatatagtctgggctgggcacggtggctcacacctgtaatcctggcactttgggcgccgaggcagtggatcacctgaggtcgggagttcgagaccagcctgaccaatatggagaaaccccatctgtactaaaagtataaaattagctggatgtggtggcgcatgcctgtaatcccaggtactcgggaggctgaggcaggataattgcttgaacccgggagacggaggttgcagtgagccgagatcgtgccattgcactccagcctgggcaacaagagtgaaactccgtctctaaataaataaatatatagtctggaatatatgtttaattctaatgccaccagtcaacactacttaaagacttatccagatttcagtcatgcaacaaattttgagcacctgctgtgtgctggctatggctggtgtacactacagagcaggactgctgctgtgggtttacattctaccagtgggtccagatgagccggcagaagcaaactggcaagtataaaacaaatacaagcatggttgagggggtgtggtgggtagtgacctgatgttgagagagcctttcaaaaagcatgcagcaagcttgtgaggggagaggagatggatgagagaagcttttctccagggtgaagtgtggtatctgagcagaggcctgaagtctgagcagttgtatgataactgatggaagatggttttggcagtttctatctttatataacttttttctttctgctaattttagggaatttaagaagctttcagaccatgtttgttgatgtttttcataagcaccattctttaaatacaaatctttattttctctggaaaagctgcatctaatcttaatattaagagtaatttttaaggccaggtgcagtggctcatgcctgtaatcccggcacttggggggccagagcaagaggatcacttgagcctggaaggttgaggctgcagtaagccatgatcatgccactgcactccagcctgggcaccaggcttcttcaaaaaagaagaatttttaaattgttgttagtattgcttttgctttttactgatctctgaatgtccccacccagaggacaaacagaaacagaataaaggagttaaaacaaatataaactatgttcaaaggtgacagtggagagcgtccaaagccaaaaaaaaaaattgttagcaacattgatttcatctgatggcattgactaactgcaatagcattcataaaacaaagcttgccattatatggtatgagctatttatcgcagaaatactctcctagaagacttagagtcagctattcattcataagtgtgggactctgctgaaaaaaattcacgttgaaaccagaagcttctaggatttccttcctagccaaaaataaagcttcctgctgggcagtctgcccaagtttttggttaacttatggtgaaatcactaatgattggcattttctggccaatgaagtggggatcccatctttcaccgggagtatttcctgagttctaactctgtatgtgtgtctagagagaaaaaaaattacttacgaaaaaaacatttttgttgctcagttgctgttttattaaatatgcatctgtttcatatctttcctcgaagactattattactatgcttttattgcttcttgttgtataatatttttatcagaacgagacttagttacatattttggggtccaaaagtgaactttataactgtaaaattaaggtacatttagcagttccgtgctactttatctgtatctaatgactatccagtctgttacaactggaaccaaaacaaaatttctttcccacaactacctacgtgctgacaagtgagttctgttgcaaagtttgtactttgatagaagaaccctaagtgctctggtggtgtggatgccccatgctgtgcaatgatttctttctcccattattatcttatctgttcaaattattagggaacgtgctttcttacagtatagcacatgactgacatcctttgccctatatagacatgagcataaacacaaatgcaggcccagaaaatgcatggcaaaataagtacaatgaaccaacattttcttaatgaaatgaaaacaacactaacattttttcataggtaaattaaatcagagatcctcaggaggagatacccatggtcctctggaaaacactgatgggggagggttctgagtatttccaatcctgtttcttttcttttcttttctttccttttcttttttttttttgagacggagtctcgctgtgttgccaggctggagtgcagtggcgcgatcttggctcactgcaacctccgcctcccgggtgcaggcgattctcctgagtagctgggattacaggtgcacgccatgttggcgaggatggtctggatctcttgacctcatcatgatctgcccgcctcaccctcccaaagtgctgggattacaagcgtgagccattgcatctggcctgcagtcctgtttctaacagcattcgcacagacaggatggctccttttttggaatactataaaagaagtcttacttggtatcgaagatgcaattaagtcttgtctaagattttaagattctaattagacattaaaaccatgtttattataagtgtcctgaaaatgaagccactcagaaagctagttaaaccatgtttttgcccctttatctaaatctcgtattgtattttgtattttggcttcattggactaattgcgatttttctcttgcagtgagagggtccaagcctggtaagaatgtccagcttcaggagaatgaaatcagaggactgtgcttaaagtctcgtgaaatctttctcagtcagcctatcctactagaacttgaagcaccactcaaaatatgtggtaagtttggggcacacaggttatcttttgttacatgattgattaactgagtcaaggatatgttgatgaccttgtattagctagcagaatgattatcctgtttgcgaatagcttggaactacttaaaagtaagttaaatagtagctttagaataaatacctctaatggacttagtttacttagatgtacttcagatttttaaaaaaaatattttgctgaaggaataaacattgcaaaagaaaaaaatgaaactaagaatggagagctgaggaaaggtctgaactacatggatgtataggaatatgtttaagtttaaagcaacactggttatagctaaaaatagaacttccttgatactgattttgtggttctgttttctgcataatagaagcaaataatctgtgttttaactcaatgtaaaaccaaactttattcgtttgagtaatatattcttatagcatatttgcattgataaaactttgtgttcatgtttttaaaagtaaaatgttctttggcattatctagcagggagaaattgaaagctaaatgcattgatgggtggggggtgggggtggtgtgtatgtgtgtatgtgcttttgttcagatggggccaagactcactagaagtgcagcagttctgctgacacagtacccagagactgagctgtcagagatctgatattgatcagtcagcctgaaagggataccatgttacttggcaagaatgcatgcttggacataataaccctttccacagaataaattcttaatagttgaattttatgtgaggttctggacatacacatatacttaaaatttttgttaagctcagttgaactaaatatgatataagattggaaattacttagtgttggctgcccagttaaactctcattactagaggtcaatgccattgtacaatgaatatttaaagaatgtctttccaaagctttgttagtggattgagctttaagtatgggaacactgtgtaacaaaattcttgcttccaggtgacatccatggacaatactatgatttgctgcgactttttgagtacggtggtttcccaccagaaagcaactacctgtttcttggggactatgtggacaggggaaagcagtcattggagacgatctgcctcttactggcctacaaaataaaatatcctgagaatttttttcttctcagagggaaccatgaatgtgccagcatcaacagaatttatggattttatgatgaatgtaagtacttttctatatctaaggaagagttattgaaattaagatatttatcataaacaattatcacatacttctgttaggaattgtgagagtttagatgcagtggtatcatctctcatgttttctatttcatcaacttgtttttagcttagcttttttaggggggtgggggaacggagtctcactctgttgcccaggctggagtgcagtagcaccatcttacctcattgcaacctctgcctcccaggctcaagcaatcctcctgcctcagcctcccaggtagctaggactgcagacatgcatcaccacgcttggctaatttgtgtatttttttgaagagatggggtttcaccttgttgcccaagctgatctgaaactcctggctcaaggaatctgcccgcctaggccactcaaagtactgggattactggcgtgagccatgatgcccagccagttttttctctcttgggtagaaaaataacactgccgctgtaataaaataaggtcttggattcttttatgatgtgatgatcagattaggaagtaatgatcatggtaatggttgctttaagatttaaattgttgtattcacagataacttaattcttagtagaaatctgagaaccattccaaatagtttttttaagcaactttattatgtaatttcattccataaaattattctgttaaaagtgtacaattcagcgatttgtagtaaatttatagagttatgcgaccatcaccatagtccccaggcaaccactaatctactttttgtcttttctagagaatattgcatgcaaatggaatcttgcaatacgtaaataattagtttttgaaattattatagtttttctccttctggcatatccacacccaggaagaatggcaataactttcctaaaactaaaatgtgctgaacaaagattatttttacagtattttacacattttgtgacccattttggattgtttaattaaaggtatacttcgatttgactattgacaaaacacagttcttaaagctttgaaaataggctgggcacagtggctcacgcctgtaatcccagcactttgggaggccacagcgggtggatcacaaggtcaagagatcaagaccgtcctggccaacatgaggaaacctcatctctactaaaaatacaaaaattagccaggcgtggtggcagatgcctgtagtcccagctactcaggaggctcaggcaggagaatcacttgaacccaggagtcggaggttgcagtgagccaaaatcacaccacagtagtccagcctgggtggcagagtgagactccgtctcaaaaaaaaaaaaaaaaaaaagctttgaaaatatcagttcagtaaagggtttcaagtcagaaaaggttttgaatctttaccttcaccttccttttgtgctcatcattgctgccaggacgggtttcaggtttggagtgaagaggtggttaaggaacttcaggtacttggcatttgctaatatgattatagggatatcagcaaagggttgtccctgtggccctcccctagaccacatcgtaacctagagtctccagatgcagtgtttttccatctcaattcacatagatatgttgagctagcacatttgttagaagtgcatcctagaaagattatattcacaaactgagcccttctactaccaccctttcccacaactggatgtttgcttggtctgtgaccttgagatccagctgataagatggggtggcaggaatcatcagggacaaaaattctatgggttctggactgactgatagcattgaacttgtacatgaaaggtattcaatattaacagtgattctgtgtcagagaagtaccagtaagccagttactactccttaggtagtgaaatgcaaggcaggtgtgatgggttttttttgtttgtttttgagacagagccttaggctggagtgcagaggtgggatcatagcttactaccacctgtaatttctgggtttaagcaatcctttcacctcagcctccctaagtgctgggattacagtcatgagccaccacacccagccaacactgtgttttggatacttattccaagtgttactcttgagttttttgttttttgtttttttttttttttttgagacggagtctcgctctgtcgcccaggctggagtgcagggcgcgatctcgcctcactgcaagctccgcctcctgggttcacgccattctcctgcctcagcctcccgagtagctgggactacaggcgcccgccactacgcccggctaattttttgtatttttagtagaggcggggtttcactgtgttagccaggatggtctcgatctcctgacctcatgatccgcccgcctctgcttcccaaagtgctgggattacaggcgtgagccaccgtgcctggcctgctcttgagttaaaggattccttttacatagctgttagcccagcaaatacttttcatgtttgcactgatgaattcaaatccagttgacctcatttttgtgacgtgtatcctaatgtaatgatactggctgcatcagtttcggtttctacttaatgcagaggcctttaaaaaatgacttagaagatcagtgttggttggtatcagtttcgactcctgtttggtcatcaacacaatttgtagatcttatgctcaagcttcctctctctcatcaggcagatataatttgccatccagtctacttgtgggcatgaaagtgcccttgacataggtggcttttggttgaaggcttgcagacatttaatatatatataaaatacttaactaattttattaaaatgaaaagttgtattcaaatgttgattttcatgggacaatttaaaaaccactgcctgttttccaggtacataagtactttatactaccatttcttttttttttttttttaactttgtaaatgtgatggaaaggctgaggtatatgttgttgggtaaaacatgagtgtttgttgatctgtttctgctgccgtagctgtctgatgtacagtaatgcgaaaccgcattacaggttatggctcagaatcttaggatttggaagctaggcgattaccctggctaaacctttcaggagccagatgttcctagtggtctgaggtagccttagggaggaaatgaagagagaatagaaagaggcaggcccacgcttaaagtgctgagagggaaaaggaggaaacaaactgatttttgatggagaagccagcaggaatcagcaggagaagctggagtatgtggcataactaaagaatcaaagccggggcgtggtagctcacgcctgtaatcccagcactttgggaggccaaggtgggtggatcacttgaggtcaggagttcaacctgatcacaagaggtcaggaggtctgaccaacatggggaaaacccatctctattaaaaatacaaaaattagctgtggtggtgcacacctgtagtcgcggacactcaggagattgaggcaggaaaatcactggaacctgggagaccatggttgcagtgagccaagattgcgtcgcttcattccccctaggtgatgcagtgagaccccacctcaaaaaaagtatccagaagtgaagctgaccttggggaaagaggaagtcactgtcactggggagctaagacagcagctctgtttttataatacaggttaagtattccttaccgggaatgcttggcactagaagtgttgcaggttttttgtttttgtttttaattttggaatatttgtgttataattactggttaaacatccctaatccaaaaatctgaaatccagaatgctccagtgagcatttcctttgagcatcatgtgagtgctcaaaaagttccaaattttggagcatcttggattaaggatactcatcctgtggtggtagtagtagtagtattgctgttggaaatgggagttggtggtttttggagattgcccttcagcctttcgtaagaaggagtttgcttttttttgagacggagtttcactcttgttgcccatgctggagtgcaatggtgcgatcttggcttactgcaacctctgcctcccaggttcaagcaattttccttcctcagcctggcgggagaagtttgttaaactttccgaaccccctagtgaaggacctctaaagaaatatgcaacagggtgaaccatagtcagtgttagacccagtcattgagaaaccagaaattattaggagaaaagataacactcctctgcagagagaaggcaaacatttgttgaatttacatttcatttcaagccctgtggtaaactccctaagctgcttgatttgcattacagggtgggaggtgtggttcaggtcagttgcttgggctggctctaactctcaaaggagaggtataggtttaaacctttagatgtccctgtattccccaggaaaagagactaaggacaaactcttggtttgttttgtttgttttgttttgttttttgagacggagtttcgctcttgttgcccaagccggagtgcaatggcacaatcaaggctcaccgcaacctccgcctcccaggttcaagtgactcttctgccttagcctcccaagtagctgggattacaggcatgcgccaccacgcccagctaatttttatatttttagtagagacgggatttcttcatgttggtcaggctggtctcaaactcccaacctcagatggtctgcccgcctcggcctcccaaagtgctgggattacaggtgtgagccaccgcgcctggccaaactcctggtttttaaagattgtgcttagtatagtaagtacaggaaacaaaggcatctggacaattggacaatcctcaaccaatccagagaaatttgttcttgcaaggtatgtgactaggttttaaactcagaacatcagtttcctgtagaaacagtgcatagaggcatatttctgtcagaactgcactctgactccagaatgtgtggatgcctgtgctgttgagggaacatgaccatcctgtgacatcaggcctgtgggagcatgtggagtctgtgcagtgttggaaacaaatgccctgtagtgcctgtgagaggcagccactgccgtgtgatcattgtgcctcctgctagagtactgagggctggggatcctctggtgtcagtaggttattgaggggcatatatgggggatgggtgctaactctcaggtttcctcagaaggaaggtcataacgccacatgtgtaagttcgtaattgaattcagaagtaggggactagctgcggtgagattggacagagcagacaatttcaaacagaattgatgctcccagataattcctgggatttgatggcagtccttaatcattatcaaatctggaattctggtttcatgcttctgtggaatttaaaaagatttcatgtgaaaatgtaagtcattgcttttagatcagatatgtgtctctcctaaaccccttccctctaggagagtctttctttaaagagatggggtctcactatgttgcccaagatggtcttgaactcctgggctcaagccatcctcctacctcagcctcccgaagtgctgggattacaggtctgacccaccacgcccagctcttattttaaaagagccttaaaataagatggttttattaagattcttaataaaaacatagtttcatttgcttaaaaggcacccagaatcttgctttgggggaagttaatcctgagagaatgagcctacggaacagtaatactctctttttaatgtaatactctctttttaatcacaggtaaaagaagatacaacattaaactatggaaaactttcacagactgttttaactgtttaccgatagcagccatcgtggatgagaagatattctgctgtcatggaggtaggtgggctgatttttgttccaaataggttttgatcccttccaaagggtgaacactttaacatttgtgagttatcattgggatgactttctctgacagaacactctcctttgttgatgtgttgcattgcactttcactctgatacagccaggatcatttggataaaaatcttaaggaattgatttattacagggaattctagactctgtaagctaggtttgaaaatagagcagaaaatttttatttttattttattttttgtaaggatgagttctcaccacgttgcccagtctggtcacaaattcctgggctcaagcagtcctcctgcctcggacttccaaagtgctgggttacaggtgtaagccactgtgcccggcttagaaaagtttttggttttttttgtttttgtttttgttttttgagacagagtctcgctctctcacccaggctggagcgcagtggcaccatctcggctcactgcaagctctgcctcccaggttcacgccattctcctgcctcagcctcctgagtagctgggactgcagccacccgccaccacgcttggctaattttttgtatttttagtagagacggggcttcaccgtgttagccaggatggtctcaatctcctgacctcgtgatctgcccgcctcggcctcccaaagtgctgggattacagacttgagccaccacgcccggcagaagagtgtttttaactataaaatgaacaatgtgtaatttgttgtgccagagatcctctagaacactcaagatgtgagtagattttcccttgattgttttttatcctctcagaactttctctgacttggattttaaaagttattttggccaggcatagtggctcgcatctgtaattccagcactttggagaggccaagccaggaggattgcttgatgccatgaatatgagaacagcctataacatatcgagacccctgtcattagaaaaagttgtaaaagttagccaggtgtaatggtgcacacctgtagccgtagctatttgggaggctgaggcgggaggatcgcttgaacccaggggtttaaggctgcagtgagctatgatcgcaccactgcactccagcctaggcaacagagcaagaccctatctctgaaaatatatacatatatatgttataagctgttttgctttgctcagtggttgtgctttctataatgtaattaaaatagtaattgcaaagagaatttcttttcctgtatggtctgaaattaatcagccatcaaaaagcctgcataatgtcttttatctctgtgcttctgtacttaggttttggtagagttggatacatggtttttaactcttacaatatgcatcccatattgtaactcgatacaataagctcttgtagattttagccatcaaaaagcctgcataatgtcttttatctctgtgcttctgtacttaggttttggtagagttggatacatggtttttaactcttacaatatgcatcccatattgtaactcgatacaataagctcttgtagattttaatggtctgtgaacagtgcaggtttcctagagaactacctcacactgagcatccttatcttctcagctcagtcattataagccatcaatcataacatcgctcattattgtcatcaactgggggaagcccatagaagagttttttaaatcactggattttattttacagtgttctgtataatataattgtttccatgtactgtttaaacctactgcaccccatgcattactgcatgtaattctagtgtgtatccagttgtcctttttctgtgtttttttcttttaaccaaaagtaaataaaatataatcatagatttcagtttttatgtcaggattattgaatttctctgtagacaaatggaacttttgaaggggtagtatccttttaaaagttctgctttcttcattttttttttttcctcattgaataggtttatcaccagatcttcaatctatggagcagattcggcgaattatgcgaccaactgatgtaccagatcaaggtcttctttgtgatcttttgtggtctgaccccgataaagatgtcttaggctggggtgaaaatgacagaggagtgtccttcacatttggtgcagaagtggttgcaaaatttctccataagcatgatttggatcttatatgtagagcccatcaggtattgattttgaattttacatgtacacttaagagcatgtgtgtgagcacagattctccttgttgattttggtgggtaggtattgcttatttatacaaagtgtttctggaacacaagatatcaggctcaatgggaaactgaaacatggttttactcacctaatatttgcacctatttatattgaaaaaattttctcttcaaggtggttgaagatggatatgaattttttgcaaagaggcagttggtcactctgttttctgcgcccaattattgcggagagtttgacaatgcaggtgccatgatgagtgtggatgaaacactaatgtgttcttttcaggtagagcatgctttcaacatgatttccttttaatatgtttacactttgctgattgaaaaatataattgctactttttgcctagtgttcacttatgctgagtaggctaagtttttattttcccttaaccagtgtgtattatagttgaataatgtgtggatcccttgtaaaagaaaaaattaattatggcaccttttcccagtgttgaattataaatttttgcattgcatattggctccttaatgcttatggctcttttactgtaaatctaaaaccttaatgacaatgtaatgttcagctaaaattaaatcaccacttgaatgtgaaaagtactgagtgccttgtgctatgtgtttacttagttctgccctctagtctaacttccacaaaacttctgttaatgtaccatgacatcatttggccttcagttggcacaaaagcattatttagaatctgcctcagcctttttctcatttgcttattatgatacttgtacaacttcaagccagcctagtcataaacataaatacagccaccaaatcatgtggcactcatcagttaaatgaattaaaatagttttttaccaattatcagagagaacttgcagctttcaaaattccaaagattgtgcaaggatcccctacaggttggagaaacacttttgtaaagaactttttcccctgtatcagaaggagtagctaaagatactaccaggtgtagacttcagaagattgtcattatactcagaggcaaaataatttgtccagataatagattttatctgttcgtcatagcgttaattaccaaatgtttacattcaacatagcttgtgttaatatgctaggggggcttttacagttgttggggcagttgtgaacaccatctgaacagaagatctgaatgaaatttaaggactcttaagatttggggttgagtatatttcctaaattaactgtcttttgaatctccagattttaaagcctgcagagaaaaagaagccaaatgccacgagacctgtaacgcctccaaggggtatgatcacaaagcaagcaaagaaatagatgtcgttttgacactgcctagtcgggacttgtaacatagagtatataaccttcatttttaagactgtaatgtgtactggtcagcttgctcagatagatctgtgtttgtgggggcccttccttccatttttgatttagtgaatggcatttgctggttataacagcaaatgaaagactcttcactccaaaaagaaaagtgttttgttttttaattctctgttccttttgcaaacaattttaatgatggtgttaaagctgtacaccccaggacagtttatcctgtctgaggagtaagtgtacaattgatcttttttaattcagtacaacccataatcatgtaaatgctcattttctttaggacataaagagagccctagggtgctctgaatctgtacatgttcttgtcataaaatgcatactgttgatacaaaccactgtgaacattttttatttgagaattttgtttcaaagggattgctttttcctctcattgtcttgttatgtacaaactagtttttatagctatcaacattaggagtaactttcaaccttgccagcatcactggtatgatgtatatttaattaaagcacacttttccccgaccgtatacttaaaatgacaaagccattcttttaaatatttgtgactctttcctaaagccaaagtttctgttgaattatgttttgacacacccctaagtacaaggtggtatggttgtatacacatgctgccttcttggggattcaaaaacaggtttttgattttgaatagcaattagtgatatagtgctgtttaagctactaacgataaaaggtaataacattttatacaatttccatatagtctattcattaagtaatctttttacagttgcatcaggcctgaacccgtccattcagaaagcttcaaattatagaaacaatactgttctatacgagtgaccgattatgctttctttggcctacattctttattctgcggtgaagttgaggcttataagttaaaacaaaggaactaacttactgtccaccagtttatacagaactcacagtacctatgacttttttaaactaagatctgttaaaaaagaaatctgtttcaacagatgaccgtgtacaataccgtgtggtgaaaatgaattcagacttattaaatgatgaacttgttaaatcttctcagtgtctatttatcagcacaatacacacaggagaactgttgatggcatattgaatagattttcctgaataaattgctctggaaaccaca

SEQ ID NO: 117 - DNA, 15536 bp, Homo sapiens
  source 1..15536: mol_type = other DNA
cgagagttgcttttgcgcgcgaactgtaagtgccagggtctcagggtcaggtcgcggctggtcactgtgcaggcgcttgggtgacgcgacgatctcagcggatctggtcaccttcgtctccccgccatggagacctcagcactcaagcagcaggagcagcccgcggcgaccaagatcaggaacctgccctggtaggaggaggccgagcggcggcggtgggcagagggggccaggcggccgcgcggggaggaggtggctggggtggcaggtgaccggaccccaacccgacctcttcccgtcgtctccaggcctgcagccgggaccgacctgcagaggtttcccccgacaccccccagctacccagactcgtccgttctgtttagggcttttgccagttctcaccctttcacccccagctccatttgccgaagaagaaggcggctttcgcacctggtgacagcacaggggttcgatcccgcgtctcctgacgcctgcaatggcctccatgccaaaatgccctcttcccactcttcaaaacctgcgatgcgactattggtcacattttaaactagtaataacgctccctggtcaacttttattgaatggcatattattagattagcagacgccctgttagatgttcgatccttacaaagaccgtaggaggtaggcaccgcttcaaattttacacaggaggaaactgcattttagaaagatgtaatgacttccctatggtccaagggagaaaattggcttggaggtgaatctaggaagtctgaattcagatcttgtactcttaaccatcctacttaaacagctatgttctcgcaatgcttccaagactttgaagcaatttggcttggcttcgaaaagctgcaagttgtcattgtctagtaactagttcaatttgtctttattgtggttaaaaaaaacccagaagattgacagttgtaactattttatgtatttacgtattttttttttttagagacagggtctcgctctgtcgcccatgctggagcgcagtggtgtgatcacagctcagtgtaacctcaaacattggggttcaagccattctcctgcctcagcctccgaagaactgggacttttagaggcgagctaccaagcccatcctgtaaccattttaaaatgtacaattcagtggcattaagtacattcagaatgcagtgtactgttgtggagtcttcccgctatctagttccaaaatttcatcaccccaaatggaaatcctttacccattgacagttactccccattctccccttcctctagcccctggcaaccactaatctgctttctatctatggatttgcctattctggacatttcatgtaagtggaatcctacactatgtggccttttgtgtctggtttctttcactcaggatcatgttttcaaggttcatgcatgttgctgcttgtatcagtagttaatttcttgttatggctgaatcatattccattgtatggacagaagagattttacctatccattcttctgttgaagtctatttgggtaggagttcagtttcaaatgcactttgcaatagtaggtgcccatcaggttgagattataggcaaacagctggaaagatgaagttagaacagagttttcaacctcagcactattgacattttgggccagatactctgggtgggtttaggggagctgtcctgtgcactgtagcatgtttaacagcattcctggagactacacactgagtgccataggaccctctgcccacctgtgacaactaagtatgtttctagatatcactagatgttcctaggaagacaaaatcacctgtggttgggaaccactggtctgttcaaacttaaagtgctttcttattcttcctttttaaattaggatatgaaaggattctgtttttttttttaagacaaggtctcactctgtcgcccaggctggagtgctggagtgcagtggtgcaatctcggttcactgcaacctccgcctcccgggttccagcaattctcccaccccagccttcggggtagctggggctacaggggtatgccaccatgcccagctaatttttgtattttttggtattttttattgaatggcatattatcgggttagcagacaccctgttagttgttctatccttacaaagaccctaggaggtacccatagagacagggttttgccatgttggccgggctggttggtcttgaactcctgaccccaaatgatccacccaccttggcctcccaaagtgctgggattacaggcatgagccactgtgcctgacctgcaaggattcttttgcacataaaatattcttgcatttatatatgtcataatacatactaaattgtatttcagggttgaaaaataccggccacagaccctgaatgatctcatttctcatcaggacattctgagtaccagtaagtattcatgtgtcagttgctcttgtcctgcttgagcgacttgtataaattgcttggtgatgttgtctctcctaagtaataacttcaaagaatctgattgcgctttgtagaatgtggctttaagatcattcattcattttcttcaggttgctacagtccagtgggtaagtcacaaacatgagcataaaattgcaacacagtggagtaaaaatagcattacggagaatcatttaagttcacagatgttgccagcacccagaaaggtgcctgtaacacagtaggcactcaataaatacttgttgactggctgcgctattgagtgaattccagttgttccacgaaagtagatatgaggcccctacatcaagttgtatctgcctctgatttggacattgaattgggttgaagagctttcagcccaactcaggagcccagggtgaatgaggcagctcccaaagactgatggtgcccttcttccttcctgatcctcagttcagaagtttatcaatgaagaccgactgccacacttgcttctctacggtcccccagggacaggcaagacatctaccatcctagcctgtgcgaaacagctatataaagacaaagaatttggctccatggtcttggaggtaaataagattgttcttactctacaaataacttaagagactccagtctcttaatttcagttctgctggttttattttactttaaaagtaagttgccccacggacagttaggaaagaagtaaatttgaatattttaattccctttttcctataatggtcattttggtctggattagcgttggtcagctagagggcagttgtagggtttggcacctttttctttgctcttgccaacttctccccaaaccttactttatggtgacttggttgctgcctgtctgccatggcccctctagatcaattctccacgtttctccaccatattcctgcctggaaggctgagccctactgactataagctcacttaccctctggctcctggttgggtttggccaataggggccttggcaggggtgggggaaggaagtgagtgatgcctgggccttccctgggggctgacacaggctggcagcatggcccacctgtagggtacatctcacaggtggtacctttcctgcagccctctccaggtgcctacagccactcccttcactaagcccttcaggctcaagggtgacaggtattgcatagccccatggttttcctatatcacacctttaaaaagatcttgtttaattctcttcaaattgctgcatttgagtatgccatctgtatattgctgggaccttgactaatatacttagattcaaaaatctgagtattgtctattgcaagaaaagtttaacttactttttagacgcaggtctcagaactttgctgctactaatgtccttatttcagtttattaagaacttggtaacttaggattgtggtagctgaaatttgtatcattctgctcataccagaggtgctgttcagtgtaaccataccaattaattatttctccaatttatgtcagtcattgtcctcaaagggtgggggtaatatagccatctttattaatttagtgaattttgtgtaaaactgattttttattttatgatgatctcttagccatcattagacatagagagctagcctgctgagctggactgatgaggaaatacactaacaccaagaactcacagatagcacagcaacatggtttttgttttgtcttctgtcttccacatttagctgaatgcttcagatgaccgaggaatagacatcattcgaggaccgatcctgagctttgctagcacaaggacaatatttaagtaagaattatttgtgtaatttcgctcccttgattttgattagtaagatgatatgggttaattttttaatcctctccttagccagtttatatgggttgaaaaaaaaagtgactttgtccaaagcaaccatggaaaagagataaacgagagggatggtagtaagaagcgttataatgcaactgttaaaataaaatgttatctacgcttgtattagcaagtttgttttttttttcttttttttttggagacagggtcgccctgtatcgtacaggctggagtgcagtagcatgatctcggctcactgcaacctccacctcctgggttcaagcgatcttccagcctcagcctcctaagtagctgggactacagtcgtgagccatcacgcccaactaatttttgtattttttagtagacatggggttttgccatgttgcctaggctggtctcgaactcctgagctcaagcaatctgcccgccgcagcctcccaaactgctgggattacatacgtgagcccagcctgcattaccaagttctttagggagcattaacttcatttttagttcctgagaactggctagattaccctaagactggatgagctagtttgaatttaaaaataaattgagatcaggaaggacaactaggatggtggctaaaaaaaaaaaaagaaagaaagaaaaagggtgagggccgggcgcagtggctcacacctgtaatcctaggactttgggaggcctaggcaggtggatcacctgagatcaagggttcaagaccagcatggccaacatagtgaaacctcgtctctactaaaaatacaaaaattatctgggcatggtggtgggcgcctgtaatcccagccactcaggaggctgaggcaggagaatcgcttgaacccaggaggcagaggttgcagcgagccaagatcgcggcactgcactccagcctgggcaacagagcaaaaacttagtctcaaaaaaagcaaaagggtgagggactcaggcatgagtgagggagacgggaaaagcagtagcatggtagggtgccatgtggaggaaagtgaagatgccagaggacacagcgcacagaagtagagaagtctcctccattcccaccaagggttgaaggagtgatgcggcatttcctctctgagtgaccaaagatgtctgccttggccaaagttctagaagaaattgtctttctgagacagggcccgatggcacaatgggaagatataggtttgagcccagatgttgagatgagattgaagaaatctttagacagcaccatttgtttttctaggaaaggctttaagctagtgatcttggatgaagcagacgccatgactcaggacgcccagaatgccttgagaagaggtaagcagaggcactgtggagcgtttgggctggtgtgcacactggaaggagaattaggaactttgtgtttgttgctgttgtcattgtttttttaggcgggggggagtttttttttctttttttgagtcagagtcttgctctgtcacccaggttggagtgcagtggcgcaatcttggctcactgcagcctctgcctcctgggttcaagcgattctctgacctcagcctcttgagtagctgggattacaggcatgcaccaccacacccggctgatttttatatttttagtagagatggggtttcaccatgttggccaggctggtctcgacctcctgaccttgggtgatccgcccgcctcggcttcccaaagtgctgggattacaggagaattaggaactttaagcttcccaaagtgctgggattacaggagaattaggatgtgagatatggcttggcttgttttcagttttcatcttctggcccagagaaatctctatgcctttctctgtgtctcccatctaatgacacaggctagatacctctgtagcgggacttccccttcagcagcctagggactaagccctgcggggacttttaagtctggccagtcactggtgttcaacctcctttgacactgggttcaatttcagagttgggaattcatatctttccgtgggatggggtgtggaaaatctttcatccttaagctatcagatagtccttctgctaatagtaccctctcctttctactaatggtaccctttgaaccacaatggctaggaaaagcatatctgaagttgaggtgctcagagagctgatattacttcactgcttgccaagtgaatgatttggcagcgggagggacagcaccctgcgatttgtctgtcttcaggggcctagcgcagttcttttctcttaaaggacacttgtcatctctcattaagattccaagtgaatcagctttgagagaagaacgatctttaggagtttgtggcgagggagtagatggcagcacatgttaagagaaggatgggggaagggggaggaggaggaggggggaggaggggaggaagaggagggggtgaggaggaggagggggaggagaaggcggaggaggagggtagggggaggtggaggaggagaggtgggggaggaggaggaggaggaggacagcgagaatatcttctggtcctagaagcttggcagcctttcttcggcatcttgttctgccgagtgactgtcattctgggcagatccccatgtgagaacattgggtacctacagaatggaaccggtgtcataagcaactctttgttcgggttattgctcccttgagtgctctaaggcctccagacagtctccatggaaaagtctgcaaaaagccgccctccctgcccatagaaggtgaagtgtcatcaacctgccaaatataattttatgtaaaaggacaagaagtctcatagtcttaatgggattacatggcaaaagtgccagaatcatggcaaatggtaaaaaggaagcattttgtaaaatcccacggaggcatgtttaccagtttgtgaaagaggggtggctaggcagggcgcagtggctcacacctgtaatcccagtactttgggaggctgaggcaggcatatcacctgaggtcaggagttcgagaccagcctggctaaccgatgaaaccccatctctactaaaaatacaaaaattggcctggcacagtggctcatgcctgtaatcccaaaggccaaggcgggcgaatcatgaggtcaggagatcgagaccatcctggctaacatggtgaaaccccgtctctactaaaaatataaaaaattagccgggcgtggtggcacgtgtctgtagtcccagctactcaggaggctgaggcaggagaatcgctttaatccgggaggcagaggttgcagggagccaagatcgtgccattgcactccagcctgggcaacagagcgagactctgtttcaaaaaagaaaaaagaggagtggctaatctctgatctgaacaggccagcactgccctgtcttgtcataggctgcagcctcacttgtttacattctttcttttttgagacagagtctcactctgttgcccacgctggagtgcagtggaatgattttgggtcactgcaacctccacctcccggattcaagcaattctcctgcctcagcctcccaagtagctgggattacaggcatgtgccaccacacctggctaaattttgtattttcagtagaggttttgccatgttggccaaacctcctgacctcaagtgatcctcccgcctcagcctcccaaagtgctgggattacagacgtgagccactaagccactacgcccggccaacatcctcacttgtttgcagtattgaatcttttcctatacccttgtgaccacagaaaaattcaagttttctgggctctctgaaaaatcagaatggactttgacatgaggtggttttattttctcttactagtaattgagaaattcacagaaaataccagattctgcctcatctgtaactatctgtcaaagatcatccctgccttgcagtcccgctgcacgaggtttcggttcggtcccctgactcctgaactcatggttccccgcctggaacatgtcgtggaagaagagaagtgagtattttgcgggcctttggggatggagtgtagtagaaacaggcttgtgggatcactggctggttcgtatgtagaggagaggaatgttggaaaacgactttgcagagtgcctagcacaggggaggcactggggaccgtccactgctatcattttctctgctgtctcaaggccattcctcataaaagtcatttggtacttcatttttcttgattccatcctcctcccctggaagctgtcccaatttcctcctactcttctttgtcattggaaactgcaggctgctgagtcccttctgcaaagatgcttccagcctttttagactagaagggaaggttctaagacatcacattctgtgtagtcagatgccaagcaagtagccgacctgagcagctgcttgttgtgaaggaggagtttcggctgtgtgatcatggcttgtgccaggcctctgtcctccccagagagcagaattcaagacgactggctccatgggagaatgcttgttcctaaattcaggctgttctcgattttggttggctgtgactactaatgtgaagcccaggtccctaaaaaccagagtgaattctagatcatatagatcaggagattattaactctgttcctctccttccttcatccctttaaagccttaatcattccaggccatcttgttcctttggtgaatgctggtgctctcagggggcctcataaatcccttttgcttatttctttcagagttgatataagtgaagatggaatgaaagcactagtcactctttccagtggagacatgcgtagggctctgaacattttgcaggtatggtctcaagcaaatccttttttttttttttttttgagacagagtcttgctctgtcgctcaggctggagtgcagcaacacaatctcagctcactgcaacctccgcctcctgggttcaagcgaatctcctgcctcctgagcagctgggattacaggtgcccgccaccacgccctactaatttttgtatttttagtagagatggggtttcgccatgttggttaggctggtctcgaactcctgacctcaaatgatccatctgcctcagcttcctaaagtgctgggattacaggcatgagccaccatgcccagcctggtcccagcaaatcctgagtcattgttttgtaatagtttttgaagaaagacctaagcaaaggcatgatcaatctgtaaattttgaaatctacagctggtaagaccttggtctcataacctgcaggattccccctcctcactttgtattttgattaattgaaaaaatcacttgttgcaggccaggtatggtggctcacgcctgtaatcccagcacttagggatgccgagggaggtggattgcctgagcccacgagctggagaccagcctgggcaacatagtgagactctgtctccactaaaaaatcatgagccaggtgtggcggtgcacacctgtagtcccatctactcaggaggctgaggcaggagggtgacttgagcctaggaggtcgaggctacagtgagccatgatcatgccactgcacttcagcctgagcaacagagcaagaccctgtctcaaaaaacaaagagagagcaaaagaaaatgttttaaaaacaaaaggaatcatttgttgcaaagaaggcaaagggagggaaggatttggcactggaatagccaacaggctgtggcatcctctgatgaggtgactcttccggtattgaatatgtgggttcccactgccttgtgcccatagaactttgctgctcacctgcattgctgccttggcaatttcttcttggctccctgcagcttggtggcagctgtgacagccactgtgatctcccctttccccctctgtctacacagagcaccaatatggcctttgggaaggtgacagaggagactgtctacacctgcaccgggcacccgctcaagtcagacattgccaacatcctggactggatgttgaatcaagatttcaccacagcctacagaagtatcctttctcatgacctcctggccaccgagacctgaaggtggccccaggagttcaggttgcagccagcacccacaccttgctggcaaaggatgactggctgcaggcgactctggtcagcttgttgtgggagtgagatgtctgtaggtggagtgggtacttgtctttagcactccagagttcttcttggagggctctgaccttcaagtcagggtaaggcttgaagcagcttcactcacagatgggagaaaagcttaggccttggcattgaagatgcaggaattttcaagtggtcatgatagtgatagctcttgtgctgtgaaatgaaaggctaggaatggtgacacaaagcctttttggaaatgcatttggggctgggtgtggtggctcatgcctataatcccagcacttttggaggctgaggcggtagatcacttgaggtcaggagttcaagaccagcctggccaacatggcgaaaccccgtctctactaaaaatacaaaaattagccgggcgtggtggtgggtgcctgtagttccagctactcgggaggctgaggcatgagaattgcttgaacccgggaggcagaggttgcagtgagccgaggtcatgccactgtactctagcctgggtgacagagggagattccatcttaaaaaaaaaaaaaaagaaagaaagaaaaagaaaacgcagttggctttattctctactagaaggagttacaactctatctttcagaaagcccttactgaagatgaaacaaagaaaaataaagaattggagtccaacacgtgcagcttcaagttgaaagagaaacagttgtgttgggattaaaagccttactttaaaaagtctcttgcccgggtttggattcaaaattctctgcagtatgtttgttctggaacttgttccctttgccttaactgctcctctagatattacagagttgaaaactctgaaggggttggcactgcatgatatcctgacagagatacacttgtttgtgcatagaggtaacttacattatcccccagctgagaagctgtggagaaggtagcctgctttggggttaaggatggttaggacaggaggcttcattcttgaagcaaagaaactaatgaattgtaaatcagacccttcttgttagcagttctgtcttgccactgtttaaaattttgttccagagctgggtacggtggctcaagcctgtaatcctagcactttgggaggccaaagcaggcagatcacctgaggtcaggagttgaagaccagcctgggcaacatggtgaaaccccgtctctactaaaaatacaaaaaattagcctggcatggtggcgcacgcctgtaatcccagctacgtgggaggctgaggtgggagaatcatttgaacctgggaggtggaggttgcagtgagccaagatttgccactgcactccagcctgggcgacagagctagagtttgtctcaaaaaaaaaaacaaaacaaaacacaaaaaacgtgttccataaaccctcttttaatatctagaactgctggggaaagtgaaaactcctggaggctaactttatttcctctaggggtttatattttatagcagtaagtagtatatattaattcacatttctaaaaaaaaaaaaaaagtctgtctatctatctgtctatctagatatatattcccagaaaagaaagagaagatatgtaaaccatgtaaaccaaagcaggcttaaggaaaacatcttaagttccacacttgcctgtaccttctacacagagaattggttctcaaccttggcagcagataggggcactccagacaaattaagtcagcttctcggaggacaaccaggcatccgtattctctaagctccccaggtgacttgtgtaggctttcggagaagctcttccttccacagtggccaactgcaagatggagacttaaccgggtcaatgaatgttggttctgcccaggccttcacaggcctcttcctggctggcccatgccatgccttctgcccaaggtatggttggctcaggcccagctctgcaccttgattgtggaagctgagcataaaccaactttaaaaaatcagttgtttgtgcttggtttttaaatggggacaggatcggtatagtggctgacgcctgtaatcccaacactttgggaagtcaaaatgggtggatcacttgagcccaggagtttgagaccagcctgggcaacacggtgaaaccgcatctctacaaaaagtacaaaacagccaggcaaggtggcgcacacctgtagccccagttactcaagggtcttgaggtggaagatccctcaagcccaagaggtcaaggctgcagtgagtcatgatcacgccatgccatggcactccagcctgggcaagacagtgagaccccgtctcaaaataaagtaaaatataaaataaaaacagcaagtgggaactcagcattcaagttaacttgtagagctacccagctgctaagagcagtgtgatctttggtgctcttaggatcactttggtatctgctcattttcctttttgtctaccctataaagcacaaaatcgagtgggtaaaaagtatgaaaccagcactgtttctactttcttagaggtctggtatctagtgagcaggctgaggcctcaggactagttcagtgttaaggatttcatgttgaaactcatttgtcctctgtgggttttttgacagtagagagtgacctaactcatttgattttgtttttccctcagttgactttccatcttcagttcgaatacatttattgaccaaaatggcagacattgagtgagtacttcttgccccagttttaattcttttcttccttttttcccctgttgtgagttatttgtttcaactttcttggtttcaggtttttttcctaaatcgttcacatacggtacaatctagtctggtgatattgaatggaatgtggggaagggtgtgagctgcttaaagaacatggggataaattcacaggtcaagtacagatcagttacatatctgagatgaaggcctctccttggacctcacaggctcggcccacattgattctgaaaatgcccttgttatttgggaggcctgctttgcttcaaccacccagctgttattaaggcattttggcatactaaagcatattggggggaaaagtaaacacaaactcaattttctgctttgcctggttccgtaaacactgttattagcccccagtgaagctggcagctatcatttaagtagacagagcattgggttcaacatagacgtcagcataggccaactctaatttgtggcattggctttcacaggcacaaattaggtcacctctcctcattgcattgtgaatatgatgattttgctatcagtggctgggcatttaaaaggtggcgagatgaactccagtgtcctgctttactgactagaccacagacccaccaatgtatcagccaaacttcccgatgaaatggcttaagaggaaggaaatctctgttttgtttccctcttaacgtattttgccgacgaaataatccttcattacataaattttgtatatctgtatagttaggacaaagttaagttcagaacaccgctgttgacacctaataatttatttctttttttgagacagagtcccactctgtcgcccaggctggagtgcagtgatgcagtctcggctcactgcaacctctgcctcccaggttcaagcgattcacctgcctcagcctcctgaggagctgggattacaggcatgcactaccatgcccagctaatttttgttttttgtttgtttgttttgtagagacgggggtttcaccatgttggccaggctggcctccagtgattggcccgcctcccaaagtgctgggattacaggtgtgaaccaccacgcccggcctgatacctaataatttttaaaattgaatcggtccttacaagtttgaaacatcacatttataaatcaatgtgtagggcagagaagaaaatgttagggggacacatacaagattgccatccagggcacatttgttctatcaattcccatccccactccttcaacagattttcagccctagatctcttggtcccttaagaaaaggcagctgtgtttggtgtcttttttcttaccctgtgtttggtttctgttaggtacaggctttctgttggcaccaacgagaagatccagctgagctccctcattgctgcatttcaagtcaccagagacctgattgttgcagaggcctagatgctctgagggccattcacaattctcagggctcagcagtgatgggagaacagaggacagttccaggataaactgctgcctggggctgtgggatgaatcagtcaccccgaatcttggaaaaacccccttccaggagaggatgggcaggcatttaaaaagtaccatttttgtggttgtttggagcagggatgtacaaaataattttaatgtattaactcatactgcctgtcttttataggggaaaaaaataaccttttttattttaaagttataaggtttttaccttttagttgcttggatgacagggaattagcctaccccattttggtctggaacagaagactttcaaatttaatatggtccaagtgtcttcctactcaaggtaaacattatctccaaaattacatttatgattctaatatttggcattgtgtctgtatctaatttaaacagatgttaatggacgtctggccgaaactattatacttttataagatgagctgaatcctcttactttaaaaactggtctttttatttaccctctgtggtagaagagtcaccagcaggttccaaattgatgtgtatgataggaaaaaaaccttaattttaaatataatatagagccttaaactatgccactgggtggcagaggctgtataaaacgcacttgttttcatgcaggagcggggcaagtaaggttgagcctgactgtaaacctagaactgcggaaggactgggacttttgtacaaatttcacatttattttacagcaatcatgctgcatttgtgttagtgttctttataataaaaaacaaagcagcctcctggctggctgtgttacaagtgactcttccttagacagctagaaagatgctgactttgtcaaacttgcatttatatgaaaaccttctgtctctaatatcacagaataaactttctttagatgctgttctttataa

SEQ ID NO: 118 - DNA, 32742 bp, Homo sapiens
  source 1..32742: mol_type = other DNA
ggcgcggggcggaacagatcgcagacctgggggttcgcagagcgtgagtctgatcccccagacccaattctaccgcacccggctctgcaaggccaggggagggccgcctccacccatacaagtcccgggtttccctcccgccccggggagggcggcgattccacccccagggctgcgggaggcctggagggtcttccggggctagctgtgcgcgcgcccaccttccttgggagccgaggggtcagccgagtggtgctggggcaggaggcttgctcctcccctaaaccaggcggagtgctttgtctcttcagctctgcctcctgtcagcactaactgcattattctgcccagtgtagtcggccggttccttattatctgcgtgaacttagccatttacttaacctctctgtttcagcgtattcataccccgtgcccaccccatcacctcatgatgcccccgcctctttcgctctgctccagtccgtctggcctcgctgttgctggagaggccaggtcctgcctcagtgcttttggcttggctgtttcgtttgccacggatgtctttctttccccagatatcaacatggcttgctggtcattcgcttcaggtcttcaagtcttgggtcaaatggtggcttctcagtgaagtcttatttgaccacactaaaaattgcaccatctcacccccattgtccttttcttgctcgattttgtttttaccccatagcacttaacaccttacaacaagctatatattttgcttatttcagtcattcatttaataactattcgcacctatttgtgtgccaggctatgtgtgcccccactgcatgggggcaaacatctctgcccttgtggagcttccattctaaggggggagataataaacacatttataagtaagagagtatgtcagataagtgtatcatctcctgtcacagtgagttaaaatctggtgtttaatctccatgattagactgagcttcctaaaactggagtggtagctgattttcacctccttgtccctgatatcttgagggagatcaggatctctcaggcccttcctgctcaaaacataggacacacttgacttttctgatatcctttcagcgccagtggggagatgttgaagttcaaatatggagcgcggaatcctttggatgctggtgctgctgaacccattgccagccgggcctccaggctgaatctgttcttccaggtaacagcctaccctgccaactttgctcacctgtgtgtgtccttggaatctccttgtcactcacctttgcttttatttatttgtttatttatttagagtctcagtctctcaggctggagtacagtggtgcaatctcagctcactgcaacctccgcctcctgggttcaagcgattctcctgcctcagcctccagagtagctgggactacagccgcctgccaccacacccggctaaattttgtatttttctttttagtagagacggggtttcaccatgttggccaggctagggtcgaactcctgacctcaagtgatccacctgccttggcctcctaaagtgctgggattacaggcatgaaccgtgcccagcttgcttttattataggaccagggataatattttaggggaaattctgttttgttttgtttgaaacaaggtcttctgtcgactctaggcctgtgccaccatgcctggctaattttttaattttttgtagggatggggtctcactgtgttgcccaggctgatatagaacacctgacttcaagtgagcctcttgccttggcctcccaaagcactggggttataggtgtgagccactgcacctggccctctatttagagttttatatgcactgattcttttggaaaaaagacactgtgcagaagtagatagctgaacttgccttagaagggagatcttttcatatttctcacactttacacttctgtactaaagtttattcattcattgattgattggttgcttgcaagacagggtcttgctctgtggctcaggctggagtgcattggcacaatcacggcttactgcagccttgacctcctgggctcaaacgatcctcccacttcagcttcctgagtagctgggaccacaggtgtgtgccaccatacctggctaatttttgtattttttgtagagatgaggtttcaccatgttgcccaggcaggtctcgaattcctgggctcaagtgatctacttgtcacagcttctgcaagtgttgggcttacaggcataagcccctgtaccagggcaagtttgtccttttattgaagaaagaaaaataaatgaacaaagatgctttttaaaactacaatttctgtgggtataatcctattcattttcattgcagggatgtttattttttaagattttttttttttttttttgagacagagtcttcgctgtcgcccaggctggagtgcagtggcgcgatctcggctcactgcaggctctgccccccggggttcacgccattctcctgcctcagcctcccacgtagctgggactacaggcgcccgtcacctcgcccggctaattttttgtatttttagtagagacggggtttcactgtgttagtcaggatggtattttttaagattttaaaaaaagttttgatgaataccacacctgtttaaccctcattcctctcaagatacacatttctgtcaccccagatgcgttaaaacttaatatcataagattacttccaaatagatttttaattcttttgtttctgatgtatgtggaacactggtgaagtagaaatccttgtttgatttatgtattcgtaagtcagggggacaatagagaccatgaagatttagaattgaatcccagtcccagcactagttagctgcattactttgggtgagtcagttaccttttctgagtccatttgctattctttaaaataggttgtagcctgtaatgccagtattttcggaggctgaggcgggcggattacttgaggtcacgggttcgagaccagcctggacaacgtggtgaaaccctgtctctactaaaaatatagaaaattagctgggcatggtggtcgcatgtacctgtaatcccagctacttgaaaagctgaagcaggagaatcatttgaacccgggaggcggaggttgtcgtgagccgagatggtgcactgcactccagcctgggcgacagagtgggtaagactccatctcaaaacaaaacaaaacaaaagaaaacaaaaaaaataacatagaggttgtagtacctaatccacagggttgttgtgaggattagatgagatattcgatttaaagcacttagcaccttgcctggctcttagtaaactccttataaaaaatggtaattattgttaatactcagcatagaatagtattagttataatattaatactaaatttgtttccttaatagtaattatatttgggaaggtagttatgtaggatacctgtaagatgatgaatgatgaagtattcttgataacttttttttttttccaaaatattggtattgggtgtttaaacagatgagagtggaaacaaattgaaagcttaggtttttctgtgggaccatccccatcagcattttaagtcttgacatatctttcacaaatgaatagtctgtctttaaccttagatggctggagtgctgccacgtttcagcccctttatcatgctactttaaaatatctccaacttgctgggcgtggtggctcacgcctgtaatcctagcaatttgggaggctgaggtgggtggattgcttgaggtcaggagttcgagagcagcccgggcaacatggtgagcccctccgtttctactaaaaacacaaaaaatagctgactgtgatggtgtgtgcctgtagtcccagctactcgggaggctgaggcaggaggatcacttgagccctagaggcagaggttgcagtgagctaagattgtgccactgcacttcagcacttcagcctaggcgacagagcaagaccctgtaaattaaaaaaaaaaaaaaaaagaaaaggaaaaaaatttccaacttattaagggcttatagtgtgctgattatgtaatagttatggcttccaatgtgtctggcatagaactggcatgtttctgagtatctcacttcagcctcatgacagaggtaaggactatttttaatttaaactttaaataggaggcaacaggccaggtgtggtggctcacacctgtaatcccagtactttgggaggctgaggcaggtggattgcttgagtccaagagttcaagactagcctgggcaaaatggtgaaaccccatctctacaaaaaatataaataattagtcaggcatggcggtgtgtgcctgtagtcccagctactcaggaggctgaggtgggggcatctctggggccccggaggcagaggttgtagtgagttgagattgcaacactgcactccagcctgggcaacagaacgagaccctgtttctaaataaatacataaataggaggcaacagatatagacagatatggaggtaggtaaggccttgcccaagatcatacacgttgggttttgcagatgaggccaagatcagactccatctttggttggtctgactccaaaggctgaccacatagccattgggccacagcacctgtgcacgtcagaatttattaagtatatcttgtatttagtcattataacaggaagacttatgggtaaaccctcagttcatctctttttaatgctgagatccccctgcccagtaaagctattattgcaagtatagtatatacctatcatttgccttgagttatcaggtaaggatgctgtttgttcttttcccatatagtgctgtttgaatgaggttgagatacagtagcaattttgttttccattcaggtgagtaccttagactgagtgtcattttgtcttttttacttctactcaacaggatttcctgacatgttcgaggtcagtgattgtcagactttctgagccagcaaaatttcccaaattgctgggtagacacaggttttccaactttttattttgccaagtaaggatatataaaaaaaaaataaaaagaaagacctattattttctggcccttgtatttcataaagggcattttaagaaacaacaagacaggaagaacatcatctcagaataaaggaccatttttaaatttgaatacatttagttttataaaaaagatatcatgtggtgttcattttttctcatttcactgcaggctgttgaaaactttgttaagaaccagtactatatttgggaacccctgctttaattgatctaaactcttgaagaatagaagaaacaaagcattttatttttctgagttactggcaactattactaaagtgacagatatggtggccttgaatgcagtgcttcccaaacctgattgaggtctgactctcttggggaccagggtctcattctgttgcccaggctggagtgtggcagcacaatcttggctcactgcagcctttacttcttgggctcaagtgatccttctacctcagtctcacaagtggctaggactacaggaccatggcactacacctggctaatttttttttgtttgtttgtagagatgggatctcgctgtgttgccctggctggtcttgaactcctgggctcaagtgatcctcccaccttggcctcccaaagtgctagtattccaggtgtgagccacctctccctgctggggaacttgttaataaaacagattctaggctacagtctggaaaattctaattcatttggttgtgggggaggggggcataggaccagagaatgtgtttgtttgtttgtttgtttttcttaaattctccagtgctgttgtgattcaaatgcagccggtctgtttctgttatcaagtgctgtgtaacaaagcactcacaaagtttaaagcaacaatgatttattttttcttaggattctgtgggttggctggactcagctaggtagttctgcttcatcctgtgatgtcagctggggtcacttgtggggctacattcagctgggattatgtctgggactggaacatgtgggtgctgactgctggctggggcaccttagtgtttctcacatggcctctcttctccatgaggtctttcagtagtatagcccaggactcgtaactttttttttttttttaagacagactgtcgccctgtcgcccaggctggagtgcagtggcacgatctctgctcactgcaacctccgcctcctgggttcaagcaattctcctgccccagcctcccgagtagctgggattacaggcacgtgcctccacgcccggctaatgtttgcatttttagtagagatggggtttcaccacgttggtcaggctggtctcgaacttctgacctcgcgatccgcctgcctcggcctcccaaagtgttggaattacaggtgtgagccactgcacctggctgactcgtaactttttttgtaagtaataaatattttaggctttgtgggtcctgtagtctctgttgcaaccactcaacttggccatggtagcacaaaagcagctaaagacaatatgtaaatgatgggtgtagctgtgttccagtaaaacttataaaaagtccgtgggctggatttggtccaagggctacagattgcacacccctggtctagcccaagcatctgtgcatggtggctggcttcccaaaagtggaagctgctaagctgccttttttttttttttttttttttttgagagggagtctcactgtgttgcctaggctggagtgcggtggtgtgatctcggctcactgcaacctccatctcccgggtgcaggcaattctcatgcctcaacctcccaggtagctgggattacgggtgcctaccaccacgcctggctaatttttgtattttggtagagacagggtttcaccatgttggccaggctggtctcaaactcctgacctcaagtgatccacccgtcttggcctcccaaagtgctgggattacagatgtgagccaccgtgtctggccgcttgacaagcttcttaaaggcactgccctgaactggcacagtgtcacttgtgtcacattcttttggttgaagagagtctcagagatggcacagattcaaaggcaggagaaatagactccagcgcttaaagtaaggagtagcatgtgcctacagaattggaggaactgttggaggccatctttgaagagagaccaccactatccatggcttggcacgtgggaatcactgctctataccagggttgcagactcatgtctttgggggccaggcagtgagtataaatgagtcaagtgggccagttggaagatggagtcagacctgcagtgaactcccaaacacatctgctaccgggaggggcagcattactcagctccagctcagcgtcatcaggcaggaaggcgaggcagtgttgccggatgtgccagtgtttcaaaagaagccagagactccatttttatttttttgtatggaatctcctgattttgaaatattggcagataattcaaattatcttaaacactacaggccaaacaaaacatatctgtgggctagagacagtctgccagtttgtaactatttctccagatcatgagtaaatttggctttacgatggtcactcagttcttattactctaggttgttcaaatgaattaaaaaagctgaaattatatgaataaacccctgggcacacatgaaagaagtgaaaaacccattgtttcctattgtagaaacatggaagcatgtcagagccagaggatccagaggaaatattctcactagcctcagaccctcaggagtgagggagcttttcttgttaatggccacgcttgtgcagttttccttcccaggtgctggtgaaagaaacccacagtcttggaatcatggaagtgataccataatgactgtcagttgacgttgctttaaagaatgaagccacagaattgtgctgttagcatgtcgtgagcagttagttgagttggtggcttgtaatttactctgtgtggatgttattgatcaaagcttttcattattgacagtgtctccatctgctgtttgctgtttttaggggaaaccaccctttatgactcaacagcagatgtctcctctttcccgagaagggatattagatgccctctttgttctctttgaagaatgcagtcagcctgctctgatgaagattaagcacgtgagcaactttgtccggaagtgtaagtttggggaactttttcttgaaaactgtcctgagagagaaaaactagaaagatgcttgaggcagaatgagttactggttgatagtagtcggtaagaactctggttctatataagacagatccaggttcaaattcaggctgcacctcttatagctgggagaccaggtaagttgggcttcttggttgcaagcgacaaacttaattcaaagactgaatttaggccaggtgcaatggctcatacctataatctcagccctttgggaagctgaggtgggtgaatcgcttgagcccaggagttcaagaccagcttgggcaacatggtgaaaccccatctctacaaaaaatacaaaaattagctgggtatggtggcttgcacccgtggtcccagctgctgaggaggctgaggtgggaggatcactggagcccgggaggttgaggctcaatgagctgtgattgtgccattgcactccagtctgggtgacagagtgagaccctgtgtgaataaaagagtgaatttattggctcatgaaactgagaaatccaggaatgagttaagttttagctttaggcatagctagttccagagacctcaataatatcccgtggccctgtccttatactcactcagggctgactttctattaggcagagtaggcacggtgcttaggatctgtgatatttaattttaatgaatttaattacttttaattaactgaattaaattttaatttgttttaaaattataggaaaaatgaatataataatgtataatgattctggattacattcatctttatactaatgtagtcataaaatataatttttgttttttttggagacagagtcttgccctattacccaggctggattgcagtggtatatcatggctcactgcagtttcaaccttctaggctcaagcaatccttccaccccagtggctgggactacaggctcacactaccacgcccagctaatttttgcttttttctctgtagagatagggtcttactatgttacccaggctggtttcaaactccaggcttgaagcagtcttcctgcctcagcctcccaaagctttgggattacaggtgtgagccaccatgcctggccccataaaatataatttttgaattcttttttgtttttaatggaggaaggggctgaggaaggcaaaagtacctagggcctatgaagtcatatattggccttgccttcaccctgtttctgactttgcttgacttccatgtgatgaggcagttggctgttagtgtcccagtttcatactcttacattagtgtttttcaaccagtgggtgatttgacgttttcggttgtcagagctagttgggggtggtggtgtgtgagtttggggggaagggtcctactgtcagttaatgggtgaggccagagatgccaccaaacaccttacagtgcacaaagcagcccccataacacagaattatgtagcccacaatgccaacagtgctgaatttgagaaaccccaccttgtacaacattgctgtgcaaccaaccaccctaaatattactgacttaaaacaatagtcactgtggctgggcgcggtggctcatgcgtgtaagcccagcgctttgggaggctgaggcggcggatcacttgaggtcaggagttccagaccagcctggccaacatggtgaaaccttgtctctactaaaaatacaagaattagctgaatgtggcagcgggcgcctgtaatcccagccatttgggaggcagaggcaggagaatcgcttgaacctgggaggtggaggttgcagtgagccaagatctcaccattgcactccagcttgggcaatgagtgagactctgtcttaaaaaaaaaaaaaagttattgtattacctcttgtgtgtgtaggttaattggactcagctggggattcctctgctctgtattacattggccaggattgcagtcacctggggctctcctgggctggaatgtgtgagagggcttactcagtgtttggtgccctggcttggaggctgggcccagctgggcctctctctcttcatgaagtttcagggccttttgctgtccacatggcacctctatgtggtctccaaatcagaagtcaaggaactacagcctgtgatgcctattttgtaaagaaggttttactggaacacagccctacccatgtgtttgtacagtgcctatggctgctttcacatcataacagcattttatttcattttatttatttttttttgagacaaagtctcactctggctggagtgcagcagcacaatcatagctcactgcagcctccaactcttgggctcaagcaatcctcctgtctcagcctcctcagtagctagtactacaggcccatgccaccactaatggctaattttttaattttgtgtagagatgggaccttgtgagattgcctaggctggtcttgaactcctggcctcaagaaatcctcccaccttggcctcccaaaatgcttggattacaggcatgagccactgtgcccagcccacaacagcatttgagtagttgtgatagagaccaaatggcctacaaagcccaaaatagttcctgtttggcccatttcgaaaaggcttgctgacctctgagctacatggtctctctagcaggacagcctcgacggtagctcaggtttccaaaacacaaaagtggaagctgccaggctttcttaggggttatcctaggagggacataggatctctttgactgcattttattgtttgatgcatgctctggggctgctcaaattccacctgagaggaaactacacaaggtcatgaatcccaagaggactggggcattgggtgctatttttggagactggctaccacaccctgcccaatggtaatcttcccttatctagattaatacaaccccagggaagattctaacttggctctgctttgggtcatttgcctccctggaggtgaggtgttgtgatcggttttgttggaatgcccaaaggggtcagggcagtgtgattaccaggacctcatggaatgggggatgcgtggttatgcaaaggagccggggatgctgggtagaaaaaaaatcagcatatgttcactatagtgctcttcagtattttacatgtactttgttctcagttttctcatctgtaaaataggaataatgtatatcctttttttttttttttttttggagtcttgctctgttgtccaggctggagtacagtggcacaatctcagctcactgcaacctccgcatcccgggttcaagtgattctcctgcctcagcctcctcagtagctgggactacaggcgtgcaccaccacactcagctagtttttgtatttttagtagagatggggtttcgccatgttggccaggctggtctcaaactcctgacctcaagtgatctgcctgcctcggcctccgaaagtgctggaattacaggcatgagccaccacgcccattgggaataatgtatatctaatgaggctgtgttggaattgaatgagttaatgcacagaccagatttgtcatgttgcctggcccataggagacaataaatggtacccagtattaataactgtgaatgtcaacaacatttaatatattgtatatcttcaaaatgtacttgaggtatttgttcatcattctgtttttgtttgaataagctcgtgccttctttttgtgaatatttaaatttataagtagcgagtgggaggggaaggaagttatgtgatgaggctagcttactgagccatctgcaggcaccttcattagtcttgagactgtcctctggttacttaacagcagtgaattatctagaatcatttagtgatcagaagacttggtttagtggaatgtagatttttttctaatagacccctcttccagggaaatgtttcatatttttgaagaggtttcctggggagtgtttaagaggccatgattgaaaatgggtgattacattagtgtgttttctattcctcccctttttgagtttctgttttggaatgtaagctttgtttttctacgtggagaagggtccctcagctgcttctgcccaggttttttgaatcttcctatagggatggagattttctttggggactgttagagaaaatggaatagagtgtagctctgaaggagaaggatgtctccagcagaagtacctctagccttgggccaagggagggaagggaagggaacgagcatctgggaaccagggaagggatttttgtctttcttaattactcttacatccccagtgcccaaaatagtgtctggcatatgttaagtccttagtaaatacttgttgaatgagtgtatgctcagtgaacaaaataaatggcaaacattaagcacagtatcagataatttgtgtaaaaaatatacagcagtgttatactaaaacttgcacagaggccaggtgcagtggctcacgcctgtaatcccagcactgggaggccgaggtgggcagatctttgagctcaggagtttgagaccaacctgggcaacatgctgaaaccctgtctatacaaaaaatacaaaaagtagctggggcatggggacgcacatctgtggtcccagctacttgggaggctgaggctggagaattgcttgaagctgggaggtggaggttgcagtaagccaagattgtgccactgcaccccagcctgggtgacagagtaagaccctgtctcaaaacacaaaacaacacccccttcaaaaaaaatccaaaaccaccaccacaacaaaaaaacttacacagaaaagtgttgataattgtcaaaattgggctgttattggcaatttgacagtagctgaattactaccatttgagctatattcactatagataagatcttcaatatatttacaactttagtactaatgggaaaatgataacttttgaaaagttttttttttttcttattgcaaacaatacacaatacaatgttaaatatagaaggttaaacgtgcatctgagtctgtttgggctgcgataatagataccttagacttggcaatttataaacaatagaaattcattgctgacagttgtgaagactgggaagtccaagatcaaggcgccagcgaatctggtatctggtgatggctccctgcttcaaaaatggcgccttcttgctgcatcttcacctggcagaaggggcaaacatgagtccttcagcttctttttttttttttttctatgtttaaaacttttggtccggcgtggtggctcatgcctgtaatcctagcactttgggaggccgaggcaggtgcatcatgaggtcaagagatcgagaccatcctggccaacatggtgaaacccccccgtctctatactaaaaatacaaaaattagccaggcatggtggcgtgtgcttgtagtcccagctactcaggaggctgaggcaggagaattgcttgaacctgggaggcagaggttgcagtgagccaagattgcgccactgcactccagcctggcaacagagtaagactccgtctcaaaacaaacaaacaaaaaaaacaaaaaaaaacttttattttaggttcatgggtaaatgtacaggtttgttatgtaggtaaacttgtcttggggtttgttatagattatttcgtcacccaggtactaagcctagtaaccaatagttattttttcagattgtctccctcctcccaccctctgtcctctagtaggctccaatgtctgttgttcccttcttagtgtccttgtgttctcatcctttagctcccatttatatgtgagaacatgtggtatttggttttctgttcctgcattagtttgctaaggataatgtcagcctcttttttttttttttttttttttttgatacagagtctcgctctgttgcccaggttggagtgcagtggtgcgatcttggctcactgcaacctctgcctcccgggttcaagtgattctcttgccttagcctcctgagtagctgggactacaggtgcgcaccaccatgccaggctaatttttgtattttagtagagatagggtttcaccatgctggccacgctggtctccaactcttgaccttgtgatccgccggcctcgtctttttcccaaagtgctgagattacaggtgtgagtcactgcacccggcccaatgtcagcctcttttttagggaagtgatttaatcacttccctaaaagtcctacctcgtttttttttttggttttttcttttttttttttttttttttttttttttttttaggtagagtcttgctctgtcacccaggctggagtgcagtggtgcgatcttggctcactgcaacctccacctcctgagttcaagcaattctcctgcctcagcctcctgagtagctgggattataggtgcctgccaccacgcctggctaatttttttgtatttttagtagagttggggtttcaccatgttggccaggctggtcttgaactcctgacctcaagtgatctgcccaaaatgctgggattacaggcgggagccactgtggccagcccctgcaagtcctacctcttaatagtattacactggggattacatttcaacatgaattttgtaggggcgaggggcacaaacgtttagaatatagcacatcacatacatagtgagagaaaaatccctcaaaatcttacctgagacaatcactgccaacagattgctgtatagtgtgccaattttgtttgtgtgtgtgtgtgccttaaaaatatttattatggaaatttaaaaacgtaccccaaggtggccaggtgtagtggctcacgcctgtaatcctggcactttgggagcccgaggtgggtgtattacttgaggtcaggagtttgagaccagcctggccaaaatggtgataccagtctcctaaaaatacaaaaattagccgggtgtggtgggcacctgtagttccagctactcgggagaccaagtcatgagaattgcttgaaccctggaggcagaggttgcagtgagccaagaccatgccactgcactccagccagggtgacagagtgagactccatcctagaaacaaacaaacaaacaaacaaaccaactaaccaaccagagaaaactccctgtctgtaaggagtatgtgttctaatggatactgagccatcttgttctgtttaacatgtgcctaatgttcttttatatgggcggacttgtaggttgtttcaacttttctgttgatgaacctttaggtggtttctgattatttttgtgttacaacagttttcatcattcacatctttgtatgcatcttttttgagcacatgtgcaagtatttctgtggacaatggatgattcctagaaattgaaagtttggattactgtgttccaaaaaaggaagcaatacacccagctatgttggcttttgctcttgggtccagatgattatctgacaaagttattctctgattgcattttcttttcttttcttttcttttttttttttgagatggagtttcgctcttgttgcccaggttggagtgcaatggcgcgatctcggctcactgcaacctctgcctcccaggttcaagcgattctcctgcctcagcctcctaagtagctggcattgcaggcatgcgccacgacacctggctaattttttgtatttttagtagagatgggatttctccatattggtcaggctggtcttgaactcttgacctcaggtgatccacccgcttcagcctcccaaagtgctgggattacaggcgtgagccacagtgcctggccctctgactgcattttcacagtgttttgggtccttatctctacctcagtacctcaatattcagtgcccactgggcccttagatactgcagctaaaagtgcacaggggtggagtgatgtgacggttttggggtcacagaagcagctggtatagagagaagttgtgaagttttttttttttttcctgagacagagtctcgctgtatcccctaggctggagtgcagtggcttgatctcggctcactgcaacctctgtctccctggttcaagtgattcttatgcctcagcctcccgagtagctgggattataggcatgtgtcaccatacccagctaatttttgtgtttttagtagagatggggtttcaccatgttggccaggctggtcttgagctcctgacctcaggtgatccgcccacctgggcctcccaaagtgctgggattacaggcctgagccattgcgcctggtcttttttttttttttttaagtaatcataggcttgaatgtagcctctcatctgttcaccttaataatccaaaagcctttagataaagaaatggagatttggaatggcttctcagaattccaagagagtattgtcatggttttgcctgcaaagcaccgtggtctgtctccttgtgcagttgagaaagctggtggtcgccactgacaggcccagagttattaagttggacactgctttaagcaactttgtaaacaatccaaggcatactagagaattaggagagattggctttgtgtatgagcaataacaaaatcaagttcaatccagcaagtttttggggaattataattcaaaactcaaatacttgatctggaagaaacttggaaagagggaaggaagacaggcttgttacagcattgtcagggtaaaaggaaaataccgtgcagcttttaattttgcttcttcatggcattccccatgtaggtgccctagatttgttttttacagtggtcacgacttcatgtggatccacccaccactcttgcctggttccccaagggaccaagggaaggtgtattcaggatgattgctgaagtgaggggtggggtctgtggctgagaagactctcaataccgcggcactcattataagcctctgacacaggagatttcaactccacccgtgcaacaaaggaacagggtgggcaagagtagttacagttgcaggctgagtgcgatggttcatgcctgtaatcccagtgctttgggaagccaaggtgggaggattgcttgagtctaggagtttgagaccagcctgggtgacataatgagaccctacctgtacaaaaaaattttaaaaattagccagattggtggtgtgcgcctatagtcccagctactctggagaatgaggtgggtgagggtcccttgagtccaggagttcgaggctgcagtgagttatgattctatgatttcaccactgcattccagcctgggcgacagagcaagattgtgttcttttttttttttgagacggagtctcactctgtcacccaggctgaagtgcagtggtacgatctctgctcactacaacctgcacctcccaggttcaagtgattctctccctcagcctcccgagcagctgagattaaaagcggccgcttgtgtgcagctaatttttgtattgttagtagagatggggtttcatcatgttggtcaggcttgtcttgaactcctgacctcaggtgatccacccgcctcgccctcccaaaatgctgggattacaggcgtgagctactgcgcccagccatttgtgtctcttaaaaaaaaaactaagaaaatgaaaaaaatgacattggccaattcattaaaatgccactcactgactgtggtatgaaatggctttccctttgatggaccgagtctgtctcattgtgtgagccacttgcagggctgagtatgactctggaatgtagctcctaaccttatctgctgcccagccattgaaatggccatcccttccagttcccagaagattccagtgtgtgtttgggattttaagacagtctcttggtcttcagtgtggcatctttctgccggattttccaggataattttgattataagcattgcattgcccttggtgtgtaatgcctgtgtatgatgctgttcccttgtaacgtgcaggattaaatttttgggtcagccactgctgctccccttcattcctgcaggtcattagagtcatcgtacatttagcgatgtctcagatcagtgtatctagagtgttaataaacatgttagattccaaatctactgtccatttaatccatacttcatacgttgaggatctctgactgaaagattagacttggaaaaataataagactgtatggtaagaaaactatagttgcaaatccatttggacatgtagtatgtcagccctgcagagcagatgtcagaaccccatttagttctctgagtgctaagcccttctgcccaccacgctgttttttttttttgagatggagtctcgctctgtcactcaggctggagtgcagtggtgtgatctcggctcactgcaagctctgtctcccaggttcacgccattctcctgcctcagcctcccaagtagctgggactacaggtgctcaccaccatgcccagctaattttttgtatgtttttggtagagacggggtttcactgtgttagccaggatggtctggatctcctgaccttgtgatccacccgcttcggcctcccaaagtgctgggattacaggcgtgagccactgctcctggcccccacgcctttttttttttttggagacagagtttcactctgtcacccagattggagtgctgtggcacaatctcagctcattgtgtcctctgcctcccaggttcaagtgattcttgtgcctcagcctcctgagtaggtggaattacaggcgtgcaccacaacacctggctaatttttgtatttttagtagagatggggtttcaccatgttggccaggctggtctcgatctcctgacctccagtgatccacttgcctaggcctcccaaagtgttgggattacaggcgtcagccaccatgcctggacccctctgcccctttaagcactgccacatattagatctacgaaggctttatggatacaatccaaggaagatgaaccttgggctagtgggataaaactaagcgcatgtagttagaatggaatgatctggaaaccaggtcccaagttggtctaaattagactcatgttgactatgtcacactgtaaaccagtctaaatgctaataagcatgcttgaccaaacactgccctgcagccttcagagaggaagaaggaaaacataatttgtatcctctctccctattttctgagtctatgggattcaaattgtagctgccatggaaactgtactttggaatttctagagcccttaattttaacttaacatataaaaacacttttgtactgattttataattattcatgatggatgagaaagtgaatgtctttgacagtgagggaagctatccgaatgctattttcttttttttttttctttcataaagatgcatatatttgcatgctttatttacctggggctaactcttgcatcttttgcagattccgacaccatagctgagttacaggagctccagccttcggcaaaggacttcgaagtcagaagtcttgtaggttgtggtcactttgctgaagtgcaggtggtaagagagaaagcaaccggggacatctatgctatgaaagtgatgaagaagaaggctttattggcccaggagcaggtaggaggattttaacatcatgcttttccactttctgtaccggagtgttcattgcaaagacgataatctgctgcactggcgtctaggatcaagcacgttttcctctgtgactctatatttaattatagttggggcaaaaaggtctctcatgttcttagctcatcttcttgaactgatgttggctaattttgaaggctcacaaattcctcttgatgtatcatgtttctatcgttgtaatttatttcagaaccaaggtggccttttagctaatgaatttaagatgatcttttatgaccattagctgaggactcaggatatacatatggtggggtgaatcagattgcttttgtacacgctttaggtatttgtgttgtgggcatatggatttggttttaaaacaggcctttgaagaaatcaaataacattctttgttatgtggctagggagttgcttgtttgagagcaggtagaacgttatcttttttgttgtggtatttttctttcttttaaacaaggctactgtctctagacatattgattcatttgctgtgttttagagagatggccgtcagccttggaattcagagagtaatttattacttacagacattttagtgcacatgatatgtctgataatgtacccagctctgcaggaagcttgcaaaaggaatagaagtcccatggttgctattttcagtgtttaaaaacaaccttggaaagtggaggaaaaatgcaaatgtataaagcaggtgcttaccagctaaagtatcacagaagtgggagagcaattagcaaattaattaacgatgatgtgaggggagatgttgtgggtgagcaagggacagttagggacagttctcaccgatggggggaaatgtaggttctcggcagagagaagtgatgagaacatgttgggtagaagtgtgacattctggagtactagaatgctatgcaagtgtgtgtgtgtgggtgtgtgtgtgtgttcagtggttcagaacagactgggaaatggcgaaatgaggacatttgggtggggagggggaaatgggtgggaaactcaagaacctttttttaaaaaattgtggtaaaatatatataacataaagtgtaccattttaaccatttttaaatgtgcaactgagtggtattcagtgcattcatgatgttgtacaaccatgaccgctctccatttctagaatttttctatcatcccaaacagaaactctctatccattatacaatacctccccattcccccaagaaccagtttttgaattgcagtttactttgtgaggctgttggggattatttaggcctctggaaggaggaggttgggatcagagtctggccctgtggacttcaatgactttgtgtggcctccaatcagagaagcagcggagggcaggaagctgcttgtcagaatctgagagtgatgtggcttctttgtttagcaataaaatgtgagcacataatagaaaggaaaagtgacaggacatggcagataatttggaagagaggagtggaagatgctcactcagcctcccagctcctgagaaagaactgtgtctcatcagttcatactacctgagcatctgttgtatctggtgtgtttctaggtcctggagaagaggcattacgtgtagccctgaccttgtgatgcttatgtttttgatgggaaatagtgcgtgtaaaaagaaaataatccaacaggccacacggcaggcaaacaatagagatattcaaataggtataccttcctccaggtgaatggcctgaaatgaccgtgtggaagtgtgggctgggggcttataaaattatacacatacaggcgctaactaaagccgcctattcattccttaagaggatgcatagaaaagaaaagtagggtccttaactgagccatttggaatttaagggcatgagagaagccagcacaagcagtgaagggaaggaaaagaagtgcccgagaggagggagggatgctgttctgcagacaaggcctgccgcctgggagaggcccgcacgcccacccagggttctctgacagctggaaggggtcttcagagactgtttatattttatttatttatttatttatttattttgagacagagtctctgtcacccaggctggagtgcagtggtgcgatctcagctcactgcaagctccgcctcccaggttcacaccattctcctatctcagcctcccgagtagctgggactacaggcgcctgccacaatgcccggctaatttttttgtaattttagtagagacggggttttacctcgttagccaggatggtcttgatctcctgacctcatgattcgcccacctcggcctcccaaagtgctgggattacaggtgtgagccactgtgcctggccgactgtttctactattttagagagagggtctcactgtcatctgtgctggaatgcagtgatgcagtcatagctcactgcaccctcaaactcctgggcttaagcgaccctcccgcctcagcctcttaagtagctgggaccataggcatgtgctgccacacccagttaactttattatttatttatttatttagagaatgagtctcattctgttgcccaggctagaggtgcagtggcacgatctcggctcactgcaaccccgcctcccaggttcaagcgattcttcttgctcagcctcctgaatagctgggattacaggcacctgccaccacacctggctaatttttgtatttttagtgcagagggggggtttcaccatgttggtcaggctggtctcgaactcctgaccttgtgatctgcctgcctcggcctcccaaagtgctgggattacaggcgtgagccaccgtgcccggcccactttattattttaaaaacattgttttatttttatttttttgagacagagtccgctggagttcagtggccggatctcactcactgcaacctctgcctcctgggttcaagtgattcttgtgcttcagcctctctagtagctgggactacaggcgggtgccaccatgcctggctaatgttttttgtatctttttagtagagacggggttttgccatgttggccaggctggtctcgaactcctgacctcaagtgatctgcccactttagcctctcaaagtactgggattacaggcgtgagccactgtggctagcccccagctaactttaaaaaaaaattttgtgggccgggtgcagtggctcacgcctgtaatcccagcactttggaggccaagcagggcggatcacttgaggtcgggagtttgagaccagcctgaccaacatggagaaaccctgtctctactaaaaatacaaaaaattagccgggtgtggtggtgcatgcctgtaatcccagctacttgggagctgaggcaggagaattgcttgaatctgggaggcagaggttgcagtgagcttagatcacgccactgcactacagcctgggcaacaagagcgaacactccgtctcaaaaaaaaaaaataaattatgtagaggtgggatctccctatgttgcccggactggtcttgaactcctggcctcaagtgatccttccatctccccctcccaaagtgttgggattacaggcatgagccacccctcctggctgagactgcttattttatttatttttaattttttttgttttgagactgcttattttaatggaagcttcaggggtcagacggggtcagacagagtcattggtgagcaagcaaaggtgtagactgttcagttcagccttccttggacaccttttatgtgccagacaaaagaaggatcagcatatcaggtgcagtaaattattggggttatgttggtgtttcccaaatgtgttagatttatccctggtagtgttaaatctcatgattttaggtagtatatggacaacctatgtaaaaacatttaatagtttaatattaactagcatatcaaaacctgtgactttgctcacgcctgtaatcccagcactttgggaggccaaggcgggaggatggtttgggcccaggagtttgaggccagcctaggtaacatggtgagaccctgtctctaaaacaaaacaaaacaaaacaaacaaacaaacaaataaacaaatcccctgtaacttgttctaacaataacctaaacaattttttatttaaaattaaataaaaaaattgaaacagtaaccatttttttttttttttttggagacagagtcttgctttgtcacctagtctagagtgcagtggcacaatctctgctcactgcaacctctgccttcaaacaattctcctgcctcaggcttctgagtaggtgggattgattacaggtgcactccaccatgcccagctaatttttgtatttttagtagagacggggtttcaccatgttggctaggctagtcttgaactcctgacctgcagtagtccacgtgccttggcctcccaaagtgctgggattacaatcacaaatttatagaaaagttgcaagtaccatgtagtcagggttcttaagagaaatggaaccagtaggagatagatatataatcatctcctaggattataagttgacacataagactaaccgtcacatacagtataaacaactttttttcttaaaccatttgatagatacacacacactgatatacatagaatatatatacacacacacagaatgtatatacacatagaatatatgtgcatacagaatatatacacagaaatatatatgtacacatgcatagaatatatttacatatatatgcatatatataatttatttattttaagcagttgatttatacagtttttgtttttgttttttttttgagacagagtctcactctgtcacccaggctagagtgcagtggcgagatctcagctcactgcaacctctgcccccgggttccagtgattctcctgcctcagctccacaagtagcacaccaccatgcccagctaatttttgtattttttttagtagagacgaggtttcatcatgttggccaggctggtctcgaactcctgacctcaagtgatccgcccgccttggcctcccaaagtgctgggatttcaggcgtgagccaccacacctggctcccataatgtcttttagaataaaacgatcgagttgaggatcacacgtgacacttaattgtcctgtctctttagtctccttcaatctggagcagttctttgatttttcctggactctcatgaccttgacaattctgatgattataggccagttattttgtaaaatttgaatttgtctgatgttgcttatgtttagatttagggtcttggtctttggccggaatatctcagacaagatgctctgttcttattgcatcagagcagaagactctctgtttcagttgatcacatttatgttgatgctcactttgatcacttgattaaggtggtgtcagttatgcctttctacttgtagggttactccttcctccttcgtgattttatttattttatttttcttagagacagggtcttgcttggttgcccaagctggagtgcagtggtgggatcttggctcactgcagccttgaactcctgggctcaagtaatccacctgccacagcctcctgagtaactgggactgtaagcgaacaccaccacacccagctactttttgtattgtagagatggggtctcactgtgttgtccaggctggtctgtaactcctggcctcaagcagtcttccggccttggcctcccgaagtgctgggattacaggcatgagccactgcacccagcctcctttgtaattaaaaaagtattttatggggagttactttcaagtgatggaaatattttatatctatgtggacttggattttcctatttcagtcagtgagttataatccatttctgtcactagttttatacttaaattgttcccaacttggccactgagaacctttttaggttagcttttgtgtccttttcacatgtctccaagattcattgaatactttcctgctttctggtatagcaagatgttcaggttcttttggtacttttactttctctgccctggctctggcatcagtcatttctcagaggagccctgtgcctttcagtggacaatggtgtttagaggccaagatctggacattgggtgttttcattgctaccggtgtgtcactactcccagacccctttcagtggacagcactaaggaatacacatacgtatatacaatatatccacctacacatgtgcgtgcactcacacacacacatatacattacatctatatttgtgtatccatgtctatatattgaaaattgtggctgggcacagtggcttatgcctttaatctcagcattttgggaggctgaggcaagaggatcacctgaagccaggagttcaacaccagcttgggaaacagagagagactctgtctctacaaaaataaaaagggaaaaccatgagttcacacccgtgcccccagttccaatccaacttcacagggttcattttagttttcaccctttccatgtttgtaattctcttctctgacattatacccttaatatgtttacttattttatgcatctgtatgcatccaatctactgtctttgttggtatcccacctccccttggtgggtccagataatctgctctgggttgccctttcacgtggatgtcttccttaccctgtgtgggcctgtgatactgggctgcccccacacatgagtgctgccctcctcacgttgcttgggacggcactgtgtcctgggccaccatgacttttctcataactagcgtggatgcttaccttgttccacaccagtgaatggcttcaggaagagaagaggaagagaaaaatatttacatttaaagaaaggtagtttaaagaaatatgttaggtaaagaattgagcaggtaatatacggagctggcaaaaattgtgaccaaagtaggtgaatgattgagatttatgcaattctgggctaagtgacagccccttccctttcccttcccttccccttcccttcccttttcttccctttcccttccctttccttccctttcccttccccttcccttccctttccttccctttccctcttcttccttccttccttctgttttcttttcccttctttcctttgcctttttttttttttaaagctagaaacatcagtttaggcataaagacagaggaaaaggcttctttttcctctcacagttctttataattgtctaagcagtttcttttttccctaggtttcattttttgaggaagagcggaacatattatctcgaagcacaagcccgtggatcccccaattacagtatgcctttcaggacaaaaatcacctttatctggtgagtctttacatctgtctctctggaattagcctagcactctgacactcagatgcctgtggtagaactgaatgttgttcttgcccatgtggtctcattcatgcaaagactttcttaccttacaggtgtctccctggtttcctcgttataaagatcaagagctaacccatttagaaacagcctcattgggctgaacgtggtggctcacgcctgtaatcccagcattttgggaggccgaggcgggtggatcacgaggtcaggagatcaagaccatcctggctaacacagtgaaaccccgtctctactaaaaatacagaaaaattagccgggcatggtgtcgggtgcctgtagtcccagctactcaggtggctaaggcaggacaatcgcttgaacctgggaagcggagcttgcagtgagccgagattgcgccactgcactccagcctgggtgacagagcaagactctatctcaaaaaaaaaaaaaagaaaaaaaaagaaacagcctcattgacagttggatattgtagctgtggctttcaggcaataatagggaatcatttattggggaatagtctgtcattatgtataagataatcttgctttaatttttaaaaacttcctgtgttagcttgcttaggattaaaaaaatgataatagtgcatggttgttataagaaaatgcaaacactgcagacatgcatgaagttgaagggaaagccccccattttcttttccttttctttttttttgagacagagtctcgctttgtcacccaggctggagtgcggtggcactatctcggctcactgcaatctccacctcccaggttcaagagattcttctgcctcagcttccctagtagctgggattacaggcacgtgtcaccacgcccaactaatttttgtatttttagtagagatggggttttaccacgttggccgggctggccgcaaactcctgacctcaaatgatccacctgcctcggcctcccaaagtgttgtgattacaggagtgagccactgtgcccggcctctccgttttattttctaatcctcctccctaggggaagaaatgttaaatggttacataagctttccctttctgacccttaactgtgctctgtaggagcatggtgggggatgtttcttttcttttcttctttttttgagaccaggtctcactttgccacccaggctggagttcagtggcatgaacatggctcactgcagcctcgacttcctgggctccagcaaacctcccacctcagcctcccgggcatacaccactgtgcctggctaatttttgtatttttagtagagacggggttttgccatgttgcccaggctggtttcgaagtcctgagctcaagagatcttcctgccttggccttccaaagtgctgggattacaggtgtgagccaccatgcccagctccggtgggggatatttctatatccacatgtgtatagtttactttataaaaatggtatgttactctgtgcttggctctccagcttgctgttgcctttcaccagtgtatcccagacatcctttcttccttgtcagtaacgcaggtctactttattctttgagcagtggcataattttccctgatgtgtatatatcataagttagagaatgctaaaattcattttggggccttgtttaggttcttgagggattaaattcctaaatttaacaagtgtatcctggaaacaatttttgttcctgattcagcccttaaaagaggactatcatgttaccttgaatggagataaacaggctcacgtaagagaaaagggtaagagggatgaactcccacttatcttaaacttctactggcccgtttttggggaatttgctgcttttattcctgacctaaaataaataagtttatgtgtcttggtttcatattagttgagaacccagtgcctggagagaagttttccttgtcctctgagtgaggacattcacatatgaatctattggcagactggctttgactgaccacacgtgccttcagaaccaatgccacagctcttaggtttatggcctgaaacaccctttccttacatattgccttagaaactttccttccttgagacatggggcatggaaccctcaccttcacagatgaccttggtgtgtttctagggttgctggtgttccaggacatctgttgcagatgcagtatttaccttgtgctctctgcatcataagcagcttctcatgtttgaatgtattaacagacttttaattttttttatttttgagacaaagtctcactctgtcacccaggctagtgttacccaggctggagtgcaatggctcaatctcagctcactgcaacctccacctcctgggttcaagcgattctcttgcctcagcctcccgagtagctgggattacaggtgcatgacaccacgccctgctaatttttgtatttttagtagagacggggtttcgccatgttggtggggctggtctcaaactcctgacctcagatgatctgcccgccttggcctcccaaagtgctgggattacaggcgtgagccactgcgccttttcttttcattttttttctgagatggagtctttctctgtcaccaggctggagtacagtcatgcaatctcagctcactgcaacttccacctcctgggttaaagtgattctcctgtcttagcctcctgtgtagctgggactacaggcgtgtgccaccgtgcccagctaatttttatatttttagtagagacggggttttgccatgtgggttaggctggtcttgaactcctgacctcaggtgatccacccgtcttggcctcccaaagtgctggggttataggcgtgagccactgtgcccagcctcaggcttctttattaagaagaagttcgggccaggtgtggtggcttacacctgtaatcccagcaatttgggaggccgaggtgggcagatcaggaggtcaggagatcgagaccatcctggctaacatggtgaaacctcgtctctactaaaaatataaaaaattaggcaggtatggtggcgggtgcctgtagtcccagctactcgggaggctgagggaggagaacggtgtgaacctgggaggcggagcttgcagtgagcccagattgtgccagtgcactccagcctgggtgacagagcgaggctccgtctcaagaaaaaaaaaaaagacgttcccttgaaacaacagggcttttgtttgttttggtttgtgtttgtttgttattgttgttttagatacgtatttttttctttcttttttttttttaagtgatgatgtctctgttgcagtggcatgatcatagctcactgtaacctcaaattgcagggctcaagtgattctcctgcttcaccttcctgattagctgggacaacaggtacaaaccaccatgcctagcgaatttttaaatttttcatagagactagggtctcactatgttgcctaggctggtttcgaactcctggccccaagtcatcctcctgccttggcttcccaaattgttgggatcacaggcatgaatcaccacacccagcctatttttagatattttaattcgagctctacaggaggtttagaacactagcttgtgaagataaacttcattttcaaggccacacagaatctaagtggtcctggaattaggaagggctttgattttttggaccaaagttgagagtccacagttttctggtctaccttgcactgctccataaactcatatttcttttctctgagctgaagagctccccttcttggtgtctagtctcaggcaacttattcttaaaagtaagcattattgaaatgctttgggattttcacatcatcaaggtccattttggtagaggcactgacagattttgagtgttctgtgtgaaggaactcagttgaggatttagtggtccatgtggcaggctactgctcagtagcttcagggaaaccactgcttgcctcccctgtggccagtgaggatgatcagaggagtcccagcaggaatgcccaaatgtagttttcttacatgttgatgggagtgcattgtttcatgtctaaacagttctcaaatcacatcttcaggagggtactatctgggcactttgataatttctcactttgatgtcaccgttcttattaccatcacctagttttgtcatagtagaaataactttcctttttctgtgtgtgtgtgtgtgtgtgtgtgtgtgtgtgtgtgtgtgttttgagatggagtcttgccgtgttgcccaggctgtagtgcagtggcgtgttctcggctcactgcaacctctgcctcccgggttctcctgcctcagcctcccgagtagttgggattacaggcgtgtgacaccacgcccggctcatttttgtattttcagtagagatggggtttcaccactttggccaggctggtcttgaactcctgaccttgtgatccgcccaccttgacctcccaaagtgctgggattgcaggtgtgagccaccacgcctggcttttttttttttttttttgagacagagtcttgctctgttgcccaggctggagtgcagtggcgggatcttggctcactgcagcctccacctcctaggttcaagcaattcttctgcctcagcctcctgagtagctgggattacaggtgcccaccaccatgtccggcaaatttttgtatttttagtagagacagggtttcaccatgttggccaggctggtttctaactcctgaccccaggtgatccgcctgcctcagcctcccagagtgatggaattacaggcatgagccactgcgcctggccacctttgtcttcttagttgtggatttaactgctgtggacatctgcttgggcatagccttcccggagtacctcttggattgggactgtctgtgggtttctgtgctaggacaggctcccagatgtaggaggcttccccaatgatctcaccactggcatcggcatccttagcttctactcagcttttccatctgccatcttgcaagatggaaggttgttttgtttttgtttttgttttttggtttattttttttgagatagagtctcgctctgttgccaaggctggagttcagtggcgcaatctcggctcagtgcaacctccacctcctgggttcaagtgattcacctgcctcagcctctggagtagctgggattacaggcgcgtgccaccatgttcgtttaattttttgtatttttagtagagacggggtttcaccgtgttagccaggatggtctcgatcttctgacctcatgatccgcctgcttcagcctcccagagtgctgggattacaggcgtgagccaccgtgcccagcctaggagggttcttaatgcagctgttttttggagttctggttgcctcagcacactgctacttgggtcaatgacatttttactcccttgttttgtagctcaattgggtattactgatgggattttgtaattattaatattttcttgtctccattttcttctcaagtactttgttgcttttgagtaaaatgcttgctaagggtatagttttcacataaaagctcaaatttagcatggaaattaagatatgctcatacgtctgccatcccttatctgtaattctgaaatacct

SEQ ID NO: 119 - DNA, 2652 bp, Homo sapiens
  source 1..2652: mol_type = other DNA
cttccgcttccggcgctgcggcagtccagatcaaaaatggcggtagttggtgtgtcctcggtttctcggctgctgggtcggtcccgcccacagctggggcggcctatgtcgagtggcgcccatggcgaagagggctcaggtactggggccggggtcgacgggtcgagcctcagccccactcgggcgagacagggagggactgtgaccttggcccgaggccttgcgggagggaaagtgagacccgggcccgccccataccggcgctgaacgtttgtggcttctccgcagctcgcatgtggaagactctcaccttcttcgtcgcgctccccggggtggcagtcagcatgctgaatgtgtacctgaagtcgcaccacggagagcacgagagacccgagttcatcgcctacccccatctccgcatcaggaccaaggtacgcccttgtacatctcttcaagcgtccgttctcttttcgttatgtgtgccttagtgcaagttcttcattctctgaaggcatgggtgccaggcgtgtacagcttgtttatcctcacaaacagaaaatgtattttcttccattttgtggatggacagctgacacttgggattacgtctcaattctcttcttcaaggtcatacaataagtgctcttcagtttcccttttctccgattcatcctacctcctgccttctgagacagttcttttttttttttttttttttttttttacttctgagacagttctgaaacaggtgtccgttgtgtaaagcctggaggtttgggaaatccaattagagtggcaaagtctgaaggtggttcgcgtaagcgaacccagcagctacatgggaggctgaagcaggagaatcccttgaacctaggaggcggagtttgcagggagctgagatcgtgccactgcactccggcctgggcaacagagcgagactctggtctcaaaacaaaacaaaacagcaacaacaaaacatgggcatctggcagctactagttgcataatgaagagactgacagctttctctattccccaccaataccttttctcgactgttttatcattggttgttgatgtagatatattacaatgttgtgtcctctgttgtttgctgtatctttaacaagggcttattctgattcttcaatactggccatgcgcggtggctcacgcctgtaatcccagcactttgggaggccaaggtgggtggatcgccggaggtcaggagttcaagaccagcctcgtcaacatggcgaaacactatctctactaaaagtacaaaaagtagccgggcgtggtggcgggcgcctgtaatcccagctactcgggaggctgcggtgggagaatctaggaggttgaacccaggaggaggaggttgcagtgagccaagatccagccattgcactgcagcctgggcaacaggagtgaaactccgtctcaaaaaaaaatagtaataatatacttgatcttagccaaaaggccgagaagtgatgaaaaaagttattattattattattattattacatcacctagcccatataggactggccttgtagaaacttaacctagactcttgaatttgttgagtctttgagcggcactcccatccttgtacaatgcaattagaagccaaacagtaaaggtttctcagcctcagcactgttgacatttggggctgggtaattcttgttggggggctatcttgtgcattgtgaaatgtttagccatatccttggcctgtacccactaggtggcagtagtacctgcgcaaccccactcccgcttccccctcccccgcccccatcacagtgtctcccgatactacccagtgtgccctgaaggggcaaaatcaccctgggttggagaccgttgccctaaagtaatgcttttcaaaggtaataggcaagataattcagggtgggctgcagtttcccagcccagatattgtttgaagtctgggatggtgccagaaatctgcatttaattaagcatctccctcccctaatactgccaccattttgatataggtgatttgaggattacactttcataaacacagcactggatatactagttactagggagaggatgatgagtaactaacttgagcttgcattttctgccatccatatttgtttctggaattaaaactgtcctgtagccaggataactttaagggctcccctggtagttataagagctccttaaataatgggaaggttgaactacaccagtagataaaggactaatttccattttgtttttatatatgatctgtcaccccgttataagcagttcatgacggtgttctttctaaattattttctggaattatctaactgacatcttcactccacagccgtttccctggggagatggtaaccatactctattccataaccctcatgtgaatccacttccaactggctacgaagatgaataaagagaatctggaccactacccgggcaccagggaccacagcactggtttggaccgttactctgcacatggaccagaaaaagtatatgggaccttaagctcaccttctttacttgtatcaaatgatgactggtatactggtctcccatccctttgcttgtggcaggagatggcttaaataaataacttaaatttagattggtcatga

SEQ ID NO: 120 - DNA, 28638 bp, Homo sapiens
  source 1..28638: mol_type = other DNA
ggagagcctggggccgggccgtgtggatgccatccccgagcgcggttcgcgctcggctgaggcgctggacaagtggcttgggctcccgcgcctcagtttctctctgtggcgccgcctacctcacagacttgtgagcactcactgacgtgggtagcgcccagggcctgcggggcgcaggagagctggagtcaggcggagaccgcaggctgaccccgcagcggccgggctgtcgcggcccccacctcaggtcagtaggcccccgggccaccctgtccccattttacagttgctcagaactgacggtgtcagcatgagatggactccatagcttggccttgagtttgtcggagtcgagggagtaagactcttaatgagtatcacagcgatcactatagagtgcatccgacttgtgcttttcatcctctcccgggcagagtctgaggccacagaggggtcaggaatggaacccagagccatgctcccatcctaagtactgagtccttatggagctcaggtagacacccaccttggcacttacttttccacattcacatcccagaacgcggagcattgaacccagggaccttacagtgaggccttgcaccagaagactttttgtttgtttttgatacagggtcttattctgttgctcaggctggagtgcaatggcgcgaacacggctcactgcagtctcgatctcgctggactcaggtgatcctcccacctcggggcgccgtgaggggtctgcgctgcgtccagctagtttattttctattttttttgtagagaggctggtctcgaactcctgggctcaaccgatcctccagccttggcctcccaaagtgttggattaccggcttgagcccggcgcccggctggaatactcctaacctaaagattgttcaggctgggtgcggtggctcacgcctgtaatcccaacactttgagaggccaaggcgggaggatcacttgaggtcagtagttcgagactagcctgggcaacatggggaaaccccgtttctactaaaaatacaaaaattagctgggcgtggtggcgtgttcctataatcccagttacgcgggaggctgaggcaggagaattgcttgagcccgggaggcgaaggttgcagtgagccgagatcatgccactgcacttcagcctgggtgacagagtgagactgtctcaaaaataaataaagatttttcatattaaaaatgaaacctggctgggcgtggtggctcatgcctgtaatcccagcactttaggaggctgaggtgggtggatcacttgaggccaggagttcaagaccagcctggccaacatggcaagacccgcccccctactaaaaatacaaaaaaaaaaaaaaattagccaagcttggtggcacgcctgtagtcccagctgcttgggaggatgaggcacgagaatcgcttgaatctgggaggcagaggttgcagtgagccgagattgtgccactgcactcctccagcctgggtgacagagggagactctgtctcaaaaacaagacaaaacaaaaacaaacaaaaaaagggactaaaaccacacatttaatcagaaggtagttgatttctcattataccatctgagcattttaaaatcaaaacaaaccaaagactagacacccacatatactactgagtgtatatcttttttggaatacaagttgatagtatacatcaggctttcataatatacatatacccttcgatcttgtaattctgcttgtaggattttttgtttgtttgttttgagacggagtcttacactgtcacccaggctgcagtgcagtggcgtgatctcggctcactgcaagctccgcctcccaggttcatgccattctcccgcctcagcctcctgagtagctgggactacaggtgcctgccaccacgcccggctgatttttttatatttttagtagagacagggtttcaccgtgttagccaggatgatctcaatctcctgacctcgtgatccgcctgcctcagcctcccaaagtgctgggaatacaggcgtgagccaccgcgcccagctgcttgtaggatttttatcagacggaaataagcaagagattctcataataaattacatgtgtatatttatcattgcattctgtgcaattaaaaaaattaaacttgataataagggagtggctcaacacattaactttgaatgttacacaattattaagtcatgtttttaatatgacagagatattaaagtcacagtaatttacagttaaagtgaattgaaagtggtgtttaatgtatacacatatatagtgtatttgctgcttgtaacaaaaaaaaaatagaaaaagctttccaaatgttgtggttgtggagatatctcttgatggcagtgatttctatgtttttatttatgcttttctgtatttctcaaattgtaattagcatgcactacttttataattggaataaaacataataaatgattcctaaaataaaaccattataactatctgttgtattctggattatgtaaagcatctagctgttctctagacaagcaggaaagagccctggccaaatatgatctcgagtctaagtgtgcagccttataggagcttacatatcctataggcatccgaaagtccagatgccttctcattttgggtggtgtgcttaggtgtattaataccattctctgagtcctaccactcctatgtgattgttgcctggaaagacaaaaaaggaaaaaaaagtgctgttggagacaattgggcagtctcctagggagagagaaatagagtcagctaagtgactcaataggactgtaggtggaaaactgcttgcaaataataataattcagctttaattgtgcaatgtcctgcagcatacaatctccaaaggagttcagttacccagcagaaaatgtagggatgtggttagtacaggcttcttggattagatagagcacagctaaatccttaggaggcatttatgatcatccatgaaaccccctttattcctgtactgacctttgcagttagaacacaaatgagaccacaattatgacttcatgttcaaagggttcataggttccattctctgctaaggccagagactctaggcagggacaccttttaaactttttgttcatctagatattcaacattatttatgatttaggtcctgtatgaggcccagggcatgcaataatacagctctgtccttgagttgtgtatataggttgctattcggtcatgtagagtacagttgtgataaggataagctgcttgagactacatcggagggtcacctaccacagtcttagagattctaaggaaggcttctgggaggagatgtttagagtcttgaagaaccagtaggagttaaccagggggaagagggaagggcatttcagacaaaaatgagggcatgactgctgagtgcagtggcagtaatcccagcactttgggaggctgaggcaggaggatggcttgagtccaggagtttgagaccaggctaggcaatgtagtgagacccctatctctacaaaaaacttaaaaattgccaggcccagtggctcatgcctgtaatcccagcactttggggaggtcaaggtgggtggatcacttgaagtcaggagttcgagaccagcctggtcaacatggcaaaacctcatctttactaaaaacacaaaaattagtcggaggtggtggcgcacacctgtaatcccagctactttggaggctgaggcaggagaattgcttgaacccgggaggcagaggttgcagtgagccgagattgcgccactgaactccagcctggtcaacaccgagactctgtctcaaaaaaaaaaaaaaaaaaaaattaaaaaattatctaggcatggtaacgtgcacctgtggtctcagctacttgatctcgaactcttgagctcaagtgatccgcccatctcggcctcccaaagtgctgggattacaggcattagccacggcacctgacagtcccagctacttaagaggctgaggtgggaggactgcttgagcctgggaggttgaagctgtagttagccatgattgcaccactgcactccagcctgggcaacagagtgagactctgtctcaaaacataaaaaaggacaccatgagaaatcacccaaataggagagagagtagcagaccagggaaaatccctactggtgtgactggggcaaggagttcaagcagggaagaagagagaaggagctgaggcaccaccagcctgggcaacatgttaaaaccccgtctctacaaaaaatacaaaaattagctgggcatggtggcacacacccatagtcccagctacttgggaggctgaggggggagaatcacttaagcccaggaggcagaggttgcagtgagccaatattgcaccgctgcactccagcctgggcgacagagtgagatcctgttacagaaatgggcttgtccttcttttcaccaaactgaaaagaagcctttgatgttggcagactattaagaattaatgcagttcccacagcaagccatttattctccaccagagtgtagggcagtgcccaactgaaaaaaacaacataaaaaaaaaaaaaaatcccaaaaccaacaacagctcgggtgatgagtgcatgaaaatctcagaaatcaccactaaataacttaaagaacttatccatataaccaaacaccacctgttccccaaaaacctattgaaataaaaatttaaaacaaacaaaaaaccaacaacgccaggcataaaacatgctgcaaacctgcccatctggttttctccttttctctgtgacatcagtcccctctggcatcccagcaaaatattttcctctctgtcaggctcagtcatgagctcctcccagaccttggccctaggtatcagtgggcagagaggaagtgatgggggagtagaccatctgagaagatgaggaactggtcccgcctggcaggagagctatggaatgagtcactgggaaacgtgttcctggtcacagcaccctgggagctttctctgtcattctctaccactgtacttgtgtgatggagtaaaataaaacatattctggaaagctacataataaagaactgagccatgcaggggaggaagaagagaaacagcagcagaactaggaggtttggaagagagtttggaattgggggtgagctttaggaaagcaagtgtcaagtgtgggaggatgagaagagaaaaatgggaaagataattcaagatttgcagtatattgtgaatataattcccctctggtgtttttttcagagactgcaaaaaatctttaacattatttttcaataacttttagataatgaactggtgttttctttgaatatgcccaaacaggtgggaacacaagggcttgattttatatgaagttacttcaagtgaacatactgtatttgtagcagctcggttgctttatttttactaacttgttaaattctgtgatggagtcttcaaacagctttttatatcagggcttccttttcttggattaatgggcttctgggatcagtgaactcctgcctccctgccccctcaacctccacctcctgaccctgatcctgcaaagttgtaacagttgtatgcaaaatattgtatgtgggcagaaaagtgtttttattctggggagaatctccatgtagcactgtcccacagaactttctaggatgatgaaaacattctatatttgagttctatgtggtagccattggttacatgtagctattgagcacttaaaatgtggctactgcaactgagaaaccaacttcttaaattatatttaacaataattaactttaattgtaatagccaaatgtggctagtggctaccatacaggacagcgtaggaatttatcattctcaaaggtctataagctgtactcccccattcccccaaaaaaggccaagaaacactgagaccaatcacttccctttacagccctatggtactggcacatagtaagtgcttagtaaacacctgttgattttattaactagtatataaagaacagttattctagctccagaaaagtggaactgaggtacaaaatggcaaatgagctcatcaggttcaccaaatttcatttcctaagctctaaattccttaccctcaacccagaactttttccaaaacattttccactgtaacaaaccttgaaaactttcttcacagcagagtaaatcagaaacacaagcaaagggtaggggggtgtgaaaagattaataacagtactaagaatgtttttcaatgcaacaaaaaaggatgcatttatttagtagaatcctaatttttttagacccaagtcagttttatactaagcagatttttaatgaactgcgtcaatataattcagtaatggcacctccaaggcaaatacattccttaaaggtaaaaaacaagtatgggaattatctggagttttttttttttaagttaaaaaaaaataataataactgaaagccaggaagcttctaggctacacatcccccatgctaacacatgcccagtggctgaacttccttctgtctgcctgaggctggctctccccctcagccagcacatgtgcagggcttctgtgaatgtcacattgacagacattccttgctaggcagctggggaccagtttcttttgtaattccatccttctcatgggctgccagtctgtcttgttgtgacacactccttgaaggtgctagaaggacagcggatgtttggggggtttttttgtttgttttttgagacagagtttcgctcttgtcacccaggctggagtgcagtggtgcgatctcggctcactgcaacctccgcctcccaggttcaagcgattttcctgcctcagcctcctgagtagctgggattacaggcatgcaccaccacacctggctaattctgtattttttagtagagatgggatttctccatgttggtcaggctggtctcgaactcccaacctcaggtggtccgcccgccttggcctcccaaagtgctgggattacaggcatgagccaccgcgcccggactttgttttttgttttgttttttttgtttttttttttgagacggagtctcgctctgttgcccaggctggagtgcagtggcacgatcttggctcactgcaacctctgcctcctaggttcaagcgattctcctgcctcaacttcccaagtaactgggattacaggcacctgccaccacacttggataattttgtatttttagtagagattgggtttcaccatgttggccaggctggtctcgaactcctgacctcaagtgatccacctgtcttggcttcccaaaatcctgggattacaggtgtgagttaccacgcccagccaagagcaggttttttttatctagtgctatgcttggaccccagctttaagagcccagggttatgtacatggcatctgggactttggtggtggcttcactccttgtctgctcaacatttgttcatgtattcaacccacatttatcgagccatagaacattgagcctggctctgtgctgggcactggtgctcgggatacaacagtaagactcaaccctgccctcacaccattcacagacaactaaaaaggcaattacagtcaggcgtggtggctcatgcctgtaatcccagcactctgggaactcgcttgagcccaggagttccagaccagcctaggaaacctagtagatcccgtctctacaaaaaaaataaataaataaaaataaataaataaataaaaaaagctgggtgtgatggtgtgcacctgtagtcccagctactctggaggtagaagcgggaggatggcttgaggccaggagttggaggctgctttgaactagggtctcgccactgtactccagcctgggtgacagagcaagaccccgtctctgaaaaataaagtaaaaatatatatatatttttttttctgagacagagtttcgctcttgttgcccaggctggagtgcaatggtgcgatgtcagctcactgcagcctccgcctcctgggttcaagtgattctcctgcctcagtagctgagattacaggcatacgccaccatgcctggctaatttttttttgtatttttagtagggacagggttaagccatgttggccaggctggtttcaaactcttagcctcaggtgatccacccatgtcggcctcccaaagtgctgggattacaggcttgagccactgcacccggccaaaagtttttttttttgttgttgtttttttttttgagaaggagtttcactcttgttgcccaggctagagtgcaatggcacaatctttgctcactgcaacctccacccccaggttcaagtgattctcctgcctcggcttcctgagtagctgggattacaggcatgcgccaccacgcccagctaattttgtatttttagtagagacgaggtttctccatgttggtcaggctggtcttgaactccctaccgcaggtgatccgcccgcctcgacctcccaaagtgctgggattacaggcatgagccaccatgcctggccccaattttttttttttttaaatagagacagggtctcactatattacctaggctggtctcaaactcctgagctcaagtgatcctcctgcctcagcctcccaaagtgctagtattacagacattaagccaccatgcctggcctaaaaaataaaaaggcaattacaggctgggcacagtggctcatgcctgtaatcctagcacttagggaggctgaggcgggcagatcacttgaggtcaggagttcgagaccagcctggccaacatggtgaaaccacgtctgttttcttttcttttttatgagatggagtctcaatctgtcacccaggctggagtgcaatggcacaatcttgctcactgcaacctccacctcctgggttcaagcaattctcctgtcccagcctcccgagtagatgggattacaggcgcccgccaccacgcccagctaatttttgtatttttagtaaagacagggttttgccatgttggccaggctggtcttgaactcctgacctcaggtgatccacctgcctcggcctcccaaagtgctgggattacaggcgtgagccaccgcaccaggctgtgaaactgtctctattaaaaatacaaaaattagctgggcatggtggcaggtgcctgtaatcccagctactcgggaggctgaggcaggagaatcgcttgaacccgggaagcagaggttgcagcgagtcgagaacacaccactgcacagcaacctgggtgacagagcaagtctccgtgtaaaaaataatagtaataggccaggcgcggtggctcacgcctgtaatcccagcactttgggaggctgaggcgggcagatcatctgaggtcaggagttcgagaccaacatggagaaaccccgtctctactaaaaatacaaaaaattagacgggcatggtggcacatgcctgtaatcccagctactcaggaggctgaggcagaggaatcacttgaacccgggaggcggaggttgtggtcagctgagatcacaccatccagcctgggcatcaagagtgaaactccgtctccaaaaaaaaaaaaaaaaaaaaataataataataataataataataaaatttaaaaaggcaattataacaaaatgagatatgtgctacaagaaattcagggcactcctgcagctcttaacccaggctggaggggagtgttcagggaagacttcctggagggagtggctcttctaaactgagacctgaagaaccagatggtgctaggcaggtaaatgagaggagaagaaaagcattccagacagaaagaaagcactgcaaagaaagctgggaggacagaggcaagcttggggctttcgggaagctaaatagttcagcacagttagagcatggggtggaggtgagggctgttcttccttgcactagtgccacaagctacttacagtgagatgccctaatgtaaatcagagcctggctgggttagattacacatgtcagtcctaagtatttcagatgttcactggcaatcagtatgagttgcctttaccatacaaatgtttattgtatatccctgaataggatgattgtaaaggggtggcatgatcagtctgggggaaggggccttgaggggagtatggtctcacagtgtccaaaggagagctgtgaatagcaaaaggatgcttgtttggaagacagaaggacagcagaaggggacaaagcaaaaatccaatcatccctccttgtgtgaggaagatggggctcagggggagcggaattcaaaatgtgaggatgtttattaaaacctatggttcccccaaaattagaggggacctcaatctgcatccagagggggctggttaagcaggaaatgtacagttctagttctgaatactatgcaaacattaaaaataccacattcatatgtgtggatatgaaaagatctccaagatactgacatctacagtgtgtactgtgctagatgctagggacacagcagaggggacaaagtgtctgcctccctagagacaacaccatctccacaccctcaccttggccttcaggatgtgcctgaagcagcttctcctccactcctgctactcctggcagcttctctgggatctgctgtctggaagcctgtgtccctttccttcctccaggtctttgcatgggctggctcctctccctggacactgttttgctccctctacctctgcctcccgagtctttgcctggccaaggcctcctcagccttcaggtccttgacttagtaaggggcccaggcctgtgtgacccaatctagaactttcctttgagtttatacctctgaaaggccttgttgtctcccattatgccttttgttccacctcaaagcatttttctttttttttttttttgagacggagtctcgctctgttgcccaggctggagtcgtggctccatcttggctcactgcaagctccgcctcccgggttcacgtcattctcctgcctcagcctcccgagtagctgggactacaggcgcccgccaccatgcccagctaattttttgcatttttagtagacatggggtttcaccatgttcgccaggatggtctcgatctcctgacctcgtgatctgcccaccttggcctcccaaagtgctgggattacaggcgtgagccaccatgcccggctcacatatttcttaatttcttttttcctatttgtagtttatgattcttatatttattgaagtctgtatgtataacactgtgctaataccagtgacttcctgtgatgtcttatctttgacactatttctgacaccaaatgtgtggtgcggtctttatctctggcaccagatacgtgtcatttttccacatcaattgttcaattatctgagatcaactggacctctgaaaattctattcagttctgacactaactacccagagttagcacagaccctgaacaaaagttaaggactgagtcccacaagaccgcccccactttagatgcctgcacaaatgaggtgccccagctacccacatttttgttgggcctactacaaattcagaggttcccactcacccccttcaggttcaataatttactagagtgactcacagaactcaggacagcaccttatttacattttccagtttattataaaggatacaactaggatcaaccaaatggaagcgatgcatagggcaaggcatggggcggggcacagcaggaggaggtgggaacagagcttccatgtcctctccaggtgcaccaccctcccagcacatcaatgcgttcatcattccagactttcggaacctcctgttcaagagtgtttggagcccagtctctagccccactcccctccctggaggttgggggaaggagctgaaagtttccatctctagtaatgtggatagtctttctggtgaactcccatatgtatgttaataaaataaatgattaaattttgtcttctttttgtttgttttagagacaggggtctcgctctgttgcccatggggcagtgcagtggcatgatgctagcccacggcagcctcgacctcctggactcaagtgatcctcccgcctcagcctcccagagtgttgggattatgggtgtaagccaccacgcttggccttctcttgttaatatatctttcgtctgtttaattcacaggtccccaaagactaaacctgagggtagataaaaagtttttcctcccagacactgtctacaaactgattctaaaatttacagagaagccagggcactgtgttttgcacctgtagtctcagttgcacacttgggagctacttgggagctgagacaggaagatcgctggaggccaggagtttgaggctataatacaccatgatcatgcctgtgagtagccaatgcactccagcccgggcaacatagaaaggcaaaggtactagatttgccaaaacaattttttttttttttgagatggagtcgcgctctatcgcccaggctgtagtgcagtggcgccatctcggctcgctgcaagctccacctcccgggttcacgccattctcctgcctcagcctctcaggtagctgggactacaggcgcctgccaccgtgcccggctaattttttgtatttttagtggagatggggtttcacagtgttagccaagatggtttcaatctcctgaccttgtgatccgcctgcctcggcctcccaaagtgctgggattacaggcgtgagccaccatgcccggcctagccaaaacaatttttttacagagaaaggcaaaggtactagattagccaaaacaattctgaaaaaaaaaatagtcagaggactcacatactcacattacccaacttcaagactcactataaagttacagtattcaaagtagggtggtatcagcaaaaagataaacacatagagcagtgagacagaatagacagcccaggccagacatgggctttgggaggctgaggcaggaggattgcttgagtccatgagttcgagaccagcctgggcaagatggcgagacctccatctctacaaaaaagtaaaaatttagccaggcatcggtggctcgtgcctgtggtcccagctactcgagaggctgacgcaggaggatccctcaagcccaggatccagcctggaaaacagagcaagacctcatctcttaaagaaaaaaaaaggccaggcacggtggcttacacctgtaatcccagcactttgggagtctgaggcgggtggatcacaaggtcaggagtttgagaccagcctgaccaatgtggtgaaaccccgtctctactaaaaatacaaaaattatctgggtgtggtggtgcacacctgtaaccccagctacaagggaggctgaggcaggagaattgcttgaacttgggaggtggaggctgcagtgagctgagattgtgctactgtactctagcctggatgacagagagaagctctgtatcaaaaaaaaaaaaaaaggtcagaagaagagcgaaggtggtgagatatattttcaagattgagcttaaagaatttaagctcattaatgtgcttaaattagatgtgaggtgtgaggaatatacacaagtcaaggaaaacttctagatctctctcctgagcacctggaagaatgcagtggctatttacagtgataaggaagcctgcaggataagcaggcaggtttgggagtagaataggtctgttgtggatgtgttaggtttgagacagatgcctgttagacatcctagagctatttcaaataggacttagagatatgggatgggcattcaggggcaaagtttggggtgaaaatacaaatttgagagttgtgagccatgaaatttaaagccatgaaaatggagactcccaagagagagtttaaatagagaagtagcccaatagagaaggcctggttcacttcttccttcagatgtcatggagaaaaggggaaacaaacagaggagcctgaggtggagcagccagtgagatgggaggacagctaagagagtgtgtggtcctggaagccaagggaggacccagaggaagagagcaactgtgacatgtatggccatgaagggcactgagaattggccactgtgtttagcagcatggtggtcaccggtgaccaccacatttgagctgtgtgggtgcagtggattaaagagagaatgggaggtgaggaatcggggacagggagtacagacaactcttggaggaaagccgagatgggatggtagctacaggagaatgtgtaggcaagggaagcatttttaaaagaatatgacagcatgtttgcacgctggtgggaataatccagtagacaggggaaactgatgatgcaggagagggagaagagacaatcacaggaatgagaggagatggacccagtgccagggagatggccttagataggagcatgaacagttcatacagggtaacggcaagggaggcagaatgtgtgtatacagatgtgggtgggtgggtggggacaggtggtggaaatgcatggaagtttatgaaaggaataaagtagatttatatatcgtgacagggaactcagaatcatcccattttggtaaaaaggaaaaaagcctgttatatgccgggaaaaaatcaaattttaacattatctttgagttgtaagattacagatcttacaaaggaactttctttttcagattctaaatttctacagtgtttcacttttatacaatgagtacctattacttctgaaagtagaattaaaaagattatttttatctttgaaagatattcatcagaacaaagcactgttacaatactgaaaaactggaagcaacttaagtgtccactgataagtgattgtttcaagaagttatgcatggacttttttttttttttttgagacggagtctcactgtgacacccaggctggagtgcaatagcgcaatctcggatcactgcaacctccgctttgcttcctgggttcaagcgattctcctgcctcagcctcctaagtagcctacaggcacgcaacactacacctggctaattttttatatttttagtagagatggggtttcaccatattggccaggctggtctcgaacttctgaccgcaagtgatccaaccacctgggcctcccaaagtgctgggattacaggcgtgagccaccgcccctggccgcatgggctataaagaagctattaaaattgggctgggtgcagtagctcatgcttgtaatcccagcactttgggaggtgaaggcaggatgcctgcttgagcccaggagtttgaggctgcagtgagctaggattgcaccactgtactccagcctgggtgagagtgggaccccatctttaaaaatacataagtaaatagttatgttgtagaaggctttttttttttttttttttttttgagatggagtcttgctctgtcgcccaggctggagtgcagtggcacgatctcggctcactgcaacctccacctcctaggttcaagcaattctctgcctcaccctcccaagtagctgagattacaggcgcccaccaccacacccagccaatttttgtatttttagtagagacagggttttaacatcttggccaggctggtcttgaactcccgacctcgtgatccacctgcctcggcctcccaaagtgctgggattacgaaaagcaggtaacaaaaatgatacattggccaggttcagtggctcatgcctataataccagcacttttggaggccaaggtgggaggattgcttgagcccaggagtttgagaccagcctgggcaacatagtgatacctcatttttattaaaaatcaaaaaaattagccaggtgtggtggtgtgcacctgtgatcccagctacttgggagggaggggcagtcggatcccttgagcctgggagtttgaggctgtagtgaggtacgatcgcaccactacaccctagcctatttgacagagtaagtccctgtctaaaaaaaaaaaaaaaaaaaaaaagatacatacagtgtgataggtattatatgatatgaatatgttcttatctgtagactggatgtatttaagacaaaatattgacaatggttatctctgtacagttaacatttataattcattccttgtgttcttctgtatctactaccatgtgcatttattatttttgtaatttttaataaaaaacgggtgtcaggaaagaaaattgattaaaacccctgtaaatatttcacatgtgtaatggctgtgacattgagtttgagaacagctgcagttggctgcactcattacattattttactttatagctttgtagtaaaggttgatttatatgagccgaaatggaaaatggtcacagagaaaagagttgcagaggccctggccaaaaccacctggcaccctgctaatgaaataatacctttggagtttcttgggggaagtggctcctggaagaaacagattattatgtacagccttaagctctggctttgtgatcctaagatgataagtttgggggtaccaagggttctgctcttaccgagagagaaaaacaacttctttgcattcccctctctgtcccctgagagaaccagggctttgcaaacagatgtttctgtttttgtttttgagtcagggtctcgctctgttgcccaggctggagtgcagtggtgcaatcatagctcactgcagccttgaactcttgggctcaagcaatcctccccgctgtagcctcctgagtagctggaactaccggcacaccccactatactagctaattttttatttttatttttggtagagatggggtcttgctatattgcccaggctggtctccatctcctgggtaaggcatcctcctgccttagcctcccaaagcgctaggattataggcatgagacactgcacctggagtgcaaacagatgtttaaaatggagaaaccaagagcctgaagcaaagaggcaacaatcaataacctcctcactggtgtcctggctgccctactaacctgcccacttcagtggccctctgatcatatgaatccctacccactacctttcagtgttgtgggattcaggaggatgagagagagacctcgggttaaaacaggagaatcttttttttttttttttttgagatgcagtctcgctctgtcgcccaggctggagtgcaatggcgccatctcggctcactgcaagctctgcctcccaggttcacaccattgtcctgcttcagcctccctagtagctgggactacaggcgcccgccaccacacccggctaattttttgtatttttagtagagacagggtttcactgtgttagccaggatggtctcgatctctgacctcgtgatccacccgcctcagcctctgaaagtgctgggattacaggcgtaagccaccgtgcccggccttttttttttttttttttttttttttttttttttttttgagacggactcttgctctgttgcccaggctggagtgcagtggcgcgatctcggctcattacacatgtgcagtatttactgggttcacaccattctcctgcctcagcctcccgagtagctgggactacaggcgcccaccaccacacccggctaattttgtttttgtatttttagtagagacggggtttcaccgtgttagtcaggatggtctcaatctaaaacaggagaatcatttattgagtgcactcaggcccagctgactcaacgtccaaaagactgggcccggaagaaagacagcacttgacttctatacacacttcacaaaagggggtgggctagcttgaagcaagcttacagtggcatgaaagcagggatatagaggcaggacaaactcaggattgcacgtgaccgttgccaagcaacccagatgtccgttatctaggtttgcccaggcacagacttatcccataaccttcactatggcgcccaggtggccgtaactcaggccagctcagaggctcatgaccttcactccactgcttagataaaacaatacttgaagtcactggttacagagaataggaatctataaactcattccataaaacaaaggaaaatttgtttttcttctccctatgttgagggagtactgggagaatctccagagcacattagataatattatgaagaattttcctgggtctggcctgtgcctattgctgcctctgggacaagtcaccctcatacagaaaaacttatttctctttctttttaattttgcttttctttaatttcccacctcaacagagccactggtggccgcagaagacagtccacgtgtcttaaccagacttacaagactccaaaggtctggcttctccccacccctactccctgtcttgtctctcccacactcccccaacagcttctctggagccaagtcagccagcctccttccagcttcaggcctttgaacatgctgttctttccacctaaaaagctccctgcacttcccccagcctagttccctgcttgtatagattgttcctctaatgtgactcctggaaaagccttccttgcctctccggctagagcagagcccccattaacagctctcacaccagcctatctttctcctccactgcatttgtcacatcctgtgatcctgtgtgcatcctgttcaatgtctgtctccacacataaaatctaaactccaaaaggataggaactgtgtctgactcgcttcctttcatgtcccttgtgcctagatgggtgccttgtatcaagcaggtgctcaacaaatgtctgctgaaaaaatgatgcagggtgcggtggttcacgcaggtaatcccagcactttgggaggccgaggcgggtggatcacctgaggtcgggagttcaaggccagcctgaccaacatggagaaaccccatgtcaactaaaaatacaaaaaattagcccgatgtggtggtgcatgccggtaatcccacctactgaggaggctgagacaggaggattgcttgaacccaggaggcggaggttgtggtgagccaagatcatgccattgcactccagcctgggcaacaagaacgaaactctgtctcaaaaaaagaaaaaagagaaaaaaaggactaagtgactaaaagacagggtaggaactcaaggctcatcctctacatggccaaagcacttaggcaggaaaattaagtaagtaatagagcttctctggggcaggtgccaaaggaagtccatctctgtacctagcacctagctccgggcctggcccatagtaaacgctcagagaatattgctagctgaataagcattacttccatctacacgtactccgccctcagtggtgatctcatccagtcccattgctttaaatgtcacctataagctgatgactctccaaattatagctcaaggctggccctcttcccagaactcatatatccaactgcatatttgacatctccacttggaatatctaataggcatctcaaacttaacatggccaaagcagaacttcttgtttcctctgccagacttccccatctcaatctattcttctcattgttcagctcacaagtctggagtcatccttgactgcctctggttccctcctattctgcatccaattgctcagcaaatctgtcagctctaccttcagaatacatctggaatctggccatctctgccctatctctgctaccacctccttgtccaagccaccattccttcttacctggactgctgcaatagcctctaactgctcccacctctctcgctgctcccatcagcttccccaccttccatcctcatgcagtagccaggtcatcaagtcttggctcaaatggtgccttctcagagaggtcttcctagaaaactctttaaaacaagacccctcacccagcgatgcttggttctcttagtctacttttttaaatttttttgaggtggagtctctctctgtcacccagactggagtgcagtggcgcgatctcagctcactgcaacctctgcctcccaggttcaagcaattctcctgcctcagcctcccaagtagctgggactacaggtgcacgctgccacgcccagctaattttttgtattttagtagagacggggtttcaccgtgttgcccaggctggtcccgaactcctgagctcaggcaatctgcccgccttggcctcccaaagtgctaggattacaggcgtaagccaccgtgcctggcctattctactttatttttatccattgcccttatcagagataaatatttttgcttgtttttatctttattctcctgctataagttccataaaaaggaaactttgcctattttgttctcttgtgcatctccagcacctggaacagggcctgacacctagctctcgctcagaaatctccccagagtcataaatgaagggctaaatgaactctgaaagagttttggagagtcagattttctcccagtcaatgaatcaggatcttgatgccagaaatcagataccaactacctattttcttgtttggagccctagaataattaagagttaacacaagaccactttgcatataattaaagagtgacactgaggtcacctactgagtcacagaggccttgttagctcctagagcagactacagatcccgcctcttagtctacaccggagctagccgcttgatctgtaattgttgctctttccgttccttcatctgcaagtaggcctgcctgccttgtggcctttacatggagctgtgagcttgggatctgtgacattcaaattcagtccagattgtttagggtggtgcttttcaactgctggggagtgatttcaccctccagaagacattcggcaccatctgcagacatttttggttgttgaaactgggggtgtggtgtgattggcatctagtgggtagaggccaggggtgctgttaaacatcctcaaatgcataggacagctccccacaacaacaacaaaaaaaactttctggcccaaaaggtgaatagtgccaaggttgagaagtcctggtctacaggaacactaatgataagtggtagctagcatcactgatctttgccatgtgcccagtactgcaccacattctctatgtgtatcatctcacttaatcctcacattgtccctgagaaacaagaactcttataatccccattttacagatgaggaacctgaggctcagagaggtggactcacttgtttaatgtcacatggcttagtagggacagatgcacacccaaggctgcctggcctcaaagtctgttcctttaatgtctattctgtgttgctctgccctctgactgagagctgagggggcctgttagtcctctctggttgtgtcttcatctgctgcccctgtggacaggagagtgttggtctactcaggcggtgcttgactattagccagaagggaggttttctttccctgagttgtctcagcctttctggcctcactctccctgcactgcagtacagtccttggctccaaagctcagctccactgccagccccaggctggtgccagcccttctccatggggtggaagcttccggattcagacctaggccttgcaatctctcccacagggtgccttctttctggatggggtcttcaatcaactctgggacctgcaaggtcacctcacacttcctttcagataagggagggttagagctgctagggtggtcacaggactcatggttcaagaaagtactcaaggttccagaaagctagacaagtgattgctggactgggctgggaacagagtgatcctggggcagtagtgaggaacaggccacggtcctacttgtggatgaggtgaggagagctgcagaccccgtaaggaatccctcagcctgcctgtgagtaacaactctgaagggctttctgagggccctgggaaagtctgatgaccggagctgaaaggtgattctgtccaaggaagatcacgatggccaagaaccaatgtagggtcaagtttcaggtgtctgttgcggaggaatcaaggctgaagtactctgaactatccatcctttcttccatccatccaacacatatttagggagctcctgccaggggccgacgatgcttagtgtctccagcgacattactctgttcggaggcatcaactccttttgtttaggtgttgctcggaggttccatctaccatgtgggactgtagagtcagaccaggattcacatcccagctctgtcactttctgtcactgactttaggcaagagacttcatctctttgaacctcattttcttcatctgtataataaagagacgaacagttcttaccttgtagaattgttatgagaagccaatgagataatgtgtctaaatgtctggtacatggtaaggtctcaatatacagtggcaatagctactatttattataccgtggctaggtctctagatgcattatttaatataatccctgccaccaacctataacgaagatgtgatctccatttaaaaatcaggaacctacgaggtgggtggatcacctgaagtctggagttcgagaccagcctggccaacatggtgaaaccctgtctctactaaaatacaaagattagccaggtgtagtggcaaacgcctgtaatcccagctactcgggaggctgaggcaggagaatcgcttgaacccaggagggtgaagttgcagtgagctgagatcgcactactgcactccagcctgggtgacagagcaagagtccgtctcaaaaaaaataaataaataaaaataaaaaataacaatcaggaacctgtgccttggagaggttaactaacttgaaggagctcatagcttaggttgattccaaagcccgtgctctcagaaacattaacccctagttataatttcctgtggcaagaatgaaaaatgcaggttttcaggcttagaaggatttttaagcaagtttatcaggcaggagtagatatagtaagttgccaaaatgtgtgatgctacagaaccccatatgggccacttcagggggacctggtgaaggaatctcacatttattctaggagtctgggttattgtagaagagtttttttttttaatcctccttaggttctgaatccctttatgaatctgatggaagctaaggatcctctctttggaaaaatgcctgtaagcactacatacatttttgtgcataattccagagggcttggaaaacctttgcaatccggtcgtggaccccatttaagaaccctcctcgagggtagcattttccaagtgcaggacacatatcactcatagtgtctgagatcagtttaacaatgcaaaaacaaatgttttatattctaatatttatattttatagttaccttctatttatggccaatgagactggctttccatttatggtaatgatataaatttgtcttttaaaagcatacttattaggccgggtgcgatggctcacgcctgtaatcccaaaacttagggaggccaaggcaggcggatcacttgagctcaggagttcaagaccagcctggccaacatggcaagaccctgtctctacaaaaatagaaaaattagccgggcatggtggtgtgcacctgtatcccagctactcaggaggccaaggcagaagaatcacttgaacccagatcgcgccactgcactccagtctgggcgacagagtgagactccatctcaaaaaaataaaataaaataaaaagtatacttatttaaaaaataaagggagttcaaataaaattattatatagaatattatatacagtattattttttattttttatttatttattttttttgagagagtctcgctctgtctcccaggctggagtgcagtggtgcgatctcggctcactgcaagctcagcctctggggttcacgccgttctcctgcctcagcctcccaactagctgggactacaggcgctcaccaccacgcccggctaattttttttttttttgtatttttagtaaagatggggtttcaccatgttagccaggatggtcttgatctcctgacctcgtgatccgcctgcctcggcctcccaaagtgctgggattacaggcgtgagccaccacacccggccatataaggtattattaatgaacaattacattactatattatgatgatagtattattatagtaaaaattaaataaataataacaggggtagtgtagtgtagatatggaaaaaaatcatgaggatgatttaggaaatttccctggggtttctacttagtggagtcaccgtggctttactttagtgtcatttgcatttccagggtcctcacttgttgtcaacctatttcttcctcaagagaggtactatagtaatattataactcctcaaaccctgaatctcatcattagaaacatggaactggaaaaagctgttgatttaattgatatgcatatgttgaacctgaaaaggttctaattattgccatttttttccttttttttttttttgagacggagttgcccaggctggagtgcaatggcgcgatctcggctcactacagactctgtgtcccgggttcaagtgattctcctgcctcagcctcctgagtaggtgggattacaggcacgtgccaccatgcccagctaattttgtatttttagtagagatggggtttctccatgttgatcaggctggtctcaaactccttacctcaggtcatccacccgcctcggcctcccaaagtgctgggattataggcatgagccaccgcacccggcctattcccatctttttctttctggagttgtgtgcctctgctcaaattgttttatttttattttttgagatggggtttggccatattgcccaggctggtctccaactactgagctcaagcgatccccttgactcggcttctcaaagtgctgggattacaggtgtgagccatcatgcccagccacaaattgttttaaggagtaatgagagtagatggtcagaggaaaatgtagaaatgtaaataggaagcttccagatacatgattaacctgataacttatttatggaggttcgaaaaatacattataggcatttcagagctggttgttcaaaaccttgctgtggcctttgggatagttgtataaactgacaattattgataagattcattgatcatttactatgtgcctcacattgtgctgagagaacttcaaatgtttaatactgctaacaagcgtatgaactggtttccttttacatttagtcctcctttacttaaagaagacattcaaatagctagtaaatgacagtgctgggatttaaatccagatctgacttgtccctcaactcccccaagatcttgcttttttaaccacttcgtgtctcctccctaagccagaggggacgtcatctctctaacggccgctttttcgtccattagaatacctcctcctcagagataaatcccaaccaagaatctctcccacacaggaaagactgcctcacctgagcaagaagcttcaccctggacaaaaaccccggggctcaacactcccaaatccacccggatccccatccccaaccccttaaaggatgtccgcattgcttggcagagaccccactcttggggataatcccttaattcgtaaggaaacaccctccctccttgaagccctccctcaatcctgaggatgccctcccctaaatatttcagagcagaaccgactacaaatggggcccagtgcaaaatgaaaacgtaagggtccctcctgtgagactgcactgctggtttacccacgaagccggccctgcttcagagataccctttcagtaaagggagaggccacctctgtcgtaatcctgctaacctggggtgcgagatcatgcgacctgtcgtggtgggggggcgggggggtgggggcaggaatggccaccaacttctagagactgttgttcgagaacacaccctgggacaacctccgtgaatttggaatcacttcccttggccccggcagaagctcccttcctacctctccagacagctgggtggtcctcgtaacccggccggggctccaccttctgggtgtgtgggcctcgtagcgtgcggcccattgcccgggcaaccgacgccgtgagcggtgcattgtggtctgcaacaaaatgcaggagaaagatcctgagggaaccatggagtcaatggaccaatggaagaatgccgtgggctgcgtcaagccaatagggtcgcgcggcgaggggcggggccggcgggagcagggcggggcctgagcactaggcggcggcggctggcgtggggctgcttagatgcgccacggtttcggtagcgacggtatctctagccgggcctgagctgtgctagcacctcccccaggagaccgttgcagtcggccagcccccttctccacggtgagaaactcggggggccagggggtgtcctcgctgccttatttcgccccactccggacttagccctccgcgtagcccgcgcttcctgagaagtggggtggggggcgtcgtcccgtggtggcgccggccggggtgggggcagttagtgcctggggggcgcggcccaactcaaccccttaccccaggccttgcccactaggtaaccatgtgcgaccgaaaggccgtgatcaaaaatgcggacatgtcggaagagatgcaacaggactcggtggagtgcgctactcaggcgctggagaaatacaacatagagaaggacattgcggctcatatcaagaaggtgaggatgggcgcgggggccgatacgcagccgggagcagggggttccttccccccgatcctgctttcctaagggcgcctgacaggtcccgggaatactgctggcggcttggggcgtagaagcttccagaaaggacgcagatgcattttgcgctcctgtggagaagaccagacccccggcgtccgaagtttttttttttttttttttaattacccagctccgcggggggaaagcgccacctagcaacggtatctaagatcagggagcagcggttcccccttctgtgtggttcctgcgccgaggatccatctgggtgttccggaggggggagctgcgtgggtgtttccagccgggccgggaggagatcttgccagccttccagtggggagttgagggaaggtggtgggtggtggcggggctgggggctggggtaggggcttggtaaatggcagtctagaaagccggcaggactgccaacttctcgagcagtgtttgctggaagggaagaaagctggcagcctaagccgtgggagggttccagtcgagaatgggaagatgaaagacttcagatggaacagaaataaatgccttttttgacaaacgcagcagtgcgtgcctctagcttgcaagagcgttactccccttcatagctttaaaaggttttcgcactgcgtgcagttagagtagctaaatcttgtgtgacgctccacaaacacttgtaagaattttgcagagaaagataaccgttgccacccaatgccccccacaggcattctactccccagtacctcttagggtgggagaaatggtgaagagttgttcctacaacttgctaacctagtggacagggtagtagattagcatcatccggatagatgtgaagaggacggctgtttggataataattaaggataaaatttggccagttgacagattctgtttccagcagtttttacagcaacagtggagtgcttcagtattgtgttcctgtaaatttaattttgatccgcaatcatttggtatacaatgctgtttgaagttttgtcctattggaaaagtcttgtgttgcaggggtgcagttaagatctttgtgatgaggaatgggatgggctaattttttgccgttttcttggaattgggggcatggcaaatacagtagggtagtttagttctctacacagaacatgataaactacacctgttgatgtcaccgtctgtcaatgaatattatagaaggtatgaaggtgtaattaccataataacaaaacaccctgtctttagggctgacctttcgtcctttgacctcctcagcctccattcccatcttcgctcagactgcaagtatgtttgtattaatgtactatgtaggcggcttggagctggggaacattctttcattctaagaatttgcagatgctgacgttcctcctttctgcccctacaggctctggcttatccaagaggcaaacactgacctctggtaattaaaatcctagttcttttcttttgtcttttccaggaatttgacaagaagtacaatcccacctggcattgcatcgtggggaggaacttcggtagttatgtgacacatgaaaccaaacacttcatctacttctacctgggccaagtggccattcttctgttcaaatctggttaaaagcatggactgtgccacacacccagtgatccatccaaaaacaaggactgcagcctaaattccaaataccagagactgaaattttcagccttgctaagggaacatctcgatgtttgaacctttgttgtgttttgtacagggcattctctgtactagtttgtcgtggttataaaacaattagcagaatagcctacatttgtatttattttctattccatacttctgcccacgttgttttctctcaaaatccattcctttaaaaaataaatctgatgcagatgtgta

SEQ ID NO: 121 - DNA, 14740 bp, Homo sapiens
  source 1..14740: mol_type = other DNA
ttcctgaggtgggaggcggtacccgtggctgagaagaaggaggcctgagagcgacatgtccccggcggctcaggcggagcggcccgtggcgctgtttttctgagtccggggtggcctggcagccggccgaggacgagggtcggcgggggctgcccccgtggtggtggccgccatgctgggagcctgggcggttgagggaaccgctgtggcgctcctgcgactgctgctgctgctgctgccgccggcgatccggggacccgggctcggcgtggccggcgtggccggcgcggcgggggccgggctgcccgagagcgtcatttgggcggtcaacgcgggtggagaggcgcatgtggacgtgcacgggatccacttccgcaaggaccctttggaaggccgggtgggccgaggtgagagtccccctgccgagccgcgggatccagggcctgctgtgctgggcgcagccggccgggggctgcgggccccgagcccctttcgaccctggggccgcgtctctggagcgaagtttctctctgcagcttcttcgggggcccgctctgagctcagggcctggcactggctccaaggtacctagagtcatacaggcagagagttggccagaagttagttatatttggatttctcatcctgcattttctcaacccctcactcccatccaagctgggagagaaatgacgaaggcggccttttgctacctccaggcctcgcgggttgtaggtcatgggtgcccctgcttctcctgtcgagacagttcttgggagattctcgtcgacccaggaatcggccgctttccttgccccttctgcaggagcggggcttgattcttagccagaataggaaggaatcttcgaagagaatgggccaggaaagtttgattgtagcctcctcccccgccctcttttcgagcgaagaatatgtgtgcttaaaagtagaatcggcaggccgcccccagagggtggttctatcgaagccatcctgcacgtgaggctggtggctgtgtgtgaactgggtcaaccagtgtaagaatccgaatggtctatcagagaatgcttacaacctcccctaggtgatcctgagagttctaattccagcttagggggaaaatgattgtgacttaacttgctgggcaacagtggtttttaacggagctgctcccttcccaaagttagtgtgtgtcagaattgccagggcagctggttaaaaatgcagattcctagtccccactcgaaattgattatagtagattgagcttttttgctgggatccaggtttctgcaccaggggcttgtgatgtaggttgccccgagaccaccgttttggaagatcagctttataatctttgtttcttctgttggagggattggaaaacaggtttcagaaggaagttctttgctaggagattgatactgtatgctgggttcagaggctaccaaattggcagtatgccacctccagacaaccaggagacagactcactcttcactttctctcattctttttctgcgatgcccagatttggctcttgcttttactaaaatagttagttcttcccaagtcgattgcagtgtcctggagtttgttatattaaggagtttattgcctttcacacatgtgagggtcttgggacacagggctgttttgtgaagttctatgtttgtcttggagtttgttgagccctggcatgtagatcacagtagcctgggttcagctgactcagggctccagtctttagcagcggtaacagcagccaaagccagactttatagcaggaggtcattactatctctatcctggacccttcctctttcttcacgagtgtgggcagggaggaaagagcccttgaggaaactagacagtttgtggactttgcctcttgagatagcggtggtgagggtgctgagcggatggtttctttcacttagcagataccaggccttacattggttacatcgtcctattcagtctgttgtgcagagaataaagccgagtaagaccacacaggtttagttcccagatactgcccttattcagaaattctggttttaatttgctgatgcaggtggtgtgtgtgtgtgtgtgtgtgtgtgtgtgtttctttggcttggtcagcagtcagccaagatctgtgtccttgggttattggctcatggttgcagttccttggaaggagtttattgtagcaggtaaaattacatgagacctaccaaagcttgtgtgtactggagtcctatttcggacactggcccttggggcattgtataaatgaaggttccctgctaaggttcccctctccattctaccaatctgggtaagaattggagcagtattaaggcatggatggggagtgggaggtggcgcttgtcagctgcagtttggaccagcttgttgcaacattgcgcttaccaggttcctgagaaaggcattttgctggctttaggtcgggctgagatgcgcataagcttgcactctcaggaggcagctctctactaaggagtcagtcctaccaagggaagtccagctgttcacactgcctttcttctgggcctgtttggataagggtgtgccaggtatttgaagacccttgcctcgtgcagctatttacactgattgcagtaggaactgtatgccttatttcttttcccgcctgcctgtgatattgtttccagcatgctgagaaaagttgattttatgttgaatgaattcaggtatttgttaccaagttagtccagataagggtttggccttcttttgaacttgctgtttctgtgtagtttctttgtagttcaacattcttgtaattgtgagtggcccagggcacctagtggtttatgctttcaaaagcagttcagaatatttattgaatttcatttctgccttgaggatagctagtgcttacagcctgggaaaggctttttcagcctgtgtgcttccacagatgggagcaccactacagaaagtggtttagaagcgttcaccttggggttttggtatgaggcacattccagggtttttatttatttattgaaaatttttaattttttttttattgtagacacaggggtctcactatgttgcccaggctggtcttgaacttctgtcctcaagtgatcttcccaccttggcctcccaaactgctgggattacaggcatgaaccatcacgcctgaccatgttccagatttgtaacttggtcattttgagttcctcttcactctgactaggaaaagacctggttatttgacctgagggcacagaattttgcttgagtttagggaaggctatttcctcttcagagaaagatacctgctaaagtcgcaggtcctcgagaaacttgctttacgtctctgagccttgttttccttttcaaaaaatctctcatgctttagaaatttctgataagactgtaaactctcctgtccagagtagcttgaagtgtctctgtcactttttttttccttgatgaccttttacatggaattaaaaatagggcagaacatagctccagaggggaaaaaagttggttggggaccagagcctatcaggttgctaatgctgtaaccttaaggaataccctttcctgggctgccttcctttcacctggggaaggatttggctttggggaggtaagagcttgaaacatgggatgagagaggagtcactgctacctctgatttgctcaaagccatggcagttgtttagaattctctacctctactgtcacctaacaggcaggcttcatctgcaggccttccaaatagtggaagttcacaggtagaaaatttaggtccctgaatccgtgggttcgctgtctcagcccattcagaacaattctttaggtactggcctcactggagaaagaagtgatccagaagaacagtctagtgaccaggagatctgagggtagggtgggagtgacgctagagcaccaaggggggctttacagctgtgttctcatggaggacaggcttctgctcattctggctttcccactcttgtggttcccagttgcagttttccagttagttttattacttccttttcttttgatccattccctaaactgccttgagtggaggcatttgtttagtgcttatcgtgtgcatatccttgcctggctagcatacccatgtttctgtgtctctctccgtgtgaggcattgtattgagctatttatacagattgttttatccttaccacaatgctgtgggataggtggtgtccccattttataggtgagaaaacagacctagagaaaacaacttgttcagtgacacttcgtgtatgtcttttcctgaaccctgtgctgaattttccaaggagcctagttactacattgtctaaaactaagaaagagcagacataatgtaggcccttcggcccccttcctttttggttaactgagttatgccaatttcagcagtatgctgactgtacacttcattgtattttagagaaatctgtttcgctgtgaatgcataaaggctaaggagggaggaacaacccttgtttgctgctgcatctcttgggacttgggcaaattcaactttgcacgtggcagatctcttgggaaagccacttgggttttaaagggaaatattttaaaggtaattccaaggttgttaagtaatttttgttcacatggttgagttttcttcactgtgggactgagactgccgcagattacgttactgtcagttcctcactttttccacttggcaagaaaaaaaaaaagattcggcctggtgtggtggctcacgcctataatcctagcactttgggaggccgatgcgggcagatcacctgaggttggagttggagaccagcttggctaacatagtgaaagcccgtttctactaaaaatacaaaaaattagccgggcgtggtgatgcgtgcctgtaatcccagctacttgggaggctgaggcaggagaatcgcttgaccctgggaggtggaggttgcagtgagctgagattgcgccattgcactccagcttgggcaacaagagcgaaactccgtctccaaaaaacaaaaacaaaaacaaaaaaacaattccccacccatgcacaaaattttctgtgtatccgtaaatcaaatgtagtcgatgttccagatttgtaatgatcacagtcctcatggaagaaggaaattcttagagctcagttggaagagaaacagcagtctttcagtcttcataggtttgtatcccggggcaatggttttttgaggctggaaaggagggggagcatgttagcagtacatcctttgtatgcattgctcagctactctttgatttcttgaggagaaatagaaagaaaaaagtctgaagacaaaagtgcaatgagtttcctcttccattgtctcatcagtccctctgatctcgtggctaatgtcacttacaggaactgttaacagttatgtttatttttttgaggtcttgacctcaaccactgggtctttttgttaatcttttaccttttgccatgtcttctcccttgttgatgattcagaagataaagctctggggatgacagcccctggccttctcccaaaggatctagttgccagatgtcttcagggtcaccacgtgagattggaaggcagtcttgaaatcttaatttcatgcgggaggagagactacatgacggctacatctgtagttggaacagtatatttatggagcactggaaagccttactgtgtttataggataaaggagtcaggctactctctggaggaagcagaactatttacctctgagactgaaatgtgatatcttatatttgcacaaaaaagattcggcctggcgcggtggctcacgcctgtaatcctagcactttgggaggccgatgcgggtggatcacctgcggtcaggagtttagtgtgttgtgcgagaggaagaaaaaaacatatatacaactgtcttacaccaaggttgggagagggccagggccaagagaggttttctgctcttctgatactgacccgaggtaagtaactttttacttttatcctctctcattccttgtcagtttgtgaaatgtgaaaggtgattcccctaggacttggacatcttaggcagattgccttgccctgcaggatgctccagccttgtggacagagtggcatggcttcactgctttgcaggcacctccttcattgtcatttattcattcagcaaactgtatgagtggcgactatgtgccaggtcccgtgctaggcactggaggtgcagtggtgactttttttttctgctgttggtttatctgagtgaatgttcaagtaagtaggtgaggtggagttttgtgagtctgtgggaaggaaggaaattagcatcacacctttcttttatgagcctgtttttgtttacagctttggaactttttgaatgaaaattataaaaaaaacacacaacaactaaagctggaattttattcgtaaggacaatgaagaatgactttccaaagcagatatcctgtttgttttagactctgggcttttctgaatgagagaaaacattctttgaacttcatcttgtatggagttcctggccatcccccttgttttaggaggtttctctgaagccctccctcttggggaaccaggcagctgcaacacagcactttcttctggtaatgagttagacttgttctccgtacagtcagggggaaaaagtcattttaatgtgcttttagaaagttccgctctgaggtttacaggggctgttggcctgattagtgtttagtttctttcattttactcttccatagtaatggctgtatgattcctgcctttgttggagctctgtttggagccaggtgcagagtgggtggccccttttatggagagggttattagcattgccctggaaatgcctctggctgttctggggtctttgcttttcttttgtgtcttgcctctgatgtgctttctctttgtcttttgtcctcagcctcagactatggcatgaaactgccaatcctgcgttccaaccctgaggaccagatcctgtatcaaactgagcggtacaatgaggagacctttggctacgaagtgcccatcaaagaggagggggactacgtgctggtcttgaaatttgcagaggtctactttgcacagtcccagcaaaaggtgaggcctagtcaggctgctgcttgaccagtaggacattgctgctcttggacaatccacgattatggggctagagagtgtgagagtctctccagaaaggcagaacagatgagctctagagaagcatgttccatagtgcacaaggctgcacttgccttgggggtgagtgacagaaagcaatgccagaatccttgttttgccaactaactgatcctgttaaggccctcctggctacttccctccatggtttgccgcaccttcttgtttttagccttatttttcctctgtcccttcctgtgaatttccttcttcctatgctaagctttttgtttgtattctttgttccttaaagccaatataagaactcctgggcagtgaaggaacacggctttgatttgacccgggttaaggatgctaaccaccctggatatccagacccatcatttcttaaattatttttgaacttcaagcccaaacacgtgcatgatgtccaactgcttgaaaggatgtaaagctgatggttttgacattgttttcttttcttatcctggaaggtatttgatgtacgattgaatggccacgtcgtggtgaaggacttggatatctttgatcgtgttgggcatagcacagctcacgatgaaattatacctatgagcatcagaaaggggaagctgagtgtccagggggaggtgtccaccttcacagggaaactctacattgagtttgtcaaggtaattcccctattctgcccattgctgaagagagtgggtacaggggaagttgtttgctgctgtgtggggttgaccactgtttcccttttcctaggggtactatgacaatcccaaggtctgtgcactctacatcatggctgggacagtggatggtaggttgtgttctgacctgcttttttgacttgagtggagggatatggttgaggaagcccttgggaggtaattgagctgatgactattttggaaacacttaaagctaaattgtaggggattcagaatcagttggataaggatgaagcataacatggtactagccacaagctttggagtcaggtctatgtatatcttgttgctgccatttaatcagatgtttgtcttggatggatgcttttaatttccctataaattgggattaataatggtacctattggtgtaccctgacctttgtagtcatttgggatcacctaaaacttgtccttattctgtttgtttgacatctctttcctaggggaaaaaaaggtaaaaggaggagtcctgtaggcttttggtatgctctgaaagattccagcattgctggactgcactgggacaaaacttcacttatttatgtctccttatccttgggatcaagtcttagagtatatttctttctcagggtttagattctcctggctgccagcatctcaggctgatttttgcagagaaagctgcgtctttgtgacatttctcccccattccacctctgtacctttccccaactcaatcttgaatgcactgaggatttcatcctgttgtcttgatgtcccccaaatgctgatattatgacatctaggaggatgaatgtcttaccaccaaacagacctgtgttcaagtccctgaggaggaggcaggacagagggatagtgtgtgctgggaacccagaactctctgggtcaacgtttcttcagttgttgtgtgaatcaaaagggaatgtgggcttgtgggaggaggagggatttgaaaaggctaaagtttaggcattggatcattgtccctgtccagtctggttatcttggggctctgtaaaagtagaacaggaaggtaagatagtgaacctccctatgagcacggctttttctactttctagttaaatctaaagcttttgcagcactctgctgttctgtagaccagaggctatttctgctacttctggtcttttctctggacccgggttcaatcacagcaatctctttattgtggcttatttgctgcttttaagggtctctcttacttaaatgctgtgggtcttaacagtgttttcttccttgtgttagatgtaccaaagcttcagcctcatccgggattggagaagaaagaagaggaagaagaagaagaagaatatgatgaagggtctaatctcaaaaaacagaccaataagaaccgggtgcagtcaggcccccgcacacccaacccctatgcctcggacaacagcagcctcatgtttcccatcctggtggccttcggagtcttcattccaaccctcttctgcctctgccggttgtgagaacaaatgactatcctgaacagggtggaggggtgtgggaaagaaaccagccatattggttttggtttctgtatttttcacaatgattaatgaacaaaaacaaagagaaaaaaacacacatcaattaaaggagacaaaaagaggcagagcgagtagagagcagccctcattcaccacctggtcccagacgtgcttcagtcctcgtcctctctttgtggctggctcccagccttctctttcctcttgaggatacttagggtaaactggatccttcctgctcaaggatcctcatttgtatacctagtggaaaggactctgaactcagaggagtcactgttcctttttttaggttagaaattaacagcagggaaatgccatcttattacctgagacgaccagcactgggagttaggtacggtctgaagttatgtctagataagacttcagacgtcctgggattgaaagaatgtgtgtgaaggggtagaatttgtgcggtaaagacttaaaaaaaaaagtagggagattaaaaaaaaagaaagaaaatgcttccttatctggaagcctttctggattaatccagtgatggtcccacctttagtgtttgagctttgtcattgcttgtctccctggcatgtgccagttatagactgtccagcatccaagacgtttcggttatgtcgggtcctcagatcgcctctgacttgttaccacaacaaatcattttgatttcagtgcctgttggggacttgatttcttctcagttttgtttgtttgtttgtttccttaatctggctcatttgaaatttcttctccctctcaaccatcccactaagttatagccaagaagggaaggagacacggggatttggggttctctgcttgaatgtcttctcctttaccacctcaccttgttggtacctccctccctggatctctgagccagcagccaggaggacctgacccagcagttctttactggcccctttgtagggccttgctgccagggggcagggatgctttccagcctgcagcaacagaacacttgaccttaaaagtctcttctggtctttggattagaaaaggcttatgttagcatagcttaagagcaacctcagagatttgagccctactaagtgactgaccactgtttagagtgtctggtatctgatgttcatttattcccatgttcttgtgtgtcacagttcagccagttttggtttatgcctagagctacttcaaggaactagactaattagctatataggcccagcgatgcttcttattgatcttaatagtatgcccctccttcccctgtcctttcatttctctatccaagtagcagtcaggttcttggtgtgatgggactgaaagaattccagtcagccagagccttggcagctctgaagctaaccttagcatctaagtgtcgatcttgaattccctgaaaaaatttctataggaaatgaagcttccctggtcccctcctttctggccattgtcatccatttcccagttagggcaacaatgaaggaggacccagccaagctagaaggaattttgtggatgggagacagcaggattagcttcagcttgggctggagcagtcaatataggatctcaggccaggcccgcttttctagaatgtgtttaattttgagtttgctttattagatatgttttttaagagctctgtatatttgaactgctccttatgtgacaaaataggtagctcttgggctcatgtcctgggttttggctctttaatgattactccaggccagcatttagtcgtttgagaattgtagcctgttgttttcgctgtgacttgggtctcagtgctagggtattgagtcaggcagctggagggttgtggcccgaggctgcagtcagaggtatacttcccatagtgcttcacacagctcccctgcttctaaaggataaggtactgtagccttggtcctggggaccacctgcctggggcagtggacatcctaactaaacaggcttctggcagtagctttggttcctatcccatcgaaattccccaaagccctgggccactgccattgggttagtcaagatgaaggaggaggactggctgcctccattttgccttgtttgttagtttgcctgggtctgtctgaggaaggagggggtcccgccttccacctcaacacatcccttcagtgactcagagtctcagaaggaaaccctgactcctggggccatttcctaatggtactgtaagccaagcagctttgcttctgcctctgtttccaagcccacccttttcccctgagctcagggttagggatgggcgctttcctctctggttgtgaacgaaaggaaggaacatctttctatggctaacaaaaactaaaggggaagtgaggaaacaggaagaagtatggtgggggctggggtagactcccctggagccaagcctatccagctaacaagagctccctggggctggtcacagctggctcatgatgctgaacttgaaagtttttttgtttttgtttttgttttgtggctcctccaagatataggtacatgaagtttaggttaaaggggtgggattctttatttttatttttgtattgtatgtgtcaagaattactctgttgttcaccttttgctttttgcactgtttgttctcttatctgtattttgagcttagtgctaggactgagaggctgcaccatagggaatgtatgggagatggtgaggggtgccagtgaggggtgcgtggaggagaggcctgggctcctctactggatctacactctgtcccaggtttttagatcccactgagcccagctgactgaaaacaaggacagtcagggtgaaacttcttttgccagaagtgtggcctgagttgaatttctgggaggatgacgcagatgtctgctgcagagctgggctgagagttctgcagtctagctctgacttaggtcaggggcctgttggtctctcattggacgtttttgggtctcactcatgcttactgaaacattgtgccaagaaactctgtgggatttgtgtcccttaaaccagactcacttttctgaaaaatctccattgttgaggagaggctgctcaatcgacaccccgagttctcatgactgggaagatagttttcttcaggtgtcaatggcgttagactcccaggaagactagccctgcccacagggccacctgttggtttgagagcgtgttcgtgttctcttgccctccctgcctaagagctactgggatcacgttagcgggcatttaggctttgatgagagggcacagtttgagttaggtttacctccccctttctgtgcctgggaactgtttggtccagctttagaactgtggttttgacttccttatctcttgggagaagcttctgttttaaggaatttctcttccttcttctcctgcctctagcctctcctggaaaggcctggatatggtttctaaaatctcagctgagaacttcagaaaacagcagcagtattttccttttcctagtgctaaaatccctttccctagaaattggctcaccttgggaaacccagggaaagaatcagcaggttctctgccctccctaggggttggggaaggacccaccccggtcagcacagtgccttttcctctcctgctctgagccagggtggggcattccctctagattcaggtttgggcaggggtcctatagtccctgccatggggctgcttccctgtcccttccctcccctttgctggcctactctggcataattcaagtgtcttcttgccttggggatccttagtggcatcaaatggcaacatggaatattgtcctccatgcccctccagaaggacctaggagagtaggtgagctttccaaagtgagagacgaatctttctttctttttttttttaaagggcaggatgggtatgctttgggctttctccttctgtggccccggaggaaggagagactgaggcaaggcaaagtgatagtacacggaagcagaaccggaaacacccaggaactgttcagaaatctcagaagaaatctgcttctcttcgatggaaagatataattaacgatcaaagagctctaagaaaattgcaaagaagccttaatgttcaagctttagaaagatcagagcaatttttctctttcagtccaaactaagactctctgtatttaaatctctctggggcaagagggctagatttcctcattttgttatgagactagattggtaccagtagatcagctgcctagcgagggcaggtttcttctttgcatctgtgtggcttgcttccagtctggcctgtcctttccagctgccttttgtctagcctgctatggggggccagattatcttgataagagcaggtgatttggggactagctgggttggcaggaaaagagcaggatggatctcttgggacaggttcccccaggagtataaacacaaggagccaggattgtgctggcagccaaggaaacagtagtgcctgtttgagttggcagagagggccttggcacctcttgcatccaggcagtcttgtgagatgggggcacatagcactggggaaagcagaactccattctcacctctattttgagcttcagtgctttatttcagtatgaggaaaaacaacaacaaactgaagtgcgctttccgtcctttcaaaggacaactgtcgggaagggagagccgagttgcgaggtaggaggggagcactggcagggagagacattcttgactcctctcttccctggtgtgttgtgatccagggaatgaaaagaaatttgaccctggattggttctctccttggacttaaggaatcttaccttttccttccacaaagttctcccaggcaaggaccagctgcccattctgagcccagggcagcctcttcaaccattattggtctaacctggcttgtcaggaaaccaagcccacccttccacattgggcctggctgctctattctgtaccaagtactggagaaaaagcatcaagttcttagcccttgtagcttctaccctagtttcccatcctctctctgtggaggccaaaccaactctttgccagcagccacaacatgcattgacagcggcacagtgagatataactgatgggctttgaacctggttggccggggaagctgtaggggtggatagagctggctttccttctgggctgtctccatctgaccctaccccttccatgtcccaccccactcccaccaaaaagtacaaaatcaggatgtttttcactgtccattgctttgtgttttaataaacaatttgcagtgacactctg

SEQ ID NO: 122 - DNA, 32742 bp, Homo sapiens
  source 1..32742: mol_type = other DNA
gcatggaacctaaagactagaggcggttgtgtgagtcaggaagaggggccagatatctgagtgttcctctttagtttcttcaattgcaggtgaggacggggagctgcgctgtgtagggaactgggggtgggttcaggacgaagtagctgcagcctctgctcagttcctgttgttttccccttgacgctggcaggagagaggttggagtcggtttttgctggcggcgatgtccagcggagagcgtttaagtatggaggcctaactgacaagtgtttcatcttgctcattctctcgtattcgcgaatctgttctgcattccgccgccagagtgatctcaaaattataaaatcagaccactcgtttgctgagttccccttctaccccttgtactgagaataaaattcaatcttgaggtcgaggttttattggactccactgctctctccctcactgtcttctgcttttgctttgacccggcagcagcatcaaacgcttcctacccagcctccgagtctttgcactctgttccctctgcctacgtcgcgttccgcctaagttttgcgtacttcttgttattcaggtctcagctcagatgtcacctccttcccttcccaaacaaatccttcttcagcgacgcctcaccttatccatttaatcactgtttccttcaaatcatttagcactttttgtaattatttgtgcagttgcttttttgtggaggtagcataacaagatacgtattaacaattttatttttgtccgtttttcccgcaaaaacataaacttcataatggcaaagacattttgtgttctgttcaagctatattcccagttcctagaaaggtgtctggcacatagtaaataggtattcaataaacatttgttgaataagtaaatatggcagttacgggcggtttctctatttcacagatgtgggaaattgagacccataaaggtattcattccaacctgtccctccttcttcatctcctcactcccacccaaacaccagccactgaaacttctctattctccaaacatgttttgtttctgttcccttgcttatgctcttaggaagaactctttaaacatttataaaactatgatcttcaattctcagcccaataacaaattagctaacacctaaaattgaatgtttgccatcaaccaagcattgttctgtgaacatttaaaactcaaaacatttggaggctgaagcagaaggattgcttgagcccaggagatcaaggccagccagggcaaaatagtgagaccctcgtctctcaaaaaaccagaagtgaaaaatagaaaactccttcaggtgggtacaactaaattagtcccttggtattggtatccatgggagattggttccaggacctcccacagataccaaaaccctaggatgcttaagtccctgtcattaaatggcatagtatttgcatgtagcctaggaacatctgcctgtatactttaaatcatctcttgatttcttatcttgcgtaacagtgtaaatgtgctatgcctgtaggtgcaatctagggatgtggaacacatggatattgacggcaaactgtatatatatattttttttccaagacggagtttcactcttgttgcccaagctggagtgcaagtggcacgatctcgacttactgcaacctccgcctcccgggttcaagcaattctacagcctcagcctcctgagtagctgggattacaggcgcacaccaccacgcccggctaattttttgtgtttttagtagagagggggtttcgtcatgttggccaggctggtctcaaactcctgacctcagataatccacctgcctaagcctcccaaagttctgggattacaggtgtgagccaccgcgccggcctggtctgtatattcctattttataaattagagaattgaggaacagaaagattaagtgatcacccaaggacagctgcctagtcattgtgaaagagcaccaagtcagaaattgtttctaccttgtgctataccttttatagatattgaaacatacttctagtagcacttatgaaaccaattgtaattatttgattatcattccctaccagtcttgatccaaggattgtttttatccttagtgttcttttcccacccagactccaggtaatatggtttatgtaaacctttgctttttgagatgggtaaacctcataaggtttcaagcttagtctttgatccagaaacctaattcatttttttctcctccccttatcatttttatttgttgtataataatactatgatagcatcaatggactttttctgaacttcatctggaatcttatcatcctatgatatccctgacaatctggcatctaaacctacactgtttgctgctattaaaggtttatttctaatgaaaggtttatttctaatgaaaacttggtataattaaaggtttatttctaatgaaaacttggtataattccaaactagacacacaaagtaatggaagctctaagatacattggtaagatcagaattgttggtttgtgtgcataaaccaatatgttgttctctggtaaccatcatagctctagttccatttatgttattggcccgaagtgtttagtggccacagcaataacaagaagactaagatgtctgtatatgttaatgttagacttttgtttttgttttgtgagtaagctttatcatttcccaaggaaccaggttctatgcaacaagataatatggtgtctaattttatgttgttcaggaaagacagtggttcctgactcaggaagacagtctcagaaacatgtggaatgatattgagctgctaacaaatgatgataccggaagtgggtacctgagtgtcggttcaagaaaagaacatggaactgctttatatcaagtagatttgctagtgaagatctcttctgaaaaggtagtgattattacactgactgtttcattcacagaatttttactgagtgcttagtagggctagtggcccacagtaaatattttgtgaatgaacatagcacttcctcagggaatcaagattcaatctcagattgctagaaattcacgtctgaataccctctgcatcatgtcaggatcagtattttcacaactgaaggattcttagttcctcttgatatttcatgcatacaaaaatatgtgtaagttgatacaaaggatatcttttttttttttttttgagacagattcttactctgtcacccaggctggagtgcagtggtgtgatcacggctcactgcaatctctgactcccagattcaagtgattctcgtgcctcagcctcccaagtagctgagattacagttgtgtgccaccatgctcagctaattttttgtatttttgtaaagatggggtttctccatgttggccaggctggtcttgaactcctggcctcaagaaatccacccacctcagcctcccaaagtgctgggattacaggtgtgagccatcactcccggcatacaaagaatatctacgactgacttaggaaataaaatgttacaaatagagttgaaggctctgagggtccatccctgaatctgtgttcctcctgtttcctaccagagtcaagcaccctgctgagtatgaggtttatccgtgcatttctttctacattttaactttcttctgtcagtaattgcaccattcttgcttcatgcctgaaaccttattctttgcattctatagaaggtactattagctgggtgtggtggcatgcacatgtagtcccagctacttgggaggctggtatttaattcttttttttttttaataaaagaaattttttttcactcaaatggaatctgacagataaggcagggcatccactgtggacgttattcctaaagggaattaaatgtatgcttttgacttttttttttaaactggctgatgggattttaaaaagaaatcattctttatgcagctttaagctggtgtctgtggaactgtgctgctttttcttgctgtggtgctatctcggctcggctcactgcaacctctgcctcctgggttcaaaaaattctcctgtctcaatttcccaagtagctgggattacaggtgtgtgccaccatgctactaaaaattttcgtatttttagtagagatggggttgcccaggctggtcttgaactcctggcctcaagtgatccgcctgccttggcctcccaaagtgctgggattaaaggcatgagtcactgtgcctgatttgtaccgctttaaatgtaccatgaatcatgttaaaggcagtataatccaacaataagataattagtataagataaacattaattatgagtagtacaaatctcattgtattttttgtcattatttattagaggcaaaaatttcaagtgcagcatttcttttttttaaattttttgaatccttcgagacatctgaaagcacagtttctataatgaggaaatgacgtctattttttagtatttttgttcgtttgtttgagatggagtcttgctctgtcgcccaggctggagtacagtggcatgatctcagctcactgcaagctctgcctcccaggttcacgccattctcctgcctcagcctctcaagtagctgggactacaggcgcccgccactatgcccagctaattttttgtatttttagtagagacggggtttcaccatgttagccaggatggtctcgatctcctgacctcgtgatccgcccggctcggcctcccaaagtgctgggattacaggcttgagccaccgcacccggccatttgttttttttttttttaagagagactctcactctgtagcccaggctggagtacagtgatgtgatattgactcattacaacctcccactcctggattcaagtgattctcctgcctcagcctctggagtagctgggattataggcgcctgccaccacgcctggctaatttttctttttttttttttttttttttgagacgaactcttgctctgtcaccaggctggagtgcagtggcgtgatcttggctcattgcaacctccgcctcctgggttcaagcgattcttctgcctcaccctcccgagtaactgggaatacagacacgagccaccacacccagctaatttttgtgtttttagtagagatgaggcttcaccatgttgagcaggatggtctcgatctcttgaccttgtgatccacccacctcggcctcccaaagttctgggattacaggtgtgaatcactgtgcccgggctttattttttaatattatcaggagccttaaaacgtggaagtggctcaggcctttcttgacctcaaggttgctgttgaaaaataatagtgcatgtgtatagaatcttggattctggtaggaactaaaattctatctattattagcacgtggcatacacttaccaacatgttttgaacatctgctatgttctgagcccaatattaggaacttggacataagatggcatcttattcattccttttaggatcttaccttaaagttaggcacacaggacacaaacaataaaagatgcttagctgtgcaagtcagtatatgctaaatgccaaatgaacagtacagacagtaaatgagtaggaattcagtggctggagagctcattgtcggttgggcagtttaaggagcatttccttaagaaactatgtgtgagcccggtgtggtggcatgtcctgtagtcccagctactcaggctgaggcaggagaatggcgtgagcccaggagtttgaggccagcctgggcaacatagggagacaacatctctaaaaaaaataaaaattaaaataaactacacttgctttgggccttaagaaggagaacagtctagagagaagagtctagagagaacagtgtggacagatccctagaagatatagtgccgttccttttcttttttttttttttgaggcagagtcttgctctgttgcccaggctggagtgcagtggtgtgatcttggctcactgcaacctctgcctctcgggttcaagtgattctcgtgcctcagcctccccagtagctgggattacatgcgtccgccaccacgcccggctaattttagtgccattccttgttggcagtgccttcatgtaaccttttactagttgaagaagcaagtaaaaagataagaaggaggctgggcgcagtgcctcacatttgtattcccggcactttgggtggttgggatggaaggatcgtttgagtccaggagttctagaccagcctggccaacacagtgaaaaccccgtctctataaaagaaaaagaaaattagccaggtgtgatggtgtgcatgtgtagtcccagctacttgggttggggaggcacgaagatcccttgagcccaggtgtttaaggctgcagtgagttatgatggcatcactgcattccaacctgagcgacagagggagaccctgtctcaaaataaagaaaaaaataaggtagaagagggatcagaatgttggggaattttcaaggattacacctggagaagatgacttttgaaatagtcataaaatgaggtgattagctgtattttgtcagggaagaataggactggttaacatttattgagcatatactatgtgcagggctctctcataagccctttacgtgaattcgtttaatctttattcaggtgaaccttgtaggtattattattgttactcttttacatggagttagttgatgcatttgcctaagatcacttagctagtaagggactgagcttcctcaaccactaatctgtcccagtgcttcaagacagctatgtgtgggaggctcttggcaacagaaactgaatactggagactctgatttggcttgtctactgtttttaaaaatgttggcttagctgccaatatttaaaaatcagaacatttcacataaagatccagcttctgttgatgaattgggaggtatggccatgccagtgctgcatccccaccaggcttcccactggctggtgtgaagtagactctattctttcatgtctgtgggggcatggaccctccagttcacagttcaccaccgttcccctgcctagcgtatccacgacaccaagactttattccaatcttgattaattcattatgttaatacctggctcctgcagcataaagtcaatcctgaggaaacaaggacttgaacatgagaatcctttgcccttcctgctcatcctgaactgtttttctacttaggatcctggatggattcaagatataccatacaaagaaaaactcgatgattaattagatagaggggctaaagaaaaaaagcctgtcaagttttaaagtgggatatttgggaatttgatgatactattgataagtattattaaacacatataaaaatgtttgaattttcatcatgcttttctctcccacaggcctcattaaatccaaagatacaggcatgcagcttaagtgatgggtttattattgtagccgaccaatcagtgatattgcttgacagtatttgtagatcacttcaattgcatcttgtctttggtaagtataatgtagtgaatgaagtaagataaattggaagtcaaatacatctgctgccaatttctgctggattgcctcctctttactccattatttctaagatttcaaattagaccaatttcaagtaattaagcttgagtgcttagtgccttatttgcgttgggcactagagtcaaaggacactgagatgatcccttctctcaatacatctgaggggaaatacacatgtaaagcaacaacttagtttacttgcttgtattagaatactatggaaaacatgagctcatttgtgttcaaattcctgaatcttgtacagaatttcggtatcattaatgggtatttgcatatttttagaattaatagctctctaaaaatcctttaacatacttatgaattaattcttcatcgagctacaaggcttcaagtacatgcaaatgtggatttgagagtgaattaaagctgggcgtggtggctcatgcctgcaatcccagcactttgggaggctgaggccaccagatcacttgcggtcaggagttcaagaccagcctggccaacatggtgaaaccccatttctactaaaaatacaaaaatcacacctgtaatccttgtactttggaaggcccaggtgggtggattgcctgagctcaggggtttgagaccagcctgggcaacatggtgaaatcccgttttctctactaatatacaaaaattagctggccgtgctggtgtgcgcctatagttccagctactcgggaggctgaggtaggagaattgcttgaacctgggaggtggaggttgcagtgagccaagatcactccactacactccagcctgggtgacagagcaaaactctgtctccaaaaacaacaacaacaacaaaaattagctgggcatggtggcatacacctgtaatcccagctactcaggagtctgaggcaggagaatcgcttgatcccaggaggcagaggttgcagtgagccaagattatgccactatactctagcctgagtgacagagtgacagtcgtgtctcaaaaacaaaaaaaagagtgaattaaggggtaagtcagtgattgtactgagcttaggcaagaatattatgaaagttttttttttttttttttgagatggagtctctctcgctctgtcacccaggctgtagtgcagtggcacaatctcggctcactgcaagctctgcctcccgggttcacaccattctcctgcctcagcctcctgaatagctgggactacaggcgcccaccaccatgcctgggcaattttttgtatttttttttttttttagtagagacagcatttcaccatgttagccaggatggtctcgatctcctgaccttgtgatctgcctgcctcggcctcccaaagtgctgggattataggcatgagccacgacacccgaccccgaaagttttttctttcttgagtagaaattttttttttttttgagatgtagtctcgcactgtcgcctaggccggagtgtggtggcatgatgtcagctcactgcaacctccgcctccagggtccaagcaattctcctgcctcagcctcccaagtatctgggactacaggcacccatcaccacgccctgctaatctttttttgtatttttagaagaaacagggtttcactatgttggccaggctggtctcaacctcatgatctgcccgcctcggcctcctgaagtgttgggattacagacgtgagccaccgtgccaggccttttttttttttttccctgagacagtctcgctctgtggcccaggctggagtgcagtggtgctctctcagctcactgcaacctccacctcccaggttcaagagattcttctgcctcagcctcccaagtagctgggagtacaggcgcctgccaccatgcctggtaatttttgtatttttagtagggtcaggtttcaccatgttggccaggctgctctcaaattcctgacctcaaatgatccacccaccttggcctcccaaagtgctgggattacaggcgtgagccactgcacccggccattaaatagaaattttaagagaaagatagttgttgaaacttttacataagaacttagacaactgaaaaggaaacagaacacatgcattttggaacatatcttgattgcaacatggaggcaagaaacttgtgttttatggaaccttgacgtattgaccctgattggtccacaagattcacagtttcttctattaagtggtgggatgagtaacgatgatccatttgtgaaaagacattgtggcggaataacttgagttcgtaagccagttacatactattgtttttctgtcttgtcccttccctctttgctttgttttctgttaccttggccttcttgcttttgcatgaatacaacaggcacttcccactccatgatctttccttgagctgtgtccaccatctgaatgctcggaatgctcttcatcttagtcatttggctaacttcctcacctctttcatgtctcctgtgagctttctaattaacactgcaaaatgcaccattcttctgagctctcttacctggctctacatttttttccccagaacatctatcaccttcttacatgtctcacagtttgtttattatgctaattgtttatcagctatttttttttttttttgagacggagtctggctctgttgcctaggctggagtgcagtggcgtgatttcagctcactgcagcctccacctcctgggttcaagcgattctcctgtctcagcctcctgagtagactggattacaggcacatgccaccatgtccggctaattttatatttttagtagagacggagtttcaccatgttggccaggctggtctcgaactcctgacctcaagtgatctgcctgcttcggcctcccaaagtgctggggttacaggtgtgagccaccacgcctggtcatttatcagctatttctgtcttagaatatgagctctgtgacggtggtaatcttttgttactgttctcagatatatgtaaaaggcctagaacaaagtttaccatatagtaagtgctcagtaaatatttcttgaccagctgcatgcagtggctcacatctgtaacctcagcactttgggaggcagagatggacaatcgcttgagctcaggagttcgagaccagtctgggtaacatggcaaaacctcgtctgtacaaaaaataccaaaaactagctggccatagtggtgtgtacctgtggtcccagctacctgggaggctgaggtgggagaattgcctgactgagcccaggaagtctagggtgcagtgaactggggtggtaccactgcactccagcctgggtagcagagcgagacgctgtctcaaaaacaaaacaaaacaaaaaatatttgttgactgaataaaagtcaacaacattcttttttactttcatcacatctgttttgcagtatttagaagtaacttaagtaatcgttggctttttaatgagaaaaatttgtattttttttgtattgaaaataaagattttcgaaggaagcttgtaactttgatttgaaattttcagatactgaagtggatgtagttggcctttgtcaagaaggaaagtttcttttggttggcgagagaagtggcaacctacatcttattcatgtaacatcaaaacaaacactactcactaatgtaagatcttgttgtattttaattttcattatttaaattctaaataatctcttagacaactaaaactctagcaaactattacttaacatgtgttttaaattaaagcaatgtttttttgaacaattaagctttgaaggtgttaccacagcttggatcctgagttcttggctctcgtgtaaatagaaattaacaccaggtcaaacagaaattttcccagggaatgtttagtaggcttgtggctcaaggaatctcaaggaaacagcgtatgggaaagggatcccaagtgctagctccccgaagggcttagctcttgtcattttgaggaagctgaggtgaaaaagggagtgatttgtaggcatgtagaggcagggaacttttagcgcctgtgaattttggtcgcatcctttttcatgtgttgtatatctcactagcatgttaaatctccatccctgggtgtgatttttagtatcataattaggttaaaattaggaaatacttggtgaaaggccagggttgaagtccaccttgtcttcagctggctggatctggtcaggtgcttagcaggactgctagaatcctgatttagtaaccttggaagatggtcaggtttttattaggaatgctagagtcccactttaacaactttgggagaagtaactccaggagacaaatggttaggttcttgtatggttgggaattcagcttggtcagctaactcaggagcaggcagctttctgctgtttgattccagtcagcttgttaagggaggcaggaaggtagaggagggaatgcccagacatatgaagcctttggggtcttggttaccatgtctcttgcctgccaggattgagtttcttccctatactgaatggtattttaaattaaaaaaatgtttttttgaaaaattaagctttgaaggtgttaccacagcttggatcccgaattcttggctctcacataaatagaaattagcaccaggtcaaacaaaaattttcttaggccaggtttagtaggcttgtggctcaaggaatcgcaagggagcagtcttgaaggtatttagtacacttgtccaaaatagttttccattttaaaagtaagatgtttagaatataggcagaattattgctaatgataattgataactctagagtttaaagaataaaatccttgattgtatttttctatgtttaattttattatttgaaattaatttgcatttaggcatttgttcagaaagctaacgatgaaaatcggcggacttaccagaatcttgtcattgagaaggatggttcaaatgaaggtaagttttcctgaatttttttttgaatgacttttttttttttttttaatggagtctccctttgtcgcccaggctggagtgcagtggcgcaatctcaggtcactggaaccaccagctcccaggttcaggcgtctcctgcctcagcctcctgagtagctgggattacaggtgtgtgccaccacgcccggctaatttttgtatttttaatagagatggagtttcaccatgttggccaggctggtctcaagctcctgacctcaagtgagtgatccacctgcctcggcctcccaaagtgctgggattacaggcgtgagccactgcgcccagcctgaatgacttctgactaatatccaatcaaaaattcaaatttgtggttaataaattatataaaatcattattatgctacctacattttttctgttttttttttttttgagacgaagtgtccctcttgtcccccaggctggagtgcaatggcacgacctcggctcactgaaacctctgcctcctgagttcaaacgattctcctgcctcagcctcccgagtagctgggattacaggcacctgccaccacgcctggctaattttttgtttttagtagagatggggtttcaccatgttggctaggctggtcttgaactcctgacctcaggtgatctgcccgcctcaggtgatctgcctgtgagccactgtgcctggccttttctgtattttttatacatttttttctatcaatgcaattaatattgtaagaaacaatttttaaatttttgaaaaaaatttttaaagctctttttagatgtttaaatatatacttttcctaaatataatattctgaacttgtttttacagttttgagatttctataggttaccaaggagacattatattcttttaaaatgtgtttctgggcttcagtatattattatatttttacttcaacaagtgttaactgggccttagtttattttgatatatctgagatttttttttctggcacatgaagtttgttgttttaataaaagtttcaaaagaagttaacaatgtttttgcaaataacctactagttctttgtaaataagttttatctgtaacattactataatatttgatcattagaatttaaatgagcaggctgtgtgtggtggctcacatctgtaattctagcactttaggaggctgaggtgggagcattgcttcagtctaggagctcgaaaccagcctggataatatagagagaccgccacctctacaaaaaataaaaaattagccacatgtgttggtgtgtgtctgtagtcccactttctcaggaggctgagttgggaggatctcttgggcctgcagtgagctgcgatcgctgcactgcagtgtctggcctgcgagtgcaggccattgcactccagcctgggagatagattgagaccctgtctcaaaaacaaaaaacaaaaaaaaaaccttcaaattgacatatttttaaggtagttccagatactgtttgtttgtgcttgcctgcctgcctgcctgcctgcctgccttccttccttccttccttccttccttccttccttccgtccttcctctgtctctccctctctttttttttttttctgagatggagtctcactctgtcacccaggctggagagcaatgacgcaatttcagctcactgcaacctccactacccgggttcaagcaattctcctgcctcagcctcctgagtagctgggactacaggcacgcaccaccacaaccagctaatttttatatttttagtagagacggggtttcaccatgttggtcaggctggtctcgagctcctgacctcgtgatctacctgccttggcctcccaaagtgttggcattacaggcgtgagccactgcgccccgcctctttctgtctttctctctttcttcaaaagccacgttcaaacagacactggtttaaattttatatccatgtgccttttaaagtaactgattcccagccgtgagcagtggctcaggcctgtaatcccagcactttgggaggctgaggcaagcagatcatgaggtcaagagatcaagaccatcctggccaacatggtgaaaccctgtctctactaaaaatacaaaaattagctgggcatggtggtgcacgcctgtagtcccagctacttgggaggctgaggcaggagaattgcaccctagaggcggaggttgcagggagccgagatcgcgctgctgcactccagcctagcgacagaatgagactccatctcaaaaaaaagaaactgattctgattttatttcaataggtacctattatatgctacttcttacatacagtggatttttttgtattacaaaccttcagcttttaaaaattcaacaaggtaagtaatacattatatttttattattgatttgcagcaatatttactagttttattaatgtaatagtaaaattttaagtactctctttaagcttattttatcttacttgtatttagttataattgggtatactgttaagtattcagaatacagttattctcctctgttagagctggaacagtatctgaataaatgtaattttgatatggccttcaaggagcttagtttggggagataagcttcaacagtttagttggggagacaagacatatgctagcacaatagtaaatactttttaatgtggtggatgaacctggaaatggaaatgactatgtagtgttaatagtgcagaacagggctggcgtggtggctcatgcctgtaatcctggcactttgggaggccaaggcgggcagatcacctgaggttgggagtgcaagaccagcctgaccaacatgaagaaaccctgtctctactaaaaatacaaaattagccagacagggtggcaggcgcctgtaatcccagctagtcgggaagctgaggcaggagaataatttgaacccaggaggcagaggtgcggtgagctgagatcacgctgttgcactccagcctgggcagcaagagcgaaactctgtctcaaaaaaaaaaatatatagtgcagaacaataatgtaaaatatgttttaagctagtagtctggaccatttatccctctaagccaagtgaaattatttgaggaatggatttggaacaggtatttaacattttgttttattttattatttttatttatttatttatttttgagatggagtcttgctctgtcgcccaggctggagtacagtggtatgatatcggctcactgcaacctccgcttcccaggttcaagtgattcttgtgcctcagtctcccaagtaactgggattacaggtgcgcaccaccacacctggctaatttttgtatttttactagaggcggggtttcaccatgttggccaggctggtctcgaactcctcacgtcaagtgatttgcccgtcttggcctcccaaagtgctgggattgtaggcatgagccactgcgcccggcctaagtgatatttttaaaatactgacttgccaggcctgtgctacgtcttgggtatatgacaagattgaagatttgttttccatagcttcatgatggagctagaaacgtaagagctattccaaacagtgagaagcacaggagagttggagtagggagaagatccccttagtaggaagagaggtggtaagggtaggtatggagaggtactggctggtgccctgaatctaacatgtcacagttagcgtattttggtcaggggcaaaacttaattctcaccagtgttctttgaactagattgtatttaatttcaccttgacacaaaacaggtgacttgtattattttgtagattaatactatacatttagcctgctttcttttttaatgcagcaattgagaatgtagacttcagtacagcaaaaaaggtaagaaaataaatccatattgtcctcttaaaaaaattacatttaatattaatgtagtagaatgtttctgtatataattggtctacttcttgatattttagaaattattatgatataacattttaataacatttctatttaaaaatacatttatgcccgtaatcccagcactttgggaggccaagggggcggatcacctgaggtccggagttcgagaccagcctgaccaactggagaaaccccatctctactaaaaaatacaaaattagccggggggtggtggcgcatgcctgtactcccagctactcaggaggctgaggcagggaattacttgaactcgggaggcagaggttgtggtgagccgagattgcgccattgcactctagcctgggcaacaagagcaaaactctgtctccaaaaaaaaaaaaaaaaatttataactgattgatatcaactgattttagtgattttatggagcataaatatgtattatatatatgacgttgttgtttttaattttgcagttacaaggacaaatcaagtccagttttatttctactgaaaattatcatactcttggttgtctcagtcttgtggctggagatttagcaagtgaagttcctgtgataattggggtaattgtttttataaagttttgttttttgttgcctaaagcattttctcagaaaaatgtttttgttttggttaaattgcaaaataatttgtaacatataaccgaaacaaggaaattataaaattaaggtaattaaaaataactcaataaataaatttctgtcttggaaaaaatattgcatctttactttccctagtctttacctgaaagtacagcatttttttcaattatgagagcagacaaaaacgatagaaaacaaaaccaaaaaattccattgttacagtacctgtgactttgtcactaatggaaaaacagcacattattgcagctgtcttgaaataaatatttacacaccactacttcaaaattatggtcatcatagtttttctaataggaagtgtaattactactggtgacatactcacagggactgctgattctactgctttttgttttttggggtttttgtggcctacattcataagtgaaagaaattctgtttcagatggagattagtgaaaataaagatgtaaattttttgcccatccagcttcacaaatccgttgaatcttgaaataattcaggttaagaaccttagtgttagagaatggtcctaaagagtaaagtgtctttgatgtaatgcctgcctcctaagtgattctacgttattcttagtcttggctagctaggctacttgcaagttttgttattagtgaaatgggaacgtggacaaggatgcacgtagaaaagcacaattcattcacaaccattggcatgtatacattgctgtataatgtcttatatctcatgttacatgtaaaaagtaacatttcattattggtatgtcacttccagtaaccctgatcataatttctttaaattttgggggaaaatacctaatgttatattcaaagaataggcagaaactcagtataattacgtttacaacatttttacttgccaaatttatatattaagaagtagtcagctgcgtgtcatggcatgctcctatggtcccagctacttgggaagctgaggcagaagaattgcgtgagcccaggagtatcaggctgcagtagctctgatcacacctgtgatcaccccacttcactgcggcctggcaacacagtgagatcctgtctctaaaaagagaagaaacaaaaaagagagaaaagaagcagtcatatttccacattgagcatatctaatttaacatttcaccagggtttcaaagaatttaaaattaatatttataaattttttttccaaatatctgtggtattttaatgaaaatacttatcaaagactatattttaatcataatcctggaagaggtcttaaaagttcactgcatgtctttagtgctagttgcctaaatacgctcattaaatatttatgtgaaggctggcatggtggctcatgcctgtaatcccaacactttgagaggctgaggtgggaggattgcttgcacccaggaggttgagaccagtctcagcaacatagggagaccctgtctctacaacaaatagtaaattagccgggtgtggtgatgctcacctgtagtcccagctactggggaggctgaggtgggaggatcgcttgagcccaggagattgaggctgcagtgagctgtgatcactgccctccagcctgggcaatggagtgagaccctgtctcaaattaaaaaaaaaaaaaaaattgtaataaccatgaattccaatagtacactgtttttttcattctcttcagaaaccaagagaggaactggaagatgaaacctagttaagttagaatatgtaaatatattttaaaattagtaacctataaaacttacatgtttctactttgaggaaggctcaggtctaagaatgaaatttgcattttaagtactgtgttcatttttccagggaaccggtaattgtgcattctcaaaatgggaaccagattcttccaagaaaggaatgacagttaagaaccttattgatgcagagattattaaaggtaaaataagttaatgaaactactttagacaattattagtgagttttaatttttatgtcagtgtacttagactgacatatgggtcattttaccctaccactctttgaaacaagccagaatagcttgatggttgttcacatacagaacagttcttgacatgttacagttgttactcttcattttgggaggttttacattttagtaatcacctaacagaaatagaggcaggaataaaggaaaatgggacctagtaattatgtagttctgcctttctgtgaatatgttagttttttatttagatatatgaaatattgaaataaaatcctgagacatcttattttctcttttgtaggtgcaaagaagttccagctgatagacaatctactttttgttcttgatactgatgtatgtttcttgtttctccttcaatgtttttacttgatatgttttacaacaaaaatgtcagacttacaaaggcaagggttttagctagggtggataactatcttgtgtactgtgctttttttcagtatatgtaccaaaaagttgatcctgaaatgtaatttttttttttttttttgagatagagtttcgctcttgtttcccaggctggagtgcaatggtgcgatctcggctcactgcaacctccacctcccgggttcaagcgattctcctgcctcagcctcctgagtagctgggattacaggcgcccatcaccacgcccggctaattttttgtatttttagtagagacggggtttcaccatgttggccaggctggtctcgaactcctgaccccaggtggtccacccaccttggcctcccaaagtgctgggattacaggtgtgagccactgcgcctggtctgaaatgtaaatttttaatcattaagaagacacgtaggctaggcgtggtggctagcctactaaaaatacaaaaaatacaaaaatacaaaaaattagctgggcgtggtggtgggcgcctgtaatcccagctactcaggaatctgaggcaggagaatcgcttgaacctgggaggtggaggttgcagtgagccgagatcgcaccattgcactccagcctgggcgacaagagcaaaactctgtctcaaaaaaaaaggacatgtaaatgaaatgtctctattgcagaacgtgctgagtttatgggatatttacactctaactcctgtatggaactggccctctcttcacgtagaagagtttcttcttactacagaagcagactctccttcatcagtcacgtggtatgttatgactatggctagtagtcatttcccttctgttagtaccaggtatcttgtctggttttgttcaggtcatttattatgttttacattctaaacaacactgtgaaacagtctgacagagtaaagaccgtttgcaaaattcactgggaacagttaggcaatatgaacttccaagtcattttgttagaaactgtcagtctgggcataaacgtgcagaaatggaatacagtgtctattacattttattttttatggaagagtgttactttagtttatatcttgtaattggcaaagcctacttttttaatcaatagataatattgtatgtttttgttgtgtaaaagtttacttgaattatttaaaggttcttttctcttttaggcaaggaattacaaatctcaaattaatagctctgacagcttcagctaataagaaggtattggaaaattttattttgtgcttgcctatattatgtgttagaaaaagcattagtgaatacaaaagtagatgttaaatagtacagcatattagctcttagttcacacagaaacttgacaatcagaaataaacctgcagaactctttttaaagtaaaaagctgtaaatcttgactccatattttaaatggagcacttcaggaaccaaaaatgcccataggaaagtgtttattttattttattattattatttttttgagatgggatcttaccctgtcccctgggctgtagtgctatggcacaatctcggctcactgcaaccccccaccccctgggttcaaacgattctcctgcctcagcctcccaagtagctgggattacaggtgcctgccgccacacccagctaatttttgtacttttagtagagatggggtttcaccattttggccaggccggtctctatctcctgacctggtgatttgcctgcctctcggcctcccgtagtgctgggattacaggtgtgagccactgcgcccggcccaggaaagtgtttattagagtgactcttacgtagttctggcactgaggaattacatttcaccttaaatacaaactgtagaatggacttcaggtatatgtatggattttcattcaacagagttggaatatggggtagaacatcatttcatatgtaacatttaaatcatatagtaacaagctgggtgcgttggctcacacctgtaatcctagcgctttgggaggccaaggcaggtggatcacctgaggtcaagagtttgagaccagtctggacaacatggtgaaacccagtctctactaaaaatacaaaaattagccgggcttggtggcgtgcacctgtaatcccagttactcgagaggctgagacaggagaatagctggaacctgggaggcagaggttgcggtaagctgagagtgcaccagtgtactccacctgggcaacaaaagcgaaactccatctcaaaaaaagtaaaataaaataagtcatacggtaacagacttacttataaatgcttattttttgcatttagctttgtactgtgtgttttatttatttatttatttagagacagtctcactctttcacccagacaggagtgtgtgtagtggtgcaatctcggctcactgcaacctcttcctcccaggttcaagcaattctgcctcagcctcccaagtagctgggattacagatgtgcaccactatgttccagctaattattttggtatttttagtagagacggggtttcaccatgttggctaggctggtctccaactcctgacctcaagtgatccgcctgcctcggcctcccaaagtgctcccatgtgtttttggttttttgttttttatttatttttattttttgagacagtgtcgctctgttgcccaggccggagtgcagtggcacaatctcggctcactgcaacctccgtctcctgggttccagagattcttctgcctcagcctccccagtagctgtgattatcccagtagctgtgattacagatgcacaccgccacaccaggctaattttttgtattttagtagacagggtttcactgtgttgcccaggctggtctggaactcctgagctcaggcaatccgcctgcctcagcctcccaaagtgctgggattataggcatgagccaccacgcccagccgctcccatgtgttttaatctgctcttaattgtgaagtgctgttttgtacttgcatgtttaaattgatctgctaaattaattgctctgctatttttcttagatgaaaaacctcatggtttattcattacctacaatggaaatactatattctttggaagtatctagtgtttcttctctggtccaaacaggaattagcacagtaagtttatttgcattttaaagtattcttttaactacttttttctttatctggtatctaatcagggatgattaaaagccttaataattaagctaagcattagtggaacctagtggaaacctggataaatttcaggtttataactatatttattaatagagatcctcaaatatacttacttgatagtctaaggttagtcatcatattaaaaaaaaagtcaaaacatcagtcatctgcttattcttctttcttgtgtctctacaggaagtatagatgataatgggagatggagactattgctgttacatatttatgtaactaatttacatattttaaaaatattttaccacatttgtttaatttctttttacacacacactgtagttttccacattttggaaattacttgtagacatcatgctgtcacgcctaaatcttcagcaggtatctcctaaaaataagggcattcttctacaatgcaattatcatactcagaaaatgtaactcaaatacagtattatttattataaactcttctagatttaaattttaccaattgggccaattactttaaagctatttttttttcttatgatctaatcaagaatcactcatcaaatttaggtctctgtgtttttgttgttgttgttgttgtcgagacagggtcttgctctgttgcccaagttgtagtaccgtcgctcaatcatagctcactacagcctccaactcctgggctcaagtggtcctcctgcttcagcctcctgagtagctgggactacaggtgtgcaccaccaggcctggctaatttttacattttttgtagagaggtggtctcactatgtttcctgggctagactcaagctcctgagctcaagtgagcttcctggctcacctccccaaattgttaatattacatgtgtgagccattgcatctggtccattttttgtcttttaagacattgacagttttgaagagtcgccaccctgtggttttgtagactgtttctctatttggatttgattgtttcatcatgattagattcatgttaagctttttttggcacaaatactgcacaggtaatattgttttctaaccacatcacgttaagaggctcatggtatccatttgtcctgttatgggtgattttaaatgtgatcatttggttaaggcagttctgtcagatttccccatttataaagtgtttttcccttaatagaaagtaacctatgtgatattattttgagtctatgggatttatatttcctagccattttttcccagtgttttttttttccttaaatttttgtgggtacatagtaggtatttatgggatacccagttgttttaaagtccattgatggataattcatgcctgaaccagtagttactctagtaattataaaatgcattgctcttatattggaattttaatcatgtttttttgttattgtaggataccatataccttttagaaggagtttgcaaaaatgatccaaagtaggtcatgttttaccgtgttaagtaatagctatgttaaattttacgtattaatattaaaagacaagcgcatttatagttaaaattttttctagattgtctgaagactcagtctctgtgttagtactcagatgtcttacggaagctttaccagaaaacaggtaacttctcatttttttttaagctttatcctttagtgaataacttaaattccctgaataataagcatttaacaaaatttctcttccaacttaacagattgagtcggttacttcacaaacacagatttgctgaagctgagagttttgccattcagtttggactagatgttgaggtaatcattcatgtattcatttgttcaccaaacaagcatttcgtcatgggctagaggctgagaggacagacatgtaatatataattggaatttagtgtgattaaggctgtaattaagatatgactgaagttgattagagattcagaggaaagagtgacccatagttgggcagaaagatgttactgaggaggtcgttttcaggtcaggtcttttttttttcttttttcttgagatggagtcttactctgttgcccaggctagagtgcagtggtacaatctcagctcactgcaacctccgcctcctgggttcaagcgattctcctgcctcagcctaccgagtagctgggattataggcatgcatcaccatgcccggttaatttttgtatttttagtaaagatggggtttcaccattttggccaggctggccttgaactcctaacctcctcgtgatctgcctgtcttgttctcccaaagtgctgggattacaggtgtgagccactgcacctggcctcaggtcaggtcttgaaggtgttcctgacagaccagggaggggaagggattctgggtacaaggtcagcatggatagaatgagggggacttgtgatgcttcaggaactcctgctgattaggtgggactagaatgtaggttatatgggcagcagagtaaaagaagatgatgatgatgcagaagtaggggcctctgtcacccaggctggagtacagtggggcgatcacagcttaccgcagccttgacctcccaggctcaagtgatcctcctgcttcagcttcccaagtggctgggactatagttgcataccaccatgcccaactaatttttaaattttttgtagagacaaggttttccatgttacccaggctggtcttgaactcctgggcttaagagatctgtctaccttggcctcccaaagttttgagattacagtcctaagccaccacttgtggccaggagtgagatttgattttgcaggtgataggaacctgctgacagttttaagcaggagagtatcttgattaggttgtcattttagaaagacaaagaatttggagaagggtaaatacattggaactaagtacttttctctaggagacctgaaccagggcaatgaagtacagatataggtgagagagaaggctgataagagaggaatataggccaggtgcggtggctcactcctttaattccagcactttgggagacagagacaggcagataacctgaggtcaggagttcaagaccagcctgggcaatatggtgaaacctaaaaatactgtactaacaatacaaaaattagccaggtgtggtggcacatgcctgtagtcccacctactcgggaggctgaagcaggagaatcacttgaacccaggaggtggaggttacagtgagccaagatcacaccactgcattctatcctgggcaacacagcaagactctgtctcagggaaaaaaaaaaaaaaagaggaatatagtgggtggaatcagcaggacttagtgatcaaatggaaggaagggcaggggacttgaggttgacttgctttactctggctaagcatacacattgggtgacgatggcatgacctgaaatgaggaatatgtgtggaagagcagtttagggataaaagatgaaaagttctgctttatgaaaattggatgtgagctgagcacagtcgtgcatgctggtagtcctagctgctcgggaggctgagggaggaagattccttgaggtcaggtgtttgaggctatactgcaataagattggcctgttaatagccactgcaccccagcctgggcatcatagtgagcctctcatctctaaattaaaattaaaaaaaaaatggatgtgaggggtctggtgaaatagagatgtctagtgggaagttgaggagtggcctacactgcttctaagggtcggagacaccagtgtaatggctcagatgactccagcaaatgcagagagtgaaaagacatctgaggatgtgatgtgggggcaatagcatatcagggatggaggaggaagggctgtacacatatttgggaagaaataagggagaaaaactgtaagaatgtatgattatggaagccaaggaagcagtaagttttaaatgtactggggagtgatcagcagtttcaactactacagagaagatcaagtataaaagctgaaagacatctggaggatacagcaattaggtcattgataatccttgaaaagtcagtttttggggaagtaataagagagaaagccttactgtagttggttaaagaattaatatttactaagtgggtgcttgctactcgtgcttgttttaaaaaatataacggttttaaacatacagaatacttccttaaaaaaaaaaaaatatatatatatatatatatatatttgtattttttgtagaggcggggtttcaccatgttggccaggctggtctcgaactcgtgaccgcaagtaatccacctgccttagcctcccaaggtgctgggattacaggcatgagccaccatgcctggccgaaaaatatatatttatttttatatatattttgtaaacacagggtcttgctatgttgcccaggctggtcttaaactcctgacctcaagtgatcctcccttctcagcctcccaaagtgatgggattacaggtgtgagccaccatacccagcaagaataattctgtgtattgtttagaaatgtatacaagttaagagacaaagtaattaatggaattagtactaaatacaagaataatgtatacttctggttgggaggaagaggatgatgtatttggaaagacaacagtgggatctgaaactattggtaacatctgctttatttttaaagctaaaggtgatgagtacattattattatagtatttataatttacattattacttttttgaacatctgaaagattttagaagtaatgtttaaaaagagacagtggagcaaaaaaatcaaaccaaaacagaaaatctgtgaaagaaatgaggggaatattcatgaattaaactactctttgttatcatttatagttttcagaaccagagagtccctgtcaaagttggtattgtgtccataggaaacagaacctgaaatttgagtatttgtaactctaacctttaaagaacttttagtagacttagaaaattggttgtctttaaaaacctgtttcatgagctgggtgggcgtggtggtgtgcgcctgtagtcccagctacttgagatgctgaggcaagagaattgcttgagcccgggagttccaggctgcagtgagctatgattacaccgctgcattttagcctgagtgacagagcgagatcttgtctctaaacagacaaacaaaatcgactctgtaacttttggactgcataatttcagacacgttacttaacctttcttgggtctcagttttcttgtttgtaaaatggggatattagtacttaccccatagtgtcatgatgacatgtaaaagtttacttcttaggttatgataatttaaaaagacaattcatataaatatctttcttcggttgataaataatcatatatacttggccgggtgcagtggctcacctttgtaatcccacactttgggaggccaaggtgggtggattacttgaggccaggagtttaagaccagcctggcccacatagcaaaacgctgtctgtactaaaaatacaaatattagctgggcatggcagtggatgcctgttgtcccagttactcgggaggctgaggcagatgaatcgcttgaatcagaaggcggaggttgcagtgagctgaggttacacttactgcactccagcctgggtgacagagcaagactctgtctcaaaaataaaaaagaagggccgggcgcggtggctcacgcctgtaatcccagcaccttggaaggccagggcgggcagatcacaaggtcaggagatcgagaccatcctggctaacacgatgaaactccgtctctactaaaaatacaaaaaattatcctggtgtggtggcaggcacctgtagtcctagctacttgggatgtggaggcaggagaatcgcttgaacccgggaggcagaggttgcagtgagccgagatcctgctactgcactccagcctgggcgacagagcgagactctgtctcataaaaataaataaaaagaaaaacaagaatgattgtatatactttcgatgtgcaatgtggtgattttatacatttacattgtgcaatgattaaatcaagctaattaacataactatcacctcacttatctttttttgtggtgagaacatttaaaacctactcttttagcaatttttttttttgagatagagtgttgttttgtctcccaaactggggtgcagtggcgcgattttggctcactacaacctccacctacctcccaggttcgtgtgattctcatgcctcagcctctcgagtagctaggattacagacgcgcaccaccacgcctggctaattttttgtatttttagtagagacggggttttgccatgttgctcaagctggtcttgaacttctgagctcaggtaatccacctgcctcggcctcccaaaatgcaaggattacaggtgtgcgccaccacgcctggctcttttagcaattttgaaatatacattattactaactacagtcatcatagacctctgaaactcattcctccttctaactgaagctttgcagccttgaaacatctctgacacctctgtatcctcccgccccttcccctgggctctagttgtcaccattctactctctactttttttttttttttttttgagatggagtctttctctgttgtgcagtggcacgatctctgctcactgcaagctccgcctcccgggttcaaggattctcctgcctcagcctcccaggtagctgggattacaggcgcccactaacatgcactgctaagttttgtatttttagtagaaaccatattggccaggctggtatcgaactcctgacctcaaataatcctcctgcctcagcctcccaaagtgctgggattacaggcgtgagccaccgtgcccgacctctactctctacttttatgagtttgactattttaagatttcacatgtaagtgagatcatatagtgttttttttttattgtgtctgacttatctcacttaccataatgtccttcaggtttatctgtgttgttgttggaaatgacaaattttccctctttttttttttttttttttttttaaatagggtcttaccatgttgcccaggctgggctcgaactcctgggctcaaatggttgtcctgcctcggcctcctgagcaggctggcactacatctagcttctagactgaacaatattttactgtgcaaatataccacattttatttattcacttatctgttgatggatatttagattccatatcttagctcatataaagctcttagtaagtgtactgcttgacacgtttagtaaggactcaacagaaatggttcccatacctgctaataatctggttcacctctcagatatctgaatgttactttctttaaatctcattcctggagcgcatgaggattcacctttttgaagtagtttgtttcactcagcttactctgagaataagccatccacaggtattattgtacttcaaattgcttgatgtggcgtgtttatattacagcttgtttacaaggtcaagtcaaatcatatattggagaaactggcattgagttctgtggatgccagtgaacagaccgaatggcaacaacttgtagacgacgctaaggaaaatctacataagatccaggtatgtttttcttgtcacatactacagtatttagattgacgtgttgatcaacattaggttgccttactgtgtctggcatttgtgaaacaggatgatgaatttgtggtgaattactgcctgaaagctcagtggataacctatgaaaccactcaagagatgctgaattatgccaaaaccagggtaggttcgtttttttgtattttgtttttttggggcaggggagaatttgctttaatctctcataatcctgcctcaaatatatcttttcctcctatccgctatgtgtattattaataaaaaagtttttataatagcttaatggagataattcacatcctatacaattcacctatttaaagtatacagttcagtggtttttaatatattccttgagttgtgcaagcatcattattgtcaattttagaacttttaaatctccccaaaagaacctctatcccagaccggacgtggtggctcacgccttaatcccagcaatttgtgaggctgaggtgggtggatcacctgaggtcaggagctggagaccagcctggccaacatggtgaaactccgtctctactaaaaataaaaaaattagttgggcgtggtggcacgtgcctgtagttccagctattagggaggctgaggcacaagaatcactggaatccgggaggcagaggttgcagtgagctaaaattgttccactgctcttcagcctgggtgacagagcaagactgtgtctcaaaaaataaaattaaggctatgtgcggtggcttactcctgtaatcccagcactttgggaggccaaggtgggtggatcacctgaggtcaggagttgaagaccagcctggccaatatggtgagacctcatgttgtctctactaaaaatacaaaaattagccgggtgtggtgtcacgcgcctgtagtctcaactgcttgggatgctgaggcaggagaattgcttgaacctgggaggcggaggttgcagtgagctgagatcacgccactgcacttcagcctggcgacagagcaagactccgtctcaaaagaaaaagaaaaaatattaaattaaaagataaaactcttaaatggctgggtgaggtgtctcatgcctgtagtcccagtacttagggaggcagaggtgagtgggtcacctgaggtcaggagttcaccagcctggccaatatggtgaaaccccatctctactaaaaatataaaaatgagctgggtgtggtggtgcactcctgtagttccagctacttggcaggctgaggcatgagaattgcttgaacctggtaggcagaggttagggtgagccaaaactgcgccacagcagcctgggcaacagagtgagactcttatcaaaaaacaaaagaaaacaaaacctctatgccattaatagtcattccccatttgccccagtcccccagcttcaggaaaccactaatttacctcctgtctctctagatttgcctattctgaacggttcaaataaatggaatcatatatgtctccttcatgtctggcttctttcacttagcataatattttcagggtttgggctgggcacgttgtttcacgcctgtaattccagcactttgggaggccgaggtgggcagatcacgaggtcaggagatcgagaccattgtgacgaacatggtgaaaccccgtctctactaaaatacaaaaaatacaaaaaattatccaggcatggtggcacgcacctgtagtcccaggaggctgagggaaggtaatcgcttcaacctgggaggtggaggttgctttgagctgagatcgcgcttccagcctggcaacggagcaagactctgtcccaaaaaaaataaaaataaaaaaaaatcttcagggttcatccatgctgtagcacatgtcagtgctgtatttctttttattggcacataatattctattttatggatataccacgttttgtttctccatttatcagttgatggacatttgggttgtttatacttttttcccccaattttgtttatattttgttaaaaaatacataacatgaaatttaccattttcacctttttaaaaaaaaatattttatttttgagagggagtctcgcactgtcacccaggctggagtgcagtggtgtgatctcggctcactgcaacctccacctcctgggttcaagtgattctcctgcctcagcctctcaagtagctgagattacaggctcccgctgccaccacacctggctaatttttgtattttagtagagacggagtttcaccatgttggtcaggctggtcttgaactcctgacctcaaatgatctgcctgttttggcctcccaaagtgccgcaattataggcatgagccactgcgcccggcctatcttaagcatttttaaatttaatggtattaaatacattcataatcacattcggccatcgtccatctccccaactcttttcatcgttgtgaaactgaaactctgcccattaaacacagacttcccattt

SEQ ID NO: 123 - DNA, 11346 bp, Homo sapiens
  source 1..11346: mol_type = other DNA
atccccaaagggttaaaaaccacttcatacagacagagacatgaaatttatttgaaatcaatgtcaagcatcggttattctaatcctggggcttggccagacctgggcgtctggaatgatctacgtgcttaaatacaccactcgccaccattttctccaggtaattttccatccctgcccccaccatcaaggggaagaaagtgctcttcggattccggttcgccctggcctcccgcagccgccgcgggaccggcccccagcacacccccggggcgccgggcgcggggcagccgcccggacgcgcgcgggcctcaggcgccgccgggaccccagccccccaaactttggcaagttgcgggcgccgagcgcacccggaggcgcggggcgcggccgcaggcggagccgccccctgacgccgggccgccccctcccggccccggccgccccgccggctccgcggaaagtttgcggccgcccctgcgccgcacccggggcctgggtgagactgcggcggcggcagggcgcggacggccatatttgccggcgcggcccgagccgccgacaacaaaaagtgcgcgggcgctcggcgggcgctcggacgggcgcggggctgcagcgctaccgcccggcctcgccgccgccgccgccgccctcgcggcctggccccgccgcgcccggcgcgcccgccgcccggggggatgtcttacaaaccgaacttggccgcgcacatgcccgccgccgccctcaacgccggtgagtgagccgcgtgcgacgcgccccaagcgccgccaagttgggggtccgcgcgcccggccccggcccggggatgcccggggcgcccgcggaggccgggggcggggggctcagggtcccggcccggggcagcgctgccgccgccatgattcccgagcccgcgccgcgaaagttctctggtgcgccccgcacgccgagggcctcggctgggggtgcggggcgggcggcccggggtgacccccgcgccggcggctgcggatcgcagggagcgcggcgggcgagggcgagggcgggggaggcttgttctcggctcctttttcctccggcttctgggcggctcggcgagggcccctgccggcgggagtcgggagcggcccgggccgcgccgggagcggggcgcggggccccgccgccctggggagcggggtcgtgaagcagcccgggcggggggcgctgcgggcagggccaggacccgcgcgggcgggcgcggatggagggctgcggggctgcggggctgcggggctgccgggctgccgggggccctgaggtcgcggggccgccgggactgggaccaggatggggtcgccggcgggcagcgtactcggaggcccgggggcctcggccgggagcgtgggagcaggggctaccccatgcggtcacgcggggacccccgtaaggtgagcgcggagtgaacgaagttggcgcagctctggggctgctggggcccgcgcgcgggcgtgggggcagtgggtcacgtggacgccccatctgggagcccccaagggctggccctggaaggccctcgatgcagaagccgggaggggctcccctcaagcttcctggggctgcggccgcagccgggcgctcccaggaaactcctccagaagttgtcaggcagcttcgggctgagcccaggggaccgagggagccatggggagtgggcacaacattgagggattcgtaggtgccgggctttgtgacctcactggggcccttcttctctgacacttggtcggaaacagacttcccaaaaggcggttgtgttgcggggcgggatggggggaaggactcgacggggagaggagtggccccgttggtcaccggtgccacgctggctctcctgctcgagttttgggccttgtttgcaaacgttgacctcgtaaccccccaaatcggaagtgggacccataaaaacgatacctaaaaaaaatcttggacactgaggtgtaggggcaggaaagggttaagcgtcagggtgcggagggagagttgaattgctcacttgtgggctcggagtcccaaagagcaaacagccactgtttttttctcaaacattctcacctcctctggggtccgcagaccttacaaagacgggctttgttgccaggtaggactgccagcagccttcttcctctggcctgtggggagggcaggggctggtgttgccagcctgggcaaggctgagctcaggcttaccctggtgtcattggggccggggccctaaactgggaccctcggggtttggggtcacagggacagcggcactcacggggacccctgaagtcctgttctgggctggctggacctgtactcagcttttcttctttgtcctgtggagaattccaggagtgccgagatccccagatctgggctttttggtgcccctcccaaccccccacgggcccctttgcagaaccccagctcccctcctgccatttgcatccaagatggactctccgctgccgccgctgctcctccggcttccttgtcatcatccctcacgccctgcagccctgcctcctgttcacgggttgccaagccgcggcctggccggtggtggcagtggcggagttagacaaagcccccgcctcccccgccccagagccccccaggcgccccaagtggcgggaaggccgccagctccccaggccccgcgctctttgtctggcgtgggggtggggagccgcgcctggccccaggagcttcctggcctctgccaacccctcgctcctgcacactgcgctcattgtctgagatgcgccgagacggccttcgctgacgtggtccctgtgtcctggtccctgtgtctgcaggaaggagtgaccaggagtggaactcggagcccttccgccatctctctccaggactagacacccccccgcccccgaacaagggagtggcctggacagagcactggggtcaccgagctattgctcctcgtcccccagccaaaatgggacgatttctccttcctcctccctctcagccctgcaaaacctaaccccagtatcatcaaatagtaggaactggagcccatagaccttctcttgggaagcactgcctctaacaaatggagaaactgaggactggagggcggggagcctgtctgaggtcacacagccaggagtggcacagctggggctggcacgaagtccagtggggaggacagaaaaggggaggtgaggagcagtgggcagagcagttggggaagaggacgggggcacaccgagggaatgcgagggtgcgtgggaagtggccagcacccctcctgccagggcgctgggatcttgcaaacgcctggggtgctgtgcgcgatgctacccccagcgactggccctggagccagagaggtgtagtgaccaggatcagaacccaggtctgtgccggcagagcctgtgttcgccatgccatgcttgctgccacatcagaagctcaggaaactggggtttggctgatgtagttagggggctctgggggacatcaccctgcccaattcctgcagtggccatggacgtgccagatatcgtgggcgttgtgcgtccccctcccaagcaacccgcccctatagcgcacgtgtctcatcatccgcatgtgtctcatcatccccacgtgggaggcgtggaaactgaggctcggagtggcacggtgctctgcccagttcaggatccaagtccacgtttgcagttccagcccaagctggagcataaccctgggctgcagtggcagcatccagggctggcctgagactcaggagacagctcggaacggtccccgttctcggagagaggggcaggtgccggggtagctggctccctgctttggtctcctctatgctgtgtgccctggggccaccccttcaggtccatttctctaaatcgaggggcctggagccagggttctccagtgctcctcccggctcccccagcttgaggccctgaacttccttcctcctctgcccctcccctcacccacaccaagcgagcagctggtgggtttggccagcctggcaccagctgtctgtccccgaggccaagtctgcggcgcccactgtgtgtgtgagagagagaccgtgtggctctgggggcggcaggcgggcagctgccgaggaggactaggtaaattctccatggttaccgctgtttgtcattctgcaggatatcctttacccgctaatggccactgggacgccattgcggggccgcgtgctcctagccacggactcccctgccagatccaggaggctgcgttctgggctgggccctgcttggtcactgactgcagctctggacaggccccaatgttgcatcccatatgtggggcctcaaccctcctgtcttgggatacagagcccttggggcatagactgctaagagtctggtcccctctttggggagggggagacaggcacagaggggttgaggggctttatctggggcacacagaggccatggtgttctctagatttctgatttgatgtccagcgtgcctgtctccagccagggttgggtctcaaatactccaaggccttcctgtcttccctgtcattgagcacagcagagatttgagcgcatagaagcaaaaaggcttggaagctcagcctggtttcgaccagcctatgtggcgctgtggtgtgatgtggcctctaggttctcagcctctggggaccaggacacagggagaggggatgggcagagttcaggccaggagtggcaataattttatctttgggagcagccctgctgcttggaaggttctggttggatgggatggagctctgtgaggaccagcggctgctgcagagctggggatggtcaggtgccttgtagctacatttcattatccatcttatatgctggtcaaaccggaggtggagagcagggttctccatcctgctacagttggtggtgtgggtcctgggcaagggctgttgcaggacccggagtccttgccttggtacaactggctgagctgactcctggcctctctctccccaccccacagctgggagtgtccactcgccttccaccagcatggcaacgtcttcacagtaccgccagctgctcagtgactacgggccaccgtccctaggctacacccaggtatgtcaatgggggtgatggcatggtgggagggccagggggagacatgcttcccaccatcagaggagagaagttggtggaagagacgaaggagcagaaaggatgggacggagctttctcagcccaaggccctggctgcgctcctgctcagaacacatcagagtggagggcactggggactgtgcttcgcggggacgtgtgaggtggaggggacaggagagcaccaggaaggggcagcagcccaagctgtgctgaggctcccaccccacgcgttcctccagtgggcctcctcactcctctttcttgggcaagtgaggcctgaccttgatgctggctctccaagctgggacagaagatagggtcagttcccacttgctctccacgggcgcgggcccagcagagaggaggtggccctgtcttgagagcccagctgccttttgtcgagggccagtatttgagagtgtggcctgggcgaggccgctccctggttccaccactttccagactgtgaccccccacttggtaactgcccaagacccgggctcctcatcagcccaagggtgatcctagtacccccagcccaggctggcgaacagcaggaatggggccgccaccatctcagctgcaccctacatctccaagggatgagccgccccggggaaggtcccagcgggaagatgctctccctggctgggccccagcaccagtgttctgaggtcgctatggagcctgttcctcgccaagtgggcggctccccggccatgccccaccaggctgccctgccccaggaggagaagcaggtgtgggcctgtgagcgggaccggctgaagaagcggtggctgtgggaggccaggcagaggggcagccgggagttggcagtgccacgttctggccatgcgacggcggcgccaggacaggcgggaggcccgtgaggcctggaggcagtgccgtggggaggcagagcagccggagcaggacgaggacaggacagagcgcgaggccaggggacagaggcggtggtggaggaggggggaggcaaggacctcgcccagggagctggcgtgtctatgggaggaggtggccaaggggaggtagcctgggcttgtgggcttgcgggcttgtgggcttgccggaagcccagcctcgctgatccgggtgcttgctgtggggctcccagtggtggtgggaggaaaggttttctgggggttgggccctgttggtgggaggatgagagaagggaatgcattccaggctctggctgggccatggcggatcgctgtggtcctggtggcccaggtgtggcctcttgtctccccactggcttggaggcttggcacctgggatgtgccctcccatccatctgcatcctgggaaatgctgtttggactcttttgtgccaaaatgagctgtttcccctgttttgttcattggagataataaagttgcttcctggagacgactgggtggcctccctgagtgtgtgaggataggagggtgaggaccatctccctaacttgtagttgtcccctagaatgggacgtgccttggcccagctgaggtggctgccccagaagtctgaggctgggctgcgttccctatcctgaccggcccggggccctctccacccacctgcctgtggccttggggtcaggctgctgaacccttttttttttttttcccccgagatggagtctcgctctgttgcccaggctggagtgcagtggagtgatcttggctcactgcaacttccacctcctgggtccaagcagttctcctgcctcagcctcctgagtaactgggactacaggcacgcaccaccacgcccggctgattttgctgaacccatttctttctgattctagggaactgggaacagccaggtgccccaaagcaaatacgcggagctgctggccatcattgaagagctggggaaggagatcagacccacgtacgcagggagcaagagtgccatggagaggctgaagcgcggtaagcccggccccgctgccctgtcggtgaccacagtgctagacctttaactctggaaagacttttggggaaaatgtgggaaggtgggctagggatgaggctcactcatgggagctcctgtcttgttacagagttgccgtctgtggtggaggcctcaggcaggcgatgggtctggtagcgaggggcctggggggctggatgtcttcagaggggtcttctgggaagggcagcccaggcagggagcccttcttaccctgtgtgctgccagggggtctgctggctttcaagggtgtgttcgaagtgccccctgcccccgaccctgcctggtctgctcctgtgggccgacactggtcctagggaagccaagctcagggttcatcggtgcctgcactgccctctgctgtcacctctttggagggagacccaaggaagtgtgtgggtctgtgctagggtctggggagggaggctgagagcactttgttctttaatggttggagagggagggcaggcaggagatgacagagcacaagggactcgtgttaaggtgtgactgtccgtctgatttcgaaaggacgttaaataggttgctaccttctgaaataaaaggggagtggaggtaggacaggatttctattttagaaggcgacagtgcagcagagccatagcccatgaacgcattcaagatgaggggagacttggggctctttttttttttttttttttttttttttttgggagacggagttttactcttgttgcccaggctggagtgcagtggtgcaatctcggctcaccgcaacctccgcctcctgggttcaagcgattctcctgcctcagcctcccaagtagctgggattacaggcatgtgccaccacacctgtctaattttttgtatttttagtagagacagggtttctccaagttggtcagcctggtcttgaactcccaacctcaggtgatccacctgccttggcctcccaaagtgctggcattacaggcgtgagccaccacgcccggcctgggacttggggttcttaaaaaggctggagaagcaacctgggagaggaacattcttttttttttttttgagatggagtctagctctgtcacctgggctggagtgcagtggcacgatctcggcccactgcaacctccgcctcccgggttcaaacaattttcctgcctcaagcctcccgagtagttgggactacaggcgtgcgccactatacccagctaatttttgtatttttagtagagaccaggtttcgccatgttggttggccaggatggtttcgatttcttgaccttgtgatcctcccgccttggcctcccaaagtgctgggattacaggcgttgagccaccgtgcccggcctgggagaggaactttctttggttgtaaatctgtagcataaatgggggctgtagttgaagttatgccccagtgacacgagggccagttgaggacaggctgctgccaggagcggggttgctctggagtttatgaaacctttgtgaagaggttgacgggtctcaaagctaggttgggactaccagggttagaggatgtgattgaagagggcctgggggaagggatgcagagcccaaccctggtctcgcctggagagttgggtggtcccagggctgctctccggtagctggggtgctgcttacctgaatggaaattcctgggaagatgctgggtcccagagtccaacaggtaatttgcagtcacccagaaaaggcactggttcaagtcagcaaatgcgtacaaactgccagtcttttagtaacaaggaagacctagtgctaccccttggccaacagccaagcccaagcttaccaagctcatgtcacagcagggtgaaaacacgtcatagaggggtcagggagttaggagctaggagcattgtaggtaggttggcaactacagcccaagagccaggagccaagaatagtggtttttttttgttttttttttttttttgagacagagtctcgctctatcacccaggctggagtgcagtggcgcgatctcggctcactgcaacctccgcctcccgggttcaagcagttctgcctcagcctcccgagtagctgggattataggcgcccaccaccacgcccatctaatttttgtatttttagtagagatggggttgtaccatgttggccaggctggtctcaaactcctgacctcaagtgggcaacccgccccggcctccgaaagtgctgggattacaggtgtgagccaccgcgacaggcatggttcttaatggttgaaaaaaaaaatgattttgggacgtgtgaaagttatctgaaattcagacttaagtgttcataaataaaggtttgtgggtccaggtgtgatggtgcatgcctgtaatccagcagtttgggaggctaaagccaggagcaacatagtgaaactcccatctctacaaataatgataaaacagccaggcatggtggtgcgtgcctatagtcccagcttctccggaggctgaggtgggaggatcacctgatcctggcaggttgaggctgcagtgagctgtgatcgtgccactgcactccagcctgggtgacagggcaagatgctgtctcaaaaaaaatttgagtgaagtagttgtgtcagagactgtagcctgcaaagctcaaaatatttgctgtctggtcctcacagaaaacattctccaaggctctgagttagtttctaagatttgtgaggtgatgatgtgggatgtcattcccagtggcctctgggagtcatgtattagaaggaatagaatccttagtgtctattaaaagatcatatttcatgaagttcagtagaggcagaaagaaaaaaaaggtaagcaccaaaccacagagacaaaagactggggaagattcatcgggcagaaggtagctgcagtcttgtggggttgtccccgtggacccagggtcccgcgtgggtagtagtcagttctctgcgccctcacgtgtgcagctgaagccattctcttgcttacttacgccggtcaagccctgtctagaattcagactgaagaagccagagaaaaatctccatagtgggtcaagcaaaagaatttgggtggagacatgtctttcatccaacagtgtcgtggaaggacagcttgctggtgcaccttgaatgcaggaaaaaatgtttagagagacaggaagagttgtggtgaggagggaagggctttagagagggatgggattgttagcgtccttcagggttgcttggttataggtttccctggttctctttatgtctgagggttttgtggacaggctgtggaaggatggatcctcttgctgtttcagaatgggctttgctggctggtcctgtgcacttgctgacctcaggtctctgcctctgtttcaggcatcattcacgctagaggactggttcgggagtgcttggcagaaacggaacggaatgccagatcctagctgccttgttggttttgaaggatttccatctttttacaagatgagaagttacagttcatctcccctgttcagatgaaacccttgttttcaaaatggttacagtttcgtttttcctcccatggttcacttggctctgaacctacagtctcaaagattgagaaaagattttgcagttaattaggatttgcattttaagtagttaggaactgcccaggttttttttgttttttaagcattgatttaaaagatgcacggaaagttatcttacagcaaactgtagtttgcctccaagacaccattgtctccctttaatcttctcttttgtatacatttgttacccatggtgttctttgttccttttcataagctaataccactgtagggattttgttttgaacgcatattgacagcacgctttacttagtagccggttcccatttgccatacaatgtaggttctgcttaatgtaacttcttttttgcttaagcatttgcatgactattagtgcttcaaagtcaatttttaaaaatgcacaagttataaatacagaagaaagagcaacccaccaaacctaacaaggacccccgaacactttcatactaagactgtaagtagatctcagttctgcgtttattgtaagttgataaaaacatctggaagaaaatgactaaaactgtttgcatctttgtatgtatttattacttgatgtaataaagcttattttcattaacaatttgtattaaaatgtgggttccttgaattctt

SEQ ID NO: 124 - DNA, 13612 bp, Homo sapiens
  source 1..13612: mol_type = other DNA
cggagcttaggcggcggtggctgagaaggcagcggggcggcggcggcggcggcggcggcggctgtggaggccgcagtccgggtcctggcttcggcctcagccccaccatggtgacgcttgctgaactgctggtgcttctggccgctctcctggccacggtctcgggctatttcgttagcatcgacgcccatgctgaagagtgcttctttgagcgggtcacctcgggcaccaagatgggcctcatcttcgaggtggcggagggcggcttcctggacatcgacgtggaggtgcgggctagctgcccgcagctgaggcttggtcgcgtggccactcggggattggtggcacctgggaccggcgcggggcctgtgtggggagtgggcttggaagtcgctgtccgagtcctggagaagcccaggccgccaccccccgccccgccccggccacggcgacctcctaacggccccttttcccgcgacttgcctgggttccgggatcccttgggggctccttcggcatgcttggttgctttgggttttctccttgaacgacgggttcctgttggaacctctcgctgagctttgtgaatcaggcgccgcgtgtcagtccgggccccaaaggcgcttctcagtcacagttagctggtggcgggtctctatccagttagcacctgccttctttcgtgttacggattaatgctggaacgtggcacggaaacttttccaaaaaattgattaaaatcgattgaggattaaaaacctattgagtgctaggcatactttcgcgttgtgtttatttttcatagaagcaaccttaaggttctactctttacgcctccagctacctcgtttagtctcttctgccaaggagagatggggagttgggtcatgcgttttaggagtaagcagtgcagtgaagtatcaggagaagacaggagtttaagaaaccagcagtccctaaatctccactcatgttttgtaaaccaaaagaatgatgtgttgctagtttttattttaattcacctgctagcatgattaattgggtctaaggagtttccatttgacagtgtactcagtagggctgggcacaagttacacaatacaagtgaaatccaaaaataaggggataacggaagggagagactcttacacttagctaagaatttagcgatcaactattacagtctcgaagttatgcaagtgacatgcactttgaaagagcgactgacttgatcacagcctaacagctgatttgtagcagactgggatgagagtttgggtcttctcatttccaggctagtcctttcccctaagccttcaggcatctcagataaagcagaattccttcactgtttggcagtaatctggaaaaccttgaaatgtgataaaaattcatcttgtttatattttaaaaaaccacaaacgtttattacctcatggtttctgtggccaggaattatggagaggcttagctgggtggttctggcttggagtatctcatgaggttgcaatcaagatgtcaaccagggatgcagaaattctttattttaaagagatttcttttttcttgagttttgctatcagtcacagttccatgtttgttggtgatattaggccagttagagaccacatttaaggtgagctttctgtttctgaggggtttaataaggataaataagacataaatgtcaggacctaaaggtgttttagaaagccatgaagtcaactcttattttataaagtgggagaattgcagcccaaaatggttattatcacttaccgaagtgaagctaagtgaaagttacatattcttggtgaatttcttttttttttttttttttggaccaagtctcgctctgtcgcccaggctggagtgcagtggcacgatctcgactcactgcaacctctgcctcccgggttcaagcgattttcctgcctcagcctcctgagtagctgggaatacaggcgtgcgccaccatgcccggctaatttcgtgtttttagtagagacggagttttaccatgttggccaggctggtcttgaactcctgacctcaagtgatctgcctgccttggcctcccaaagtgctgtgattacaggcgtgagccaccatgcccagccatattcttggtgaatttcttactgccattagacattacttataaagtctatgacttaatcttttgtgacattttatgcatttctctcttgcctccagattacaggaccagataacaaaggaatttacaaaggagacagagaatccagtgggaaatacacatttgctgctcacatggatggaacatacaaattttgttttagtaaccggatgtccaccatgactccaaaaatagtgatgttcaccattgatattggggaggctccaaaaggacaagatatggaaacagaaggtgagatgaacattcagaagatttacatcacattccaagagctaattttagttctatacatttttacctgtctgagtggagtacttattttttttaaatttcttaaccaaaacctttttgtgaaatacgctttttattttttgcaagtctcctaattaataaaaaagtttcttgaggctagtgtttgtttttttgttgttcttttttcttttatttatttattttaagattgtgtctcgctctttcgcccaggctggagttcagtagcgtgatcttggcttactgcaatctccgcctcctgggttcaagcgattctcccaagtagcgtcaggcgtatgccaccatgcccggctaatttttgtatttttggtagagacggggtttcaccatgttggccagggtggtctcaaactcctgacttcaggtgatccacctgcctcggccttctgaagtgctgggatttttttgttctttacatttgtcccttctaacagattttcttagtcattttgtgctcttgtgagcatgtaggttccatgtgtcttcagttattttttctgtttatttgctaatcctggcatatactttatttgctcatttgtatacatgactagtttagctaaactttttgttggttctttttgtgttaagatatcttaacttttctttaggtggtggagatacctgggatggtatgtggattgctttttgacagcatcctttttgcatctttttgtttgctaatgtctaatttctgctttcttttttctaacctcagtttgttggcatgagagtgtttttttctcttaaaaaacccctacaactaattggattgatattttttttggtggttttttatttcgttgacaggaggtataggttaggttattttaaactaatagcactgaaaacacagttgacattttagtagtaacatctttgttctttaagatgaatgctaaagagtggaaattcaatgataaggggacagaagtcccaattaaacatagctcatagcaaatggtgcctttgactttgtagaaagtcattttgtagacttcttaacctgaagcttagttggatatgaaatgcagttctaggagccatatgttgatatgaagacaagagttcttttagccatatgttgcagttagagtgttcattgctcaggttaccagtaataaaccctgattggttcttggtggttctggataaattgcttaccgggagccagcacatttggtggtgtttttttttgttttttttttccccacagtgcatgccagagtttttgaagctagtcattgtttcacacatttcatagtatactattagcgtggtaacatttctcccagatattcagtatcagtagagtgttaacatcataaagaagctgagttgtttggttggattttgaaatctatagaatttagagagtcctactacttagtaattcctgcactcatttttcagggccacttatagggtaggacttgactaattttcagggagaatgaggagttctgaaaggcttttttggtttattttctggagtttgatcctacttaaatagtttgaaaatgttggttgatgaatgtgaatattgaacttcttagataattttttaacatatatccaaaattcttgcttttgcttgttaatgtcagtgaatggcagctgtcaaatcaagccttcctctaaagcagtggttctcaagtgaggatgcccaggggatatttggcaatatctggaggtattttttattcggaagactgggggtaggtgctacaggcatctaggactggaggccatggaggctgctaaataccctatagtgcatcagatagcgccccacagcatagaaaagcatttggtccaaaatggagacaatgccactgctgagaaaccctgctctatcagttccatgtggtgcatggggcttccaaagggaaatttcgagtgagggacggtttgacattccaattcaactgccttcaatggtagaggcccttggtttctcctaagaaacttggggttgtctgcgagaatctggaatcccagaagagacccagtcttgggcagggatgaagagatccccctttcccaggaaggtttcctggtgctgtttctctcctgcctgtctgttcattctcataacgtggcactacctagaagcacatgcttactcttcagaacagtgccttgtgtgtatttttggttcaagagggatgcctggttgaaaacttgtgccgctaagggcttgtctctctacttacattgcctgctgttccccactatagtgaaactattactttgtcaaagaagaatgtttgagttggtgtggattttcctaagagcgttttaatgtttttctctgctcagctttatagagattaagagtctgttttggtgctgctcctgcttcttaattaatattagagttacatgactcttagactttatttgtaggattacattttaaaaatacaggtatttattttgtgctcttagtcccctctcctcagtgttttactacttttgctgtagttaatagtcagtatagtgaacttcacataacaacattccattagaagaaatttcctggggttgttttcctttccttagtaagcattatatagtatgtttcctaccctgaaagaggtttctctactgggaagggacttttaaaaatgctttgagaattaaattgacatgattcatatcagtagtccaaattgatgtttgaaccatttcaaaagtagcttcttttgcaggccttctctgaggattttgaaaagttattttatattattttatattttatatttattttataagtgtttttcaaaaagagattgccccagcctaggcaacatagcgagaccccgtctctaaaaaataaaaataaaatggtagtcaggcatagtgacgcacccctcaggaggctgaggcaggggattgcttgagcccaggaattttaggttacagtgagctataattgcaccactgtacttgagcctgggtgatagagtgagatcctgtcttgaaaaaaaaaaaagatggctgggtgcagtggctcacgcatgtaattccagcattttgggaggctcaagcaggtggatcacctgaggtcaggagttcaagaccagcctgaccaacatggtgaaaccccgtctctactaaaaatacaaaaattagctgggtgtggcagcgtgtgcctgtaatcccagctactctggaggctgaggcaggagaatcgcttcagcctgggaggcagaggttgcagtgagctgagattgagcaccactgcactccagcctgggcaacagagcgagactctgtctcaaaaaaaaaaaaaaaaagacattgacaaatgtgttttgttttcaaatccttctatagctcaccagaacaagctagaagaaatgatcaatgagctagcagtggcgatgacagctgtaaagcacgaacaggaatacatggaagtccgggagagaatacacagagccagtaagtgaatgccgtcactttgcagcagtgtctgatggtgaaggttgttttactcaacagcttgctcgtattttcctcatttggaaactttgcaaattttatgtgaaagcattgactttaaaagtgtacctacacgagatattttttgagcatacacatgtgtggagctttgtagtttattattgggacattcattgtaaactagaaaatgctattaagatttagtacaagtttttaagagtttagttttctggccgggcatggtggctcacgcctgtaatcccagcactttgggaggctgaggcaggcggatcacctgaggttgggagttcgagaccagcctggccaacatggtgaaacctcgtctctacaaaaaataaaaaaattagctgggtgtggtggcgtgcacctatagtcccagctactcgggaggctgaggcatgagaatcacttgaaccgggaggcagaggttgcagtgagctgagattgggccactgcactccagcctgggcaatggagctagactctgtctcagggaaaaaaaaaaaaaaaagtttgggtttttaaaaatgtatggtgagctaaggaataagctaattgttttcttaaatcagaagggaaaaatgttgtaaaatgcgtattgcattggtttttaatcacatacctgaaacttatgtaccagtgggattaatattagatgctgagatttaacctttttactaaaatggaaagcttaatatagttagactagaaaacaccaaaacatgagtacagggaagtcaccaggtgaagatcagtttgggtcctcaagtttgtaagttgggaatttggaatgtattttgctgtggaaacagtgatgattgaaatcttgtgttaggttgcaaaagtctgtttagaactggatagagcattaaaaatgaagcttttgcatttaaaattaagaggtactatattgacagacagaccaattccattgattaggttcagggccacaccattgttcagtgttttcatcctccaggtagttcttggggagatgaaaagagcaaggtggctgggggcagtggctcacgcctgtaatcctagcactttgggaggctgaggtgggcggatcacaaggtcaagagactgagaccatcctggccaacatggtgaaatcccacctctactaaaactacaaaaattagccgggcatggtggcacgcgcctgtagtcccagctactcaggaggctgaggcaggagaatcacttgaaccccggaggcggaggttgcagtgagctgatatcatgccattgcactccggcctggcgacagagcgagactctgtctgaaaaaaaaaaaggaaaaagagcaaggtatagtgacgcatctctgtagtcccagctactcaggaggctgaggcgggggattgcttgggagcaagctcttgtcttaagggcagtgattttatgtcaggaatctttgttctgagactggagtaggaagtgaagagtgactcaaagagataagcacagcttgaatttcttccagatgtgctttctgtttttcctacccttaaatctgttcttgctacttatggaaacaaatcttcaggatctagagcacagacatcagcttgtgttggcaggaaggtgtgtaaatgtaatagcctggagaactcccctcatccccacttgttttaggagtggagtggggcatattatggaccaaggcttgtctacaattactccagcctcttgcctcacaattttgtctccttgcctccactcttaatctcaccagctgggatcttcactttttctctcttatcttgttgggactcatatgttgtttaccttgttcccagatggggaaacagcccattctggagttggaagggcactgaactaactcagagggcaagttcctctactttgcaattttaactggttcagaccagatggctttcaagttatagaagttcttgggaacacagtggccagaggaagcacatgtcttccgtctttagggtgtccaaccttgttctctcacccatgatttgagtggagatactcctgtatttgtttcacaaatagtgagctatgtgttcatatttaaaagtgttagcaatttctagaattgagtttataggcattcagtttaaatttacaaagcaaatggttcccataatgttttgtttttgtgagtcttcctataggacccactcctcagcagtgaacataatgagatcctttcactacagtgttgtaataataatgtgttgcttctagatcaggctgatatatgagtggcatgaggacagtgtcccaggtcactacattctgatgttactgtgcttcaatgtgttctatttaaacttaaaggtgcatttttctttgggaggccgaggcaggtggatcacctgaggtcaggagtttgagaccagcctggccaacatggtgaaaccccgtctctactaaaaatgcaaaaattaggccgagcacagtggctcatgcctgtaatctcagcactttgggaggctgaggcaggcgaataacgaggtcagtagttcgagaccagcctggccaagagaacagcctggccaatatggtgaaaccccatctctactaaaaatacaaaaattagccaggcacatgtaatcccagctgcttgggaggctgagatcacttgaacccaggagttgcctaggctggtcttgaactcgtgggcttgagtgatccacctgcctctgcctttcaaagtgctgggattacaggcctgagccactgtgtctggcctattttctttttacagactctctggtttttgttgttttttttttagacggagtcttgctctgttgcccaggctggagtgcagtggtgctatctcagcccactgcaatctccacctcctgggttcaagcgattctcctgcctcagcctcctgagtagctgggactacaggcgcacgccaccaccaaattttgacgttgtaaataattgcattttggataactgtgattttgaaataattccttaattttttgtagaagtcagttttctgattcagcaaaatggatagtaatataggacgtttcaatggtgagggagaaagatggttggattgggtgttaaccctagaattatgaccttgggcaagtcaccttttcttctctgctccccgtatacaagcggaatggacttggctgtacccagtgaatctttaagcccagctaatttttgtatttttagtagacggggtttcaccacgttggccaggatggtttctatctcttcaccttgtgatccacccgccttggcctcccaaagtgctgggattacaggcgtgagccaccacgccaagccctattttctttttagagacacagggtcttactctgttgcccagcctgtagtgctgtgctgacaatacagctcactgcagcctcaacctcctgggctcaagtgatcctcccgcctcaacctcccaagtagctggaactacaggcatgtgccactacacctggctaattttttttttttttttttggtattgtagagactgggtttctccatattgcccagggttggcctctgactcctgagcaaaagcagtcctcctgtctcagcctcccaaagtcctgggattatagtgtaattgtttttaatgttggctatttgcagaaaaataaaacactacatagaatttttttttttttttgagatggagtctcgctctgttgcccaggcaggagtgcagtggtgcaaactcggctcactgcaagctccgcctcccaggttcacgccattctcctgcctcagcctctcgagtagttgggactacaggtgcctgccaccacgcctgggtaattttttttatttttagtagagacggggtttcactgtgttagccaggatggtctcgatctcctgacctcgtgatccacccgcctcgacctcacaaagtgctgggattacaggcatgagccactgtgcccagcctacatagtaattaaaagctaaggctatagaatttgactggagagttggacacaatggcttgtgcctgtagtcttagctgcttctgagcctgaggcaggaggattgtttgaggtcaggagcttgagaccaacctgggcaacacgagaccgtttttaaaaaaataaaataaattggccaggcgtgatggctcatgcctataatcccagcactttgggaggccgaggtgggtggatcacctgaggtcgggagttcgagaccagcctgactaacatggagaaaccgcatctctactaaaaatacaaaattagtcaggtatggtggtacatgtctgtaagctcagctacttgggaggctgaggcaggagaatcgcttgaacccaggaggtggaggttgcagtgagctgagatcgcgtcattgcactccagcctgggcaacaagagtgaaactctgtctcaaaacataaaaaataaaataataataataataaaatacatttaaaaataaaaagaatttggccaggcgtggtggctcatgcctataatcccagcactttgggaggccgaggcaggcagatcacctgaggttaagagttcaagaccagcctgaccaacatggtgaagccctatctctactaaaaatacaaaaattagccaggcatgggggtgtgcacgtgtaatcccagctactcaggagtctgagacaggagaatcacttgaacccaggaggcagaggttgcagtgagctgagattgcgccactgccctccagcctgggtgacagtgagactctgactcaaaaaaaagtaagtaaataaaaagaatttgatcagaaacttgaatgtaacaaatagagtatagtaaatatagagtaggtgtggattttactttaaggatcaaatccttagtttgagagcaggacagatgagcatagtttgtcttgtatttgatggtctggtagtaactgtcagtatggatccatataactgagtaacctcttccattgagaacaattgacaagtacacaggtgctcaacaaatatttgtaacatatttggggaaaaagacactcagactgccatattttgatgttgtaaataattgcattttggataactgtgattttgaaataattccttaatttttttagaagtcagttttctgattcagcaaattggatactaatacaggacgtttcaatggtgagggagaaagatggttgtattgggttttaaccctagaattatgaccttgggcaagtcacattttcttctctgctccccatatacaagcagaatggacttggctgtacccagtgaatctttaaggtttcttttaaaaatctttgcttctactttgggaggctgaggcaggaggatcagttgaggccaggagttcaagaccaacttgggcaacatagcaagaccctttctctacaaaaacagaaaaaattagtcaaatgggctggtgcatacctgtactcccagctactcaggaggctgaggtggcaggattgcttgagtacagttcaaggttgcagtgaactatgattgtgtcatggcattccagcctgggcaacagagcaaacaaaaaagtctttgctttggagtatgttgagttgcttggagacaaaagtatttagagtataggtgacccataggttacaatgacttcacttagaaattttcagctttatgatggtgcaaaagtgatgtgcattcagaagaaactgagcatcaagtacccatgcaaccattctgttttttactttcagtgcagtgttcactaacttgataaataaaatagaaaataataataaaatgcagtttaacgtgtatgagatacacaacactttattataaaataatctttgtgttgttagatgcttttgctcaactgtaggctaatgtaagtgttctgatcgtgttttacgtaggctaggctaagctatgatgtttgctaggttaggtgtattaaatatatttttgacttatgtattttcaacataagctgggtttattgggatgtaaccccatcgtaagttgaggaacatctattctatgagtggtgtacacaatattactttcacacagagtgaagactaaaatatttatgatgcctatgtctttttgggggagaattgttaaattttgtttgtttgttttgtcctcaacagtcaacgacaacacaaacagcagagtggtcctttggtccttctttgaagctcttgttctagttgccatgacattgggacagatctactacctgaagagattttttgaagtccggagagttgtttaaaaagcctcttcctgatgatcccaactcagaattcactgtttaccaaacaccttggtcataataatgtcattagtttctccatttttattttctgaactgtacattcacaacttatgtttctttgagattaatagatattgggggaaaaacgcctttttaggaaaattatagtgaaaatttgacagttgattggcataatttcttgtttgaatgctgcctccattatataggtccttccaggaactcaaacactgtaagtgaaatatgggagtatagtttttattatttcttcttttccttttgttttcataatataatgcagtttgttcaggaaatcagcacaaagcctgatagtactttactaaaatgactgcattctttggattccttcagtctatggttcaagtcactaaagattcatttttgttgagtccttatgagaaacagcagtatgaatcttgacggtttctgcccgtcctaatggcagagctctctgacttgggtgtatgctgccaggctgggtactttcatactttgttttcttgttttgctttaaaactacgactcagcatacattttcccacatacatttttacattgtaccttaggactcagtcatctccacttaaattgatgacacaagcagctaataaccatttctgggtttctgcctaaccccctaattgtctgttaaagccaattctctgggtgtcccagtgagtggtggctttttttctttccacattggcacattcacttctcccactcttggcatgtaagaaataagcatttacataattggaaaaatctggatttctgatgccaaagggttaaagcttcttggatttcatttcattgatatacagccactattttatttttgatcagtggcctttgggccactgttcagggtactgaccatcagtgtcagcattagggttttggtttttgtttcttttgggtctttcttttttggcacatgtgaatcttgttttgtgtaaaatgaaattactttctcttgttctctgatgatgggtttaaaattaaaagagcatccggttttggtatggggatgatccaggattatgttgtgactgatacatattagttacttgtgcttttttttttttttttggatctttgcaagggcaaaactacaagtaacgagttttatataattaatttaaatttgttacaggttttcatgttcaggataaaccatacttccaccttgggtgagaacacttgcaacagtttattaatgaggtgactttcaccttaggacaactgttgcatgccaagttttttgtgtgtgtgaaacacttcaaaactgatttaaaagatgtaaatttaaaattggttgtatctaatatgccccaggttcggtaaataaacaattctttttaaaaaca

SEQ ID NO: 125 - DNA, 32742 bp, Homo sapiens
  source 1..32742: mol_type = other DNA
cgctgtcccccggaggcgtctgggtgtgcggagcgcgcgcgcgcgcggctcggaggcgcacctgtgaggtgtccctgaggagagggaggtgggtgcgcggcgcccgcggcctggggcgctgactcccctcacttggagtgagttctcggcggccgggctgcagtctttctttctttcccggagggaggcgggggccgggggccagggagcgggctgggggtgggaaggaggtggagtggcttaaagaaaagaaaaacaacccatcccggaggatgggcctcgggatggcggggaaggtcagagcggctccgcgcagcctggcgggtcccgggctgagaagccgcccctcgggcctcgggcggtcggccgcgggcccgcagtgcgggggagcggggccggggggcgcagatggcggccggtgcgagcgagggctgggcagcgggcagggcgaggccgggcgaggcccctcgggagccggactcccgagccaggctccattgttgttggagccgagggaagggggagcgctgccgccctcgtcgcccgtggagccgcgtcttggagcccttccaggcgggtcccgggagaggcggtcatggccgcgccaggggaccggggagccgggcggctgcggaggagccggctgcatggggtgctgtgtgtttttcagggcgccctgcgtccggcagaggaggcgagcatcccgctcaggtgatgaggaacccctcgcgcacccagcgcagaaggctgctgccgccggacgcctccattgtttgaccacaacaagggccggattctcacccaggtaaaccggctgccggcgctgtccacttccctctgactcccgcctccgcaggcgttctcaccccttccaggactcgactgcagttttctcactgtccccggcttctcatgaactccgtataccccctcccagacattttcccgtccggatccatctctccgccacatcacctctcatttcccccagaactcagctcctttgtgaaacctttcttgccgaactctaacaactaaatctccccgggagcctgctccgaactgaactgttctggttgctagattgcttacgggctgtcttattgcaacaaaggagaccagataccgaaaaaagatttctgagctattgccttcttcaaggaacgttttctgatatttacagtttattgttttcacaggctggaacggtttttaggcattttggcttcttatttagagagggctcctatttccttcatagacgcatagttttttagagcaggaaattgaccttgttcaacccgcaggttaattaaaaatttaaaaattaattctaaattagcagagtagtacattttctttgtaaaaacagcatatcacagagatggcattttgtctttgactatcaacctctgtcttcagggatgccgactattatgtgtgtggtgtttatccttctagatcttttggagtacttttacgtgtgtgcacttaacatcatttttgactgctttaacaaggactgttgcaccgtaactttcaatgttagcatgtaatgcttcaagtcattttttaacaactgctgcaccatgttccatagtttcagtatatcatggtttagccatttcccaaattgatagcagtttaagttttaactttaaaacagcttttttgctggtggtggttctctgatgagatgaaatttcggtgataggagcacagatctacgctaattatcgagattcggcatttatgatgaagttctcttttggttaagaaattgatatgtggaagcagccacccctcccctatggtagttctgactctagcagttagaagttgtgtgaccttggggaggacattgaatcacaccaaacctcggttttcttttctgtaaatggcctgctctgtctgctccatagagttcagtgatacagtgcgtatgtgttgtggaatgtaaagtagtatatataaaggttggttttattagcctttgtgatccaaaaattatttgcaatatcatttatattttttgaccagatgtgtgtgtatcatatcacagagcactacagatagtcaactttgaatgctttttaatttgtgactttttaaattaatttttatcaagtactgacaatacattagtcttcttaacaatattttgcaaagcattttttcctagggctttcttttcttcctcttcattaaaaaaaaaaaaaaagagagagagatagggtctctttctgttgccgtggctggagtgtagtggcatgattctagttcactgcagcctgggactcctgggctcaagtgatccttgtgcctcagcctccccagtagttaggaatgactacaaccatgtgccaccacacctggctgatttattttatttttgtaatgacaggctcttactatcttgccccaactggtctcaaactcctggcctaaagcagtcctcccaaagtgttgggattacaggtgtgagccactgtgcccagcccctagtggttttacataccttaaaaaataaggcatataaattagttgactgtgaataaacatattagcaaactgaacactagacaatactcgcactataatatttaagcttatttccttagagttgtaagttgtacatgtatttttctgtggcagcagcagattcagattagcttttatgtccttcagggaaaagggattgttactaaatttgcaggctgcatcagagttttaatattgagatttaatattttaatcatttgaataatgattgaatgatgtgatgggtaacattttaagatgtatgagatacgattaggggctttttatgtatttttctttctttcagatatatatgagtgcctgtagtgtggccagcaaaatcaacttattttgttctcttgaagcttatgatttgtgagggggattggaatttaaacacaatcacaactacacgtatgatcacaaactggtatctgctgtgaaagttaagaagcacctgctatgagggagtataaaaaaggggagaccaaattttagagtggagagaaggggcctaggaaagacttttctgtataaataagatttaagctgagatttgaagagtgcgtaggtgttagtgtggaggaaagtgggggataattttccaggcagaggaacagcatgtgggaaggcctcaaagtggggaaaaagctttgcccattccaggaactgaaagaatgaatgtggatagactatggaggtgaaggggaagagtggctaggccaggggccagatcaagtagggtcatgtagggcaggttaaagtggttgtattttatcccgagtgaaatgggaaaccatgatatgggttgggatttacgaagaggagtgacataatcagatttgtatctttaaacagccactctagtcgttgcatgcaagatgtgggggcgtgttgggggtggagagtagaagtggggagaccaggttggccatctcagagggctgcctggaagagacgtgagctttcccttggaattcacattgacctcacgttaccagctacactaaggtcaaatcaatgtttgattaaaaaaaaaaaagatcctggccatgcacagtggctcacacctgtaatcccagcactttgggaggcaggtggatcatgaggtcaggagaccgagaccatcctggctaacacggtgaaaccctgtctctactaaaaatacaaaaaattagctgggcgtggtggcaggcacccgtattcccagctactcgggaggctgaggcaggagaatggcgtgaacccgggaggtggagcttgcagtgagcggagatcatgccactgcactccagcctgggcaacagagggagactgtctcacaaaacaaacaaaacccccacaaatccttgtttctaatttttaagaagtggggataaataaaagcaataaaaaggtacttggtatgcaaaaagtacacataaatgttaaactagttgtctatacttaaaagtatcagagagtcaaattaaaaattgggacattatttaacaaggtttgtatgttttgacaaagcggtaatatgtgagataggagtgaagtgaggctctaaaatgaagggaaatatttgtagatgctattgactatgaaaacaataacaaaaattattagacaaaaaaattgatggagtgaccatgtattagtatatgtataaaattaatagctttctgaataccagaaataacctactagaacctaaaatggccaaaaaaaaaaaaaaaaaaccctaaacaagaaactggctctgaccaggttgcagcaaaacaagtgaaccgtgtaggcacaaccttatagagtcaagtgtgcactctgtggaggagaccataaagtatcctgaaaggtctgaaggggtaccttgaacggaaagagaggccatcttccgggctgtgatgtctgcatgttatggagatgctcattttggggtgaacgtggtagaatacttatgagtaatgaggtgagacaaatatatttaaacatattatagagccacattcattaaaacagtatcgttctggctgtaaaatatccatacaggtcaatggaacttattcagcaccccagaaataaacttttttatatggaaatgtcataaataataatgaaatcatcacaaatgccccctgagtctaaagaaaatgtaagtaaatattaaacatctggaaagaggagttttacatgctaaggtggatggagcacatgctttagactcagatgtgtctaaactggaatcttttaagtgaggaaaattatccccactttgcaggtgttatgagagtaagagataaagggccaggcacctacagggcactcaaatctgtaagtagctgctgctattagaaacaatagagaaaataataattaaaaattagtgtattagactacataaaaatttattctttaggaagagaagggaaaaaaaaaacccgaatcataaagtggaaaatatttgtggcaaatgataagctaagagttagtattttcaatatgcaaagaactcatccaaattggtgaagaaaataatgaagatccacacacaggtggttataggatgtgaatagacagttcgctggatagaaatataacttgtgaaacattggaaaagctgtgtaattcattaataatcaaatcactaattaccgtatagaaaagttagattctgttctgaatagcagcaaaactagaaaacatttacaagtaagacataaatgtaccaaagctttatgaagagaagtaaaaacttttacctaaatgatttaaaagctaacctaaataaatgggcagacttgttcctggaggggaaggcatcattgtagattgcagtacctccaaattaaactatgatttcaatgtaattacaattgaaatcccagtgggaattcttctggacactagataaattgcttctaaaactcttttataggagtaaatgtcctagaatggccaaaaaatgacaaacgtttttaatggaaaagtagtgttgggggatttgctatatgagaagtcaaagcatactgaaatgctgcagtaatataaatggtgaacacaagaatagacagattgacgcctggagcaaagtagaatccagtaacagacccatttttatatcagaatttagtatatgataaagttggtgttttgcaacagttgggaaattataattcagtgtgttgtatagggataagtggctctttatttagaaagaaagatcctacttcacattcaaaataacttagatggattaaggaactaactaaaaaaacctataaaagcattagaaggaaatataagagaatttgttatgtagaaggatacactggaaatgatgtgttttaggtaggccatttaggtaagaccaagacctaaaatcataaatgaaaggattgataaatttgactataatcacagttgataattctgtgacaaaaagcgttacagagtgacagactgggaaaacaacctgtagcatgtataaagaataaatagaattaacaaattaggtaatgaattgaggatatgaatagttcttagataaatgtgttcaaacagtgaagagaaattcaacctcattgtgattaagagaatggaaatttaaaaactagatttttttgttgggaggagggcatcaggcaaaaattaaaaactatccagcgatgtaaaagaggcacctaatacattgttgggacataaaatttttccaagtttttagatggcaattttggcagaattttatcaaaataaaagtacacgttgatttagcagctacacttcaaggaatctgtgctattttcataggagaacatacgttaatataaacaatgtctattgcagcgtcatttataatgaaaaattgaagataatcacaataaattttggtacccatatactgtggaatatcaagtagcgttttgttttttgtgggattttttgtttgttttgttttgagacagggtcttgctctgttgcctaggctggagtgcagtggtacggaatgtggttcagtgtagcctcagcctcctgggctcaagtgatctgcctcagcctctcaagtagctgggaccacacacacacacacacaccactacacctggctgatttttaaattttttttgtagagacggagtctcaccacgttacccaggccagtcttgaactcctggcctcaagtgatcctcccgccttggcctcccaaagtgttgggattacaggcatgagccaccatgtctagcctattagttttttatatagagaggtagatttgtatgtactgacatagcctgtatggatgtctagaatatactgttgagccaaaaaagcaagcttaatctcattttttgtaagatacaaaacaaaataatgaagggtgagtgtgtgtatatatatatattctgaataagaattagaaaaagactagaatacctgaaaacatttaattctgattacttcatgggaaaagcctaggggagactggtttttcatatcacatgtgtttgcattgcttcagttttttttacaatgggcatttacttttgtaaggaagatgttacaatttctcaccaatttcatgaaggtctagatttagacaaaaatatacagtgcctagtacctaaaaggatgtggtaaaaatgacacactcttatgttacattggccatatgtgtcaagagtcttaaaattatttacatttcttgatggtctaggaaccatcaaaagaatatttttaaatacagagaaaagctttctgcacaaaatatgtatattgtagaattatatttatgggcacagtttgcagaatggttatgatacatcccctatatcatatatttagtggcaaataacattgccattaaaaacgtttatgaagaaaatatattaaaatgcttatgatagtgttaagtggaaggaaatcaggatacacaattgtatacctgatatgatgaaaacgccccaaaaaaagtcccagcagccttccagtaaaacctatgaatggcaaaaatatgtagaagaaattagatggaaatcttaagaattgtggaattcggtaggatgtcgggtgatttaaataatcttttttgtatttgccaagattacatgtacctgtattacatgtatgatggaacatttgatttaacaaagtatatctgggacatgatagctacatggcaaatagacatgagcacttttttttttggttaaagccaatgaataaatttggaatttacactgaaaatgattgggacccattgaaaacttgtgagtagggtaagaacaatccattttgcattttagaaggttacattagagtagataatggattagagggaagcaagactggaggcttttgtagaattccagggaagatgatggtggcttgagttaagttgagacaatgcaggtacacagtggagagtttccagaggtatttggaagagagtggctagacctttgtgatggggggaagtcaatgatattgacttgggcaattgaggggagagtggactcatttactatagttgggaattggctatggtttgaatatttgtcccctccaaaactcatgttgaaacttaatccccaatgtgacagtgttgagaggtggggcctttcagaggtttggctcatgagggcagagccattcatagattaatgggttgtcatgggaggggacctgggggctttataaaaagaaaagagatctgagacagcatgttaacatgctcagccccctctcatcgtgtgatgccctgtgccggctcagggctctttggagagtccccaccagcaggagagctgtcaccagatgtggtcctgggctttttcagcctccataactgtaagagataaatttcttcataaattatccagtttcaggtattctcttgtaagcaatagaaaacagattaagacaggaatatagtaggctttggtgaggaagtgactgattcagttttggatgtacttgagtttgaaggtcttataggacacataggtgtgtcacgaagaggatttacaaagaataattttacagtacacatgttttgctgtaagaatgactagatactatacatagctatggtattaaaatcaatatttctacatggtaaatttttcttgcaatatagttgtacttctgtaaattggggcatatctgtctagatagactggaccattgatatttttcacatagaattatttgagactgcatgacctcgacttcagataataccatgattgtctttggggttcattgggtagactcttgcctctctgagtgggtggtggaggttcctctgggcattagtggtccttttgtcagtcatcctgttgtcagagtacacctgacttctgggagtgatttctcttcatcttggtaaactggtcccttccacgtaggggcaggccaggaaataggcagagtggtgccctttcatccatgtgtgagtgcccacctggctgttaatagtatggctggagcatgggtaccttgaaggacaagtggagaaaaggtagcggagaaagtgcctgccaaggtaacagaagtcattagagaggaaggtagatgtcttcatcagaggttggggcccagtcgctgggaagttggtggcagtcagtgtggctgtgctctttgccttcatctcccaggcttctcctgctcactgtgtgtctgccctatgcttctatgtgtgcctgccctccccctaatctcttctctcgcttggcagtaaataacacgtgaccccaggtggtcactctggaaggccattctgaaactctaacttctgccagctcacatcacagacccagtctttccacttcccacttcccaattccaaattctctagaaggacaatctgattggcttagcttgggttccacgctcaccgtatcggttttactgttgcagcgcttacaggagcagattcatttagtgtgagcctggtggactggctagaagggagtgcagacgaggacactcaggagagacgtcctggaagttagaaagtttcaagaatggacaggagcagtagtttcaaacggcctagagatgtaataaagggatcaggagtgaatcttagatttagcaaattgaagtctttcagcccaggttgaaagttgtgtctactgggcatggtggctcatgcctgtaatcccagcactttgaggggccaaggcaggcagatggcttgaggctgggagtttgagaccagcctgggcaacatggcaaaaccccgtctctaccaaaaatacaaaaattagccaggcatggtggcacacacctgtggttccagctacttaagaggctgaggtgggagcatcactggaaggcagggctgtagtgagccatgatcacgccactgtactccagcctgggtgacagagcgagaccctgtctcaaaaaaataaaaaaagaaagcaagcaagttgtgctacagctaatccatgtgggagagtcacaaggtggaaccaatggctatgattactcatttgtaagacactgaaagaagagaatttttaaaatacaatttaattttgaagatgtagcagaagcattcaaaatgtaattttaaaaatataattcgtattgctttttaacgctaaaacatttctacacctttattctgattctgaaatacacagtgtctcttgtgtcacttgatacattataagaaattcagtaaagctattctagaactcatttatttttcatacccctgaaagttcataaaataatcataggttatttccatatcttattttgcagtgtgttctatgatattgtgacagagcttgtgaggaagcctttatagccagagcagacccctgtcccaaagatgatgaactctgccacttaggttaacaatacaacagttcatagaaataattggaaccatttttcttctgcagagtaaatcctgtatgtccctctggctttcaaaatatcacttttggatgtgtagttcaaatatgtttaggattgagcctgatgggggtttaagaatatttcattgattcaaagtactcggtgttggctagaaaacatgtcaagtttctcagttaaccgatgttcaataaattacttttaatactataactttacattgtgataggactaggaccttgtggtaagcctccagactcacagttagaatcagagaacctgcacaaagcgggttgcatgcattttcatgatgcttggcaactagaggtagtaacccattgtgacattgatttcaagtcctaactccttagtgtgaagagccgaggtttctgagcaggtgtttgagtgccctctggaggccttgtgaacagttgaaatgtggactcctagcaaagctttctttcacagccagagttgagaaccagtgggcgagatggttgaaactggtgtggatgttaggagcagaggagaggggagatggaactcatgggaatgaactagtgtttacaagagcttgcccggccaactgataatactgggtttatgcagtgagtgtagaacacagaggccgtagggtcacagaaggagccaagggagtgtggccagtaatgtccagtgggataaagaacaaaaagtgcccttggattggccaagagaaggccgacaatgagagaggaacctcggtggtgtggtgttggattgaggcatgagtgggaagtgaagcaatagaaatctggaaaaatcagtctttaagaggtctggatggggaaatggagggtggggccagggagacagggtagctagagaaggcctgggattaaatgctgtttttccttaaggttgggggagacttctgcattgtgtttaaatgctgaagggaagaaacaagcacagaaagaaaacagttgaaaggggtgtgggggccggggaggaggagagagttggtttcaaagttctttgcctgggagatctgttgagggaagaagttgccttttatagggactttgagtttgtcaaagtagtgattttcagtttatcgtgggatgatggggaaataattctagtaggcagttggagatacaggtaagaagaaaagactgtgttaagaaactgtggcatcatcatcatggaaatggtcatcattccagccaagcaggtagttgagctaaaaaatggagacaggacatactgtatggaggactcctatatttaggcataggcatgtgagatggcagacacaatcagcaaggccagaggaaaagtgagaatgtgcagggaactgggagccgaggagaccgtagactaggattcagggtgaggcaggaggaacggccccaagatttgactctgagagcagttttgtagtgggggtgggggtacagaatggtgtgtgggaggtgcacacagaaggtattatagatgctgtggaggagctcagtagtgaaagtgagaagagtgaattggtcttagtcgggggatggctccagagaacacatgtcacttatctgtgcatatgaaattagagctgtaatcaacaatgactctagaaaggattatttttgcttttttgtttttaacaccatcatctcagaatataagatctaagtttcatgtaacttttgtgccacttcctactcttctcagattgagaatctgaccagaaggaagaaaatgtctaggtctattcatgacatttgagggagttcttgcaggagagagtaaatgtgactgatttttgatttactattctgacacacgtcaaatgttaaatcctttaaatctatgagaccatttgctatcataaatgacattttaaaaaacttcttggtaaaactaatagtatggctaatagaagttatttggcttcacttatttaaaatatttcgttaagaaaagataacagattcctaatatcagaagtggtaaaataactgtgtttaaatctgggaggtgggatttgacctctcactttagactgagtgcccagtttgagcggccaggcgtacagtttaagcatacacttatccaaggggtggaatggcaggttccagcttaggcccaaacacgtccgctgctgtgggactggtgcgaagatctgtgaaggccttaagccattaaacttttggaggcctttactatgtcatatcaaacattaaatcacccatgtcccacataaaattagcttgtacaaaaccatatgagttaagctttgattggctatagacatttaacatttattaactttaattttgcaattttcttttcatgttttgcatccagtaatgttttttttcagatctgaaacatttacataggtcttcgagatgctcatgagccttagggactgtgcctatatacctagagataagacatcccagttctgctgggaagtggacattgggtatgtctaggcatgtctggcggggggctggagggggtgggcttgcccagaatctgtttgtttgtggcactgaggcacctcctgggaaaacttcatcttaagggggagttgaaggaagtgttttagttagggattttttgttgcaaagaacagagtttcattcagaccactttctgtacaaggggctatattggaggatgcatgtggatcagacccatgaggaactcaggctgtccagagacaagccacagtcttcccatggacagtgaggtctctcacggcatcactcatttctttgtgtctttctcctcttgctgccatctggcttgtttttccctcctctgtatgtcttttctaaccttttagctcctccttgcttatagattctacttcctcatgagtttggtttgctgtgatttgatgacctccgcagtcattttgcggatcataacctctcagcttcatctctcacagctgataacctcattctctcagtattgcttagattcctgagagagagggaatctgattttgttttgcttttattgttgttccaagccacatcatatgtcagagttaagctcttgggtcagatgtctgcacttggtctcagaagtggtcatgtggccgatggctgcctgggcctacccttaaagctgaagcagttcccattagtaggatttgtaggctagcaggcaccatgattggcatgtatagttcagtaagggaggaaaaaacctggcccaatatcaagaccacttgaaattcctccaaatgtattcctgccctttaaaatattatcctgctaacagctttcattctaagttgaacctttattcccacagagaaactaaaatagctaaatgtgttgaaagcattttcacttttccattttcttcctgttttattcagtctctgacagtgcagggccactcagcatagtctacaggactctatttctaatgttagtgatttctgctgaaaatgatatagcaacttcagatagctattagcaagatggatcattctaaccacatgcctttcacataatcctttcccccaaagctctggggagctgtagaggcatactgtaatccagcactgtccccagattgacaacagctagaaaaacatgtaaatgtcccatccacatgtagatacggcagcagtgtgaacctaagttccttaatatatcataactcccaggggaaagtgaagttccccaaacttaaagctagatcttgagatctatacctaaacttctctgaacaattatagaatatagcagaggcggggaggtagtagatggaataaataaaataatgataatgatagctttgttgagcccttgaaatttgccaggcagtgttttaagtacttctcatggattaattgatttaatccttaaattaccttatcagatcagctgcctttattatctccattaactcattcttaacctcctaggtgaaggttacacagcaggtatgcagtagggccaggacatgaactcacccagtctgactccagtttgtgcttcttcagtaccctgagagactggaaaatccgtgaaaaaacactattgattgtttattccctggcattttagccagtctgagtcagttatcttatacctatgaaccttaaactcattttggatctggttcccatcacgaggctaattgtgataatgggatacctatatcttggagggaagttgtgcagagtgcctggattttcctttctgtggtttctcagatttgctcatcccttctttggacctccatgccttgaatcccatatatttatataaatcccagatgtaaataggtctgtcctatcttctgagctgggaccccacgtttatagtagctagttcatgaaaacattttgtgatcctaaattctctataaataaacccatttttctctttgcatttctcccatccagcaggatcctaaggcctttgtagtccttcagccactgtgggccctgcctctgcctgttcttctggaatgtcttgggggttttgatcctgtcactgtggtaagttttccccttgtttcaccatttgtcctagatggagaatcccccttgagtattttaagccaaagctgtctctagaattttttctgagcatgtgccctttgggctcagtgaggaagcagctctccgtgcacgctcttcctgacctctcgcctttatctggcattggattccccagatcttggaccaccttccttactctaaagatgtcagaaacatttttgtccaactctttttgttccctgggatcttcattttcttctttccatgtgaaccattggttattaaaactttgtttcagttgtcccattttcttctgccatcttggaggccttacatggattctagatctcatgccaccctttgtctttttcttctgttgttcctatcctcaccgagctatcaaaactttttaaaagctcggttgctttgtaaatttctggtgttttttttttccccaacgtctgaataatagctttttccttaaatatgagttcctgaaaatcttcttacctgaggattatggtttcacattgatctgtgcagacttgattctgagtgtcattgtgttcccagcacaactatttttttactttgttttctctttggatttgttcttttttaaagatttttttttcccttctttggctcaactcaagaaggcaacatatataggacaggtatttgtttatctttatttggtcattgctgaaatccagaatactccagttgagcatacagtctagatctctgtgattcacagacatcatgaaattgtatgttatttccatgcatagctgggcaggaagagaaaggaaagcccttgtcttgatagctgctggcttctgggggcatgagcttcttgtcatttcccctgctgccagaggctggtttctcaggccctgggcttctgccttcccagacttcactttcccatgcaacaaggaggattggctgtgggaggtaaaggatattgtgttggcctctgtcctagtgggtctagtgactgtgcgttgttagaaggctaagcctatgtagatgtgtgatgtcttttctttttcctggctgtatgtggctagagtggtaaggctggggctgcccctgaacggaaaggtcttgaccacctctcttccttttctctcttttcccatgtgctggattggtttccaggtgactgacctatttagaagtgggggcaagtggaccctggcacaagggcaaatgttctctcttctctctctctttctggctgcattatctcctgtgctgatttgggtaacctcggccagtctttatcgtgagtggtaagaccaaagagtcatgtctaatattttatgaattccttttcattcccgtatgcgctttggtcccagtttaagattgccactaatgtagggaaaaggagttctccatgtgatccagcctaccttatggaatgctgcattggaaattggattcacaggcccagctaataatgaagtgttctgtattttcagttcagtcctgtgtacatgtccatctagggtacctagaagttaggggtgtttgctgagcccactggccagatttgctattagccattaataacatacattttcagaacagtactggatcaacctccagtgccagtcctacaagatcaaaagcctgaaggccagagttctgcataatttgttgtgaccattccctggccctctctgagagtatagtggcaataaatttctgtccatccatgcagatactgaattctattcttaggattctcatcatctctgttgatttttggctgtaagaggtcacctgctcttgcactttgtgcttcctgaatgagcctactcaaaaatctctctcccttgcttgctttggtttgccagacaatacatgttacgaattgtgacccaggtataaaaatagccagactcttgatgtacttaagaatagtcacattcatggagtcaagaaagtagaatggtggttactggggctgggggagaggtaaaaggggagttgttattgaatggggacagagtttgtgttgcaagatgaaaaagctctggagatctgtttcacaacagtgtgtatatatgtaacactactgaactgtgcacttaaaatggttaagatggtagattttatgttatgtgtttttttaccacaatttttaaaaatgcatacaaatgtcagaatcacaaatccataacttttgaccccctaactactgttgctactcctactgccagcatcattgagggcagtcttgctaattacccacttttcattttacctgttctccagggcccaacctgtcttccttcttttagttggctaggctggggcccctgtgaccttcaggtgttccttatacctcttcctgagggtggcttgagctttccggtctgttcttcttttcttctgggcctgagcatgaattttgtctctttaggtcttactaccacagtggaaggaggaaacaagtttagtaaatgagcactagagctaacctgaactaaacctctgtgcttccttttgtgttccctcccccagctagttcctgcctgacctcagatcagaaagaatcccctggccagttgtgaaagactggtcccttgagggagacaaatccagtagtcagccaaagggaaggataaggaagaggcagagtgcaggaaagtgggttttcttatgttctgttgttctttctgtgcgttgactctctctaggtatcctaattgtatcctgaggaaatcgtatttttttctgttacctcatcggtgttccttgttcctgaggaggcatgagtagagggtgagagtgagcatctccatgactcacagtggaacttctgtttcatagccgagtaaactgaggctggtgagaatcagtgactacagtcagacagctatttagtattaggtgaagattttgaacttaggccttttgggctgcaagtccagtgttctacccaccaaattattatgattcttagtgcatgtgtatgttacacatttactagttagataagataaacttaggccttgtatgtggggttcacgtaggggctatcactgaagctaatcattgtgtcccattactcaggtgtttctgtatatggggttgaacagcaggaaaaaaaagtagtggggtgcaaaccaggggaaaatctcactaaagtaatattttttaaaaagcaatcctgtgactagatagtcaagaagggaaaagttatgggtgggaacagggagcagcagacacataggtataaaggcagggtttcaccttgaatggaggaagaaccctaattacagggagattacatcatcaggtgtttggaagcctctgcctgtgaaatgacattcttggcaaatgaatgaatgtgtcatgcactaattaaaataaaggaaataaggaaactaacattcatttagcctcagctatgctgtgggcactctgataggtactttcatgtttattatctttaattaccgcagcaaagtattgtagacattattatccatacatttgcagctcgatcagatcagccacagtcacatagcaggtggcagagcagaggcctatacccagtgatgtcattccagaggtcattttgtgagaggacttggctgaaggaaagctacagaatggatgcctgtgtcatccttgatcaccctgataacacatgcacttatccttctcagactttcttctcagactcagcagaaaacttggcatcattcccttgataacttttgttgcccttctctggacctaatttcatagtctttgtggtaatttcttgttaaagaaaaatcagacacagcttcttttgtcttttatcttttctccattaggagtcattaggctaagtcatgcaaagacgaatttccgcaggacaaaatgaagcatatcttccctatagctcattaaaacccagagcccaaatcgttaagccattgaactttgtctgttgtgagagaaatcagggaacatagaactttggtgtgtagggtataaggaagtatgcggggcagtaaggaaaggggagaaggaggcgaggggcccaaacacctggggaccaagtaggaaagtggtctgagggtggagacgaggtcctaggagtgtctggaaggactgttgtcagtttctctcctagtgctcaggagtcaagctgagtcacaggcttttctagccagctggtggcagggctgtgcacaggagggcatcagaagtgatgtaaaatcctctcttttcagtctggagcagatttttaagtttgccctcattctggaaaggagaggagtataaccgggctgatatcctaaatttagttggagaatcctgctcagagtcagaacttcttttgaccaaactcaaaagctgacttcagaacccttggggaagttgttcctagtatcacagaggctgtagttattaacagcatgttcgggaaatgctggctgctacttgagccacaggtaagggagcgtttggattcctgtcagggcgtgtttccaggatgctgcatgaatgacagccaatggggcagagactgatgttcttttgaggagcccacttttagaggtcattctacttttcagaagtgcatgtactccagtgactacagcagaatgcattggtgcctgaactgacaggcctttgagtcaacagaacctggaatatctccgaggctgggctttgtggtgtggaggatttgaccacagagatttagacctgggaattatggctgtgcttgggctactctgagtgaaactcttctcctctcagttctgaccacctccaacctctagtaactgaactcggcccagaaagacaaagaaacccagattcacttctgtgagtgataagcacatctgagaaaaaaggcctggcagttggaccttccgaggtgctgtcggctggaggagatgaagtgtgagaagttgagtagctacaggccttagtggccacttaagagggtttggcgaagtcagagaaggaccctctttcagagactctgaaagtccattgtcaaggagagaggtctaggaccctacaaggtggagcttcactgtgacctgttatcattgaggtggccaagggcacatgcaggcactgtaatggggaaaagggccctggcttcttcaagagtggggaatgtgaagggcctctttgggacatgaatctgccttgggcagccagaatcttcaatttcagaactattgatgatggtggaagcaaaatagaagggatctgacattccacagtcctaatcagtgagttgccagtgactgccataattaagttattctaaggcaaatagttaagcaaagattaagtggacgagacctctgtaacttgagtatctaagtcttcctataccaagttatatgtattttagactacacttttctaaaggtgtagtagagactagtgaggaggtagatacaacatctgctgtgttcccatatacctgaggctcatggagagtggtggccttgaacagaacaaatgccctcttaacccggttcctttggcggtatgtacgtcctgatacctaaacaacgtttcctttaatttattttttgggtgtgtgccaaggcctgtagaaaaaggctgagcagaggttctcttggagttgttttatctgctgagacttgccaaattagaatttgatggctttgatttctgggacttcctgatcatttttgaggaggaggagttcctaactaagctggagggcacatactttctccacatgagtggggcacccatgatgtcagcgaggacagtgtcagatagatgcacagcccatcacccagaaactaaggtcttgtaagaataccttagtgaattgtgccagatggaataaattctgaatcctttataaagcatctctttgggagagttctttcttgtagtgtttaggtctcaatcctctcatgcacgaaacttcagaattattttggaggactttggggggcgtttttcttatatctagaagaggaatgtttggtgatggaaattactcactacacataagtggtcatcttacagtttgtttgcatactttcagtcttcaaaaaaagtgggtttaagatggattctcaacccctttttgtgtctggccttccttacactttaaaaaccatttttaaggactccagagaactttaagtttatgtgggttgcaggctttggtacttattgtaatagaaatgaagactaaagttttatgaagatacttactaactcatttatttaaaaatgataaactcattacatgctaacataaatgacatttttatgaaaaatagctattttctgaaacaaaacatttagtaggaagagtggcaatatttacattttggcaactctttaaatgtatggagtttaaataaaagacatctgcttctatattcagtctcttgcaatatgttgttttggttgaagtagatgaagaaatccggccttgcatagataatgtagttggaaaagggattttagtagccttttcagataattgtggctttatctgtgacatgacaccaaaacttgacaagtggtagatgcctacgggttagttgcaacgtacaatctgaaactgtattcatgaacttttcgtactctggtatgttaaaatcccttggtctctcttacactctgaatagatcttttacaaactgtgtgaccacatgttggtcatttggagccttcatggagtgcctacctagatgaacattaattagcgggaattgtactataaattgtgagaacatgttgagaaggaggatctagatcagtgggtgcttagctagtttattcaggaagggtttcagctggggcataactagggggcaaagaacatctgttacagtaaaggcaatgatgaaaatgtactatttgcatactcagtaatctgaggaggttgggattacaagcccattttacagacaggaagctggtgctcagacagttgagagcatgatctgagggtggtagggagaggtgttgagcatagagccgtggcccattgtgtgtttcatcacggtgttgtgcagctaagccccatcctctgctgagtagagctatgagtcaagtaggctttaaaaaaaatagtttacagacaaagaacattttcatattaagtgtgaggccgatcaggcacttgccaagaaccacatttagcctctgagtcaatgcttcacagactattgtgtgacctggggatcctgctaaaatgcaattctgatttggtaggtctaaggtggggctgaggttttgcatgtctgacaagctcccaggtgaggctgataacgctgctccatggctcagttttgggaatcaaatttccagagccagtttaccatttgttccttaatacatgatatgaatgttaatcccagtcactcaggctttggagaaggagaatggaggtgggcggagatgggtggtaactatgtaaaattctttgtcagttagggctgcctggtaatcagcaacagaaatggactctagctaatttaaggtaaaaatgaattttagaatggaaggggacgtggaggaacccagtagcgctggaggttcatagttgtaggaactgcttagatgtctgtcctgggtgctgtcactagcacatgtgaatgaactctaatttttaatgtcatctttgactcttcacaattcagagtacgtggagagaagactggctggctcaacagaggtctgttttgtaccccctgactggaccaggcactgtagtgagagggaagatctggggatcttgtccttcacaagggaggatagaagagcaccctgatttatcagcccattattgccgcatagagagggagaggtaatccctgaacaggaagttagagtgcagttaggaaagggaaaggaaagctcagcaggaaggctgacctgttgccaggctcctaagccatctttcagttaacagtgtgcattccctgtacttaccaggcaggtacattgaagaaagaaagtatgtattgagcttaagtactataataaatatgcattgttttatgcaattttcaaagcaaccttaagagatgcaagtataggtattattgaggaaatgagtcttggggttgaacaacttgcttgaggtcacacttagtaagtgggagagctgcaacttgaattacaaagtttctgctgcagtatcatttgttggcagaaactgctgctgcttggggtaaaaggttgcttcaagtgggctgagtgtgagcataagtggtggaagttggggagaatgtgtatggacacacagagctggagatgcataacaattcaagattttggagatagaatgctctgtaaaacaagctcaaatttagctgtgtctgttaagagcttcatggcctcaggaagggctttcagtctcttagctctaccagattatggctttgcctgtgatgggaaaggatacttccacggaatggaaatttaaggtgcgaaacccaaggagagcaggcaggaatggggaaaagtgttcatctggaaatcagacagagtggacagaatgtcgttgggggcgggctttataattgatgggtagcttttgcagtggccaattagattgcagggctctgtcctcattgcctggccagggagggaatgaagctcattcctgcattaccaggacaaagcccacttgtgtgtgatggacggaagtaggctgggtgccccatgttatatgtattatatacaaaacccccattcactctggctagtctaattgtgaagccactgctcaccccttccccaggctgccagccacagaagtatgtatgtgtcgttgactttttggtgtcagaggtgaagactgtagatactgtttgtggtttttttgtttccttgggagacagaagcaaagaataaaactcttgtaaaggaaaggaaaaataaagattttctatgaaatgtaatctcttaagtaaaaatatttaagtgaaatctgcaacttctttttttggacgtgattaaaggtgaaatgactccgggtttttagagctaaaagggcttgggtgaagtgtgaaataagcaccatccattcagcatcaccaaagaataaacaatgccccttgtgtacatagagcccagatggaggtaaggactgtgatggcaaaatttcactgagagcatgccacatcctccttgtagtttccttgggctgctgtaacaaagtaccacaagctgggaggcttaaaacaatagaaatttattgtctcacagttctggaggctggaattctggattaaggtggcagcagggccgtgctccctttgaaggctttacaggagaatcctttgcctcttcctagcttgtggtggttgctagtagtctttggcgttccttggcttgtagacatatcacttcactctctgcagtcatccccacgtggcctttttccctgtctgtgtgtgtgtctgactctccatgtcctctcttttataaggatagcaggcattggatttagggctcacactaacacattatgatgtcatcttaattacatctgcaaagaccctgtttccaaataaggtcacatcctgaggttctggatggatatgaattctggggagacactattcaacccagtatactttttgcctttcttccttagagctccagctaatccagatgcaacattgacgaattagtgccggaatgagtatcagcacttggtactgcaattagaacacggggatttggctgttgatttattttttgggctacactgggagggaggctcagagacggtgtgggtgtctgaaggaaaaaatacgtgttaagtgaagtgaggacttcaaacgaaatcatacagttttgggaaactgcattggatagggaatgctggagccaaagagtgttccctgttccagaaagggaggtaacatttgcaggagggcttctgaggtcagaagttcctcctagaagtgcagggtgtatcagccatctcaggagctgatttcctgtgcaactttttctaatacccccgggagcctttcttatactttatccctttgtatgtttatggatcaggtccttcccactcttcggcacctgtgacaggctccacaggcttccaacactttaaatgccttctgtttttcctaaaagatagagtcctgagcttacaggacttcataggaagacctgtaagtctctgttggtctttataggtggactactatctcctgggtgtcttgtaactgtaatgtttatattttttcagaaaaccctacagagatgccttggtcactccagataagagtttctgtggctgagaggccccactgtatgactcctgtttctgcctgctggacttcactttctggggcttggcatctgatgacctctgtatacatgctgtgcctcctgttctttatgtggccacttcactttgtcctttgggtttcagcttaaaagtagagtcaactagaaatcttcattaccatgctgagactagttaggatgcccctggctcatcagctgtaatgcctctgtcaaagctccactcaaacatgctagaaccatcgccttcccctcctcaactgtaaaccacagaaatgcagaggccctgtctgttttgttcatcagatcctccggagcatagcttactgcccaacagatgctgggtggtaaataaatgtggaatatgtgcctgtgtgtgtgcagctctgaccctgtgcctcagaggtcagcttccaggactgttgcctcaataacacctctcttccaagtctgtgtcagggtgggctggcttctctcattgtcacttatctatgtcaaataatcaacatgtgttagaggactagggatatagggatctttctataaaacccttcccattaattaagggaccaagaagttaatgtggatcctttatatgttatgattactggcttagtgcatcgtctcctgagccagggccctttgattatctttcttagagaatcttatccagcccctatgacacaattgcctgctgtatgcatgtggggagatgaatcacatggtcatctcaactcattgcagttggtagtggttatttttggtagggattggaggccgacatgtcatcttcccagttctttttcacttttatctttcccagaaagtgtgcccttatgctttgagtggcaaaattatataccacacattctgatagatctggttctgggtaggaaattaatttgatctctgttgaaattgattttactgtcagagtctgctattgaagagggggattatatatagttagtgcttcataggaagacctgtactcataatactgctgaaagatctgtgatacttacaggtttcttaaaatcagaacagttgtctcaaaaataagaaaataggtaattttcacttgacttttatgacaaagtaattgtatagttatttaaaaacgactttagatttttctgagccagcagtccgaatttcagataatgtattcaagataaaaaaagaaaagctcagtccagacatccagagaggagcggtgttgggctgaatcttaagtaggacatggacacttcttccatttataaaaggaagaaagggctagagtcgggcagtacatgtaccttgatagtttggctggaattggagggagttctctgatgggttctcccttttctgtgtggcatttggtttgaagagcagagctagctgcaggtcagacatagattgaacatggggaagggggcaatagccacatagcaagttggggtgaggtcacacaagcattcctgaggcttggaagacccagctgagggtatcactgtgaagaccttggtggtctatgattctgttagcatgtgaaggtagagatttggattgggataggggatgatttcctttagaaggaaggcccgtttgtcctttgacgattctcatttggcaaaaactcagttttgcagaaacttagctatctgccttccccatgcagcccctgaggaactgagccctgggccaaatccatgcccaccctcgatgctgctggcagtctccctacgtttcttgggtcatgccactctcccaccctccagacaaccatctcacaccacctctgttctcctcaaacctccaggctccccattgccctctccttctcagcagatggccttgcttcctgcttcccagcagccagggactgtcagtttctacttaaacacacacaccacttcctaccttcgcctgttcatagaggcccgtccttctcctctccagagctcattcctctcgtggagctttggatcctgtctccattggccctttctgttatttcttttctctcccatagtttagtggaattcctctcatttttatttcttccctgaacttttccttgaagtctaacatgcagattataaatagggctgtagtgtaatgaattttcacagctatgagttgagcacacctgtgtgccccagtgcccagataaagacagcacatgacaacgatccctagaaattccctcgtgcatctttctagtcattagcccctctgtctgctctgttgtgtaacagcatcagttgatttgcttgtttttcaactttatgtaagtggaatcattcagtatgtgctcttctacttggcttctttcaaactcagtcattaaatgttggtctcctgtagcttagtcccagggccctcttcccttttcaccctttgttggtaggcagtcttattccctccccctgtttaagttaccatctaaatgttaacggctcacacatgtataccttataaagtcctgatctcttatctcagtgccagttccatccatctagctgctgtccttgacatcgacttttggatatcatgagcatgtctaaaatggaaatcacaatctttgtcttcaaaccttggtctttctaaagttttctgtcttactgaatggctccatctccatccagttattcaaataaaagacctgggggtcatccttggcatttccttgtccctcacccattgtattgaatctgtcaccaagtctgatacatttttctctcatctccaccattgctttagtccagattatgatcattgtttccaacccaaatgactaagatgatcccctaccatgtttacccctaaatgctcttgctttctacccatcctttaatttctgtactttagctacagttttctatttaaaatggaaatctgatgttactaccaaattttaaaacaaaagctaaccgctctggaggcttccactgctactaagataaagatcacgatgcctagcttctaccctctcatctggcactgagcgtctccagccccgctggccctgttctgtcccgtgcttgcctcctgcccctcaccatggtcctccacgcatgcctttccctcgggtcatgtatcttctcttcaccctgcagaggcctcctctagatctgaggtcagccatcagttcaaagtggtctcccctgacctctgacccctgaccaggtcagcctcacttccagcccagcctgaggtgctcagagcactgtgcagggctgctttggagcatttcacatagatttatttgacatttctttgtggacaccttgatgaacattgtctccccactagactgcagcttgcactcggaaagggactggctatgattctgcactgctgaaggcacagaagctgacataggttagacactcagtaaacatttggtgcttgaatgactttggaagacaaagagatgaaggagttttagagattcacaaatttcataaattctctgcagtttctgctgatcaaggagcttgcattcaagagagcagggagaggagcacaacaaaggaagcatgtgcaaaaatgagcacaataattccaggcagtaagtggtaatgttctgtacaaaagttaaattaagcagaaagaggtggtcagaaaggtgtgagggcagagaggtaagtcagctgaaactgacaagcccgggagccgctttctaggaagacaacgcatgtgctgaggcctgggtgttgagcagatgccagctccctgaggaccaggaagaaactgggcagggggctcatgtgaaggtactgagggcacatgaggctggcaagcttgaagactagaaaggagatgagggaggctggtgtgtggtttgcagagagtgcaggaggtgaggttggaaggaggcggtggctgggccacctccagcttgtgagccagtgagaggatgtgtgttctaaagagcaatggaaggattaagcagggcagtgacgttctctaacttacatttttaaaagataagggtgactactggtagaggtccagttgtggaggagcaagaatgaaagccagagagacctgtggttgagaggctgttgaaatagtgcaggcaggaggtgaccgtggcctggatagggtggagcttgtagtggccatggagagatgcaagggcagggctgggttatgttgtggagaggaggtagagtgtgcagtgatttgcactggtggggctggaggaaagcagaattaaggacaatgcatctggatggatgttggtgtgcttgacagagatggggaagaatgaggaaggaacagtttgaggggagatttggtttggaaatgtggttgtagtgcctttcagcagagattatggagcagtccagggctagagataaaaatgggagccaacatctaaagagtattttagatcacgtgactggtgagattacttagagggtatagattcagaaaagaaatggtcccaagcaggagccctgaagcaccccaggatttagaagttgaacagaagagaggtcagcagtaaaaggaacaaggagtggctagtgaggggcagggacgggccagctaagaaagcaggtgtttccagccctgtcttggggccctgtcctgacagaggcaggacatgttgggaaagaaacatgttttcagtggcatgttgggaaagaaacccgcctgcaggggtggggctgtggtatccaaaacaattttaagaaggaagatactagaacatgtttgtatgagaatggacctatagctaggatggaattgacagtggcaatgagagggagtacttacaggattccatttggagaaggcccaggaagtgcactcatgggcacaagtggaagggctggtctttcctaggaacagggcaccccctgttggagtagaaggtgtgaatgcaggtggcctagtggatttgcagtaggaaaatgaagggcttgccatctaattgcatctttttttttttttttttgagacagagtcttgctctgtcgcccaggctggagtgcagtggcacgatctcagctcattgcaacctctgtctcccaggttcaagcgattctcctgcctcagcctctggagtagctgggattacaggtgcgtgccaccatgcccagctaatttttgtatttttagtagagacggggtttcaccatgttggtcaggctggtctcgaacacctgatgtcatgatccacctgccttggcctcccaaagtgacgggattacaagcgtgagccaatgcgcccagcctgcttctattttcttaatcagaaacaggctcttggcaggttatcagccacgagtgagggagtcagagggaagatgggagatttgaagagaaaggagaatgatgaagtagcaatttaaagtattgggaaaatgtgtgtactgaagacttttggaggaatttaggggcactccagtgcccatttgagatgtgtggtcgtgagttaaataaacctggcattattcagccacttgggtgcgtgtatggatagatggagagttgggtttgaataaggtgcggtgtcactgagagtaggtggggccagagagttctggtgagcgcagagagaagctgtggacaacagacagggaacaaagggtcaggccactgggtgcaagcctactgcatgaagttcctggagccagttaactggaaggggagggagcacccggtgtccaagaatgggttgcttaacacagatttgggagggagcacagtttctgggggtgatagagctagagtgtggccatggaaacagtgatgatgacagaagagagaggtgaacctgggtggagggagggcataaggaacccaagccagcatggaagccaggaagtaaagacaaacagggccacattagtaggacaaagattgaaagaggactggaggtcctgagggagcaaagaaaaggttccataggattaacagagcagaaagctggaacaggatgttttggttaaaggctagagtttcactcaagatggacagattgcttacagacttctggacttgcataggttggtgttgtcagtggaggcggaggcaatgtttatttagctttgtaatttagaacactgttgtattctttcttacggctttagattgtcatacagggattttctaagccaggggtccccaacctgtgggccacagatgggtaccagtccatggcctgttaggaaccaaggccacacagcatgaggtgagtggtgggaagaaagccagtgaagcttcatctatttatagctgctccccattgcttgcattacctcctgagctccacctcctttcagatcagcggcggcattagattctcgtaggggcgtgaaccctgttgtaaactgtacacgcaagggatctaggttgcacgctccttatgcgaatctaatgcctgatgatctgttactgtctcccaacacctccagatgggaccacctagttgcaggaaaacaagctcagggctcccactgattctacattatggtaagttgtataattatttcattatatattacaatgtaataataatagaaataaagtgcacaatttaagtgtaatgcacttgaatcatcccaaaaaccatcacccctgcccccagtctgtggaaaaattgtcttccacaaaactggtccctgctgccaaaaaggttggggaccactgttctaagcaaaggcttcctggcttccattttattatggaaaatttcaaatgaactcaaaagtagagaaaaaaacaaaatgtactcctatgggcctgtcaccacacgagttgaacccaggttaagaaaccgtgagctttttgctgttcttattttgtctaccctctctacttttttgttcacacaagaagccagtttattacttgagttgggttttgttgaatgaccacaggtcacatactcggtgctggcagtcttaccataacatgcagtcagcatttttgaaaacaatgtaaatatataatacagttgtctatcttttagtttccaaagtttgttacttcacattttgactggatgataatttatagaatgtgtgtgtgtgtgtgtgtgtgtgtgtgtgtgtgtgtgtgtgagagataggccagcatgtctgtattatcctcattatataaaaagaaaacagatgcaaagtagtgttaggtgacatgttggcctgaagttccaagattaagtgggaatacattttaaagttccctctttgctgttcccttctcttgggaatgttcttcattcatacagcatctgccctccatctcacatcccccgtctttctaaaggcatcactggcccatccctacaacaagctgtctccatgccagccccaagtgctagtaagacattgtcctatacctccctggtactgggctctgcaccagtgtgcccttctgcgtactcttttcttcaccagcctggcagtgggatgttagttgctgggcggcgctattctcttcctcagttggtggtgacagctgggtccctgtgcctctgcagttcttgcacggag

SEQ ID NO: 126 - DNA, 23007 bp, Homo sapiens
  source 1..23007: mol_type = other DNA
gagaggactgcgcctgcgcagagccgaggacgcgtccggcgccgagattcaaactagtggcgggaggctgtgagctgagcggtggggtctgcgtacgcctggagtccttccccgctgtgctcagcatggaccctatccggagcttctgcgggaagctgcggtctctggccagcacgctggactgcgagacggcccggctgcagcgagcgctggacggagaggaaagcggtgcgtgaggcgggcggccagggcacggtgcgtggggtgcgccgcgggcggaggggcgtggcgagtggacggtatgtcccacgggaaccgccaggcactgacggcgtggacggctgccaccgaggcgcagggcgggtgctgcgcgtctcactgctcggcgtttggcgttagcgtagctcccgggcctgtttatggtttattcctaggaacccttgtcgcgtgtccgttttagacccatgtacaaccccacggctctcttgagataatgaaagtagcactattacgttataaacagagacagcagcacttaagaataagaacctaaattaacagattgagctcataatacatatactaatttatacgtgatatgctttcgtcacatacaatatgtgtgcttgtcagtaaaataccatgtaaacctaaacagtttctcttagaatcaagctatttaacgttctttacacaatactttacacatatagtgacttttttctcactcacgtggtccacagttgcagtaaacctctgtgtttttcccgctaaaccatgttgccaacacaaacactagtactcaacagtgctggggtttaaaaaaatatgtgtatataaataaagcaaaattcaccattcccctttttattagagattttttaaattgttgaaaaagtagttcagattttggaattatttcataaatgtcataattgtaatgtgctttaaaatattacaccctgcagactacttttactttaattatataatgaatgatctccagtcacttgaaaatgtctatttctgcccggcgcggtggctcacgcctgtaatcctagcactttgggaggctgaggcgggcggatcacaaggtcaggagatcgagaccattctggctaacacggtgaaaccccgtctctactaaaaatacaaaaaattagccgggcgtggtggcgggcgccggtagtcccagctactcgggaggctgaggtaggagaatggcgtgaacccgggaggcggaacttgcagtgagccgagatccgccactgcactccagcctcggcgacagagcaagagtccgtctcaaaaagaaaaaaagatttggccgtgcacggtggcacacgcctgtaatcccagcattttgggaggccgaggtgggtggatcgcccgaggtcaggagttcaagaccagcctggccaacgtggtgaaacctcgtctctactaaaaatacaaaacaattagctgggcatagtagtgggcgcctgtaatcccagctactcggaggctgaggtgggagaatcgcttgaaccctggaagcggaggttgcagtgacccgagatcgcgccactgcactccagcctgagcgatcttagactccatctaagaaagaaaaaactatcttcagatggtcatcaggaatgtgaaaagacatcaatttcattagtcatcaaggaaatgcaaatttcattagtcatcaaggaaatgcaaattaaatctcaatgtagtacagttgcatacccagcaggatagctaaaacgaaaaagagaaaattaccaagtgtttggaaagatgtggaacaaatgcgctttttgttgttgttgttgttgttgttggagcagtacgcactttttttttctttttttaaaattattatacttttaagttctagggtacatgtgcacaacgtgcaggtttcttacatatgtatacatgcaccatgttggtgtgctgtacccattatctcgtcatttacattaggtatatctcctaatgctatccctccccccttccctcaccccatgacaggcccaagtgtgtgatgttccccttcctgtgtccaagtgttctcattgttcaattcccacctatgagtgagaacatgcggtgtttggttttttgtccttgcaatagtttgctgagaatgatggtttccagattcatccatgtccctacataggacatgaacttatccttttttatggctgcacatggtgtatatgtgtcacattttcttaatccagtctatcattgatggacatttgggttggttccaagtctttgctattgtgaatagtgcggcaataaacataagtgtgcatgtgtctttatagcagcatgatttataatcctttgggtatatacccagtgatgggatggctgggtcaaatggtatttttagttctagatccttgaggaattgccacactgtcttccacaatggttgaactagtttacagtcctaccaacagtgtaaaagtgttcctatttctccacatcctctccagcacctgttttttcctgactttttaatgattgccattctaactggtgtgagatggtatctcattgtggttttgatttgcatttctctgatggccagtgatgatgagcaggaacaaatgcacttcttatgcactgctggtgggagtgtgaactgtaaaaatcatgttggaaaactagcagtatttactgaagttgagcatatgcataacatataatccagcactttttctgagtctcttaacatacagaaatatgaatacgttggtaccaaagacatgttctaggaagttcaaagcaagagtattcataataattccaaactaggcacaatccaaagtgtttcaacaatagaataaataaatatggtatcacgcagtggaaatgctacacaataatgaacatggattagattacgaacgtggaagaatgtaacagttgagtgaaagaagccagtcgcaaaagagtacatattgtttgagtccattaaatcaagttcataagtgacaaaactacttcatggcgttagaaatcagggtaaggtggctgggtgcagtggctcacgcctataatcccaacactttgagaggccgaggcgggtggatcacttgaggtcaggagttcaagaccagcctcaccaacatggtgaaacccccatctctattaaaaatataaaactagccagatgtagtggcgcacacctgtagtcccagctacttgggagactgagacaggagaatcgcttgaatccgggaggtgaaggttgcagtgagccaagatcgcaccattgcactccagcctgggcaacaagagcgaaactccatctcaaaaaaagaaaaagaaatcaggctaaagtttacccttgtggggaagggagagactataagagggcttctagagttctactaaggctctgtttctcctttttcttgagctgagggccagttgtgcaggtatgctcattttataaagttcattaaactatatacttaggatttgtatgcttttcagtatgtatgttatacagtcatgttacttaatggggatacattctgagcaacgttaggcaattttgttattgtgcgaacatcatagagcatatgtaacacaaacgtagatgatatgacctactgcatacctaggctgtatggtgtagcctgtcgctcctaggccacaaacctgtatagcatgcgactgcattgaatactgtaagcaactgtaacattatggtaagtatttgtgtatctaaacataaaaaaggtacggtaaaaaatatggtattatcttatggtaccactgtcatatgtgatctgtgattgaccaatgtcattataaggtatatgattgtatactattctttttcttcctccttttccttacatttattggacttcttttctttcaatattcatattgaagactttgaagattatccaatgagaattttatatgaccttcattcagaagttcagactctaaaggtatcactcctacaatattgatttattatttttctgtggcgagtaatttttttatcctaaatagatttagtcagaagttagagaaattaaaatgtactttctttattcataaaaggatgatgttaatattcttcttgataaagcaagattggaaaatcaagaaggcattgatttcataaaggcaacaaaagtactaatggaaaaaaattcaatggatattatgaaaataagagagtatttccagaagtatggatatagtccacgtgtcaagaaaaattcaggtttgaataacttcattttatagcatttgttttagtattgaagaaacaaggcagcatgattaagacaactgtagccttggctatggtttttagttctagctctgttgttatctgacgcttatttgataaatatttagtcaactctcactgtgtggtgtgcttttggagtgctaatcaggggtgtaatataaaaacagtccttgttctcctttccaaaatgccaaatgaaagctagcacaatgctagatttagcacatttaggctagatggcctatttaaatgaaaaactacaagataaatcttcaaaacttgggataggtggtttctagttagccctgccaataaaagctgagagacctcgaggcatgttatttcatttttcttgttcacagtgttctcttctatagaaagagatattggctataaaatttgacgaagtccttttttgattctaaaattttaatgaagggcattctatcatagtggtttagaatttggagtcaaaatgcctgagttcaaatccgtattccaccacttaatagctgtattattatctttgtcaagttacttaaccttgtgcctcagtttctcatttgtaaagtgggaatgtttagtatatctatctcatgagattgtataaggattaaataagataaagttgcttacagcagttcctagcatgtcagtcacccaagattaattattaactgttactgttatgcccatacctctgaatgactaacttcagtgtcttcatttcttttttttttttttgagatggagtctcgctcagtcgtgcagtggcgcgatctcggctcactgcaagctctacctcccgggttcaagccattctcctgcctcagcctcctgagtagttgggactacaggggcccgccaccacgcccagctaatttttttgtatttttattagagacggggtttcactgtgttacccagaatggtctcgatctcctgacctcgtgatccgcctgtctcggcctcccaaagtgctgggactacaggcgtgagccacagcgcctggcccagtgtcttcatttctgttattaaattgaacaagtatgtattgaggatgtgtgtggcaggtaagttaaacagtccatgtgagacgggcacagtggctcatgcctgttaccccagcagtgtgggagattgaggcaggaggatcacttgaggccagggctacataatgagactctgtctctacaaaaaattcttttacaaaattagctgggcatggtggtgcacacttggagtcacagctattcaggaggctgaggcagaagggatcccttaagcccacgagttcaaggccacagtgagctactatcacgccactgcactccaacctgcatgacatagcaagaccctgtctcaataaataaaatacatacatacatacatacatacaaacaacccataccaccaccaccaccccccacgtggaatcatagaattcagttgactttggtgtgaaagagccacagattcaaatacgggctccaccagttattacatgcgtgaccttgggtaatttctctaagttgctttttcctcacttataagatggggataataatatctccctatggagtagtgataatgatgatttattaatctctgaaatgacagcactgtgataaatacatcagtaggtttttggaactcttgtagcaagaactttctgttctcaaaagtaacagaaagcataatgccaaaaacaactcagtgactcagaagctcttcaaaggaacaaaaactatgaaatcaaaatataaaactttagagatttaaactcaagacttttaaaacaaaacaaacaaacaagaaagtatataaccggccaggcacggtggctcatgcctgtaatcccagcactttgggaggccaaggcgggcagatcacctgaggtcaggagttcgagaccagcctagccaacatggtgagaccctgtctctactaaaaatacgaaaattagctgggtgtggtggcgtgtgcctgtaatcccagctactcattaggctcatacaagagaattgtttgaacccaggagacggaggttgccgtgagctgagattgcaccaccacactctagcctgggtgacagagcaagactccatctcaaaaaaaaaaaaaaaaaagtatataacctattaatggttgagaaactgtatatctttgaagtgctctcctattatttttctcaactaggtgttttatataggtgttccagactaaggatacaaacttatctttatatagcagtctttgctatttagctgaggcatctggaagttacgaatctaaaataatatcatactctgtgttaaatctggaacacagttgattccatactgtcatgaaattttaaaatacagtttcaggccaggtgcagtggctcacgcctgtaatcccaacactttgggaggctgaggcaggtggatcacttgagcccaggagttcaagaccagcctgggcaacatggcgaaaccctatctctacaaaaagtacaaaaaattatctgggcatggtggcacatgtctgtagtaccagctgcctgggaggctgaggtaggagaatcacctgagcccagtgttgtgggtgtgactagctggggctagtgtctcaggtggtaaaggaatttaccaagacagttgtaggtagagaaaggcagatttattagcgaaagtatgaaaatacattgcaaggttgcaatgggcagtacagcagagaaggggctgtctgcaaagaggcagaggctgaagggaagttttatagggtcatgctggaggcgggctaggtacagaacaaggttgttgtgaccaggcatggtggctcacatgggtaatcccagcacgctgggaggccgaggtgggcagatcacttgagctcaggagttctagacctgtctaggcaacatggtgaaaccctgtctctaccaaaaatacaaaaaattagctgggcatggtggtgcgtgcctatagtcccagctttggaggttgaggctgcagtgagccgagattgccactgcactccagcctgggggacaaagtgagaccctgactcaaaaaataaaaataaaaaaaaaaaggaacaaagttgttgtgcctgcaggttgtttgtgattagccttttctcagaacagttgttcattgttcgccccaacctggggccttcccccattgttgcctacttatctgtgattgtgccactgcactccagcctgggcaacagtcaaagctacagaaaatatattctgatgctcactgaagtctgagaaagaaaaaaaaaaaagaaagaaaaaatattatgaaaaactagtaaatcacattaaggatgtaagaaaattggacttttatttgtgaatattaatttttcatcttataacacttttaacttgctttccttctctaatgtataatcacaatgagatatgggtgcacaagagatacatgtcagaactttattaaagggacaattgaaataacatttcagctgagtgtggtggctcatgcctgaaatcccatcactttggggggccaaggcaggaggatcatttgagcccaggagtttgacaccagcctgggcaacatgatgagaccccactctacaaaaaaaaatttttaaaattagctgagcatggtggcacacctgtagtcccagctaccccaggggctgagatgggacgatcacttgagcccaggaggtcgaggctgcagtgagctgtgatcacacctctgtactccagcctgggtggcagagcgagaccctgtctcaataaatactaaataaataaaatgtttagacaattggaacttttgctgatttgggaaatttcagataagctgttttctgttgtttttgtaaacgtgaaattttccattttgagtttgaccagaatattctgatttttcctcctagtacacgagcaagaagccattaactctgacccagagttgtctaattgtgaaaattttcagaagactgatgtgaaagatgatctgtctgatcctcctgttgcaagcagttgtatttctgagaagtctccacgtagtccacaactttcagattttggacttgagcggtacatcgtatcccaagttctaccaaaccctccacaggcagtgaacaactataaggaagagcccgtaattgtaaccccacctaccaaacaatcactagtaaaagtactaaaaactccaaaatgtgcactaaaaatggatgattttgagtgtgtaactcctaaattagaacactttggtatctctgaatatactatgtgtttaaatgaagattacacaatgggacttaaaaatgcgaggaataataaaaggtaagcagctctgttaaaaggcatattttatctagctttctaaaccttttgtatttattgattttttttccagaagaaataaaatgtttcagacatttttgctttaaaaagttttcagatatttatttatttattttatttcaataggttttaggggaacagatggtgtttggttacatcaataagtttttttttggtttttttttttgtttttttttttcgagacggaggcttgctctgtcacccaggctggagtgcagtggtgcgatctcagctcactgcaaactccgcctcctgggttcacgccattctcctgcctcaccctcccgagtagctgggaatacaggcgccagccaccacgcctggctaatttttttgtatttttagtacagacggggtttcaccatgttagccaggatggtcctgatctcctgacctcatgatccgcccgcctgggcctcccaaagtgctgggattacaggcgtgagccaccgcgcccggccaataagttctttagtggtaaggttttcagatactttatattagagatcttctcaaatcaccaatactatcaataaagtgtgagctgtcagtttcttcaggtgagagactatagaagtgataagggcctgaaaaaaagatatttgtagggatagaagaggaaataagattaaaggggtaaaattagtaagaacttgtgattgatttgctatggagacatgggaaaaggggatgatctaggataaaccccaagtttctgttttgttgcttgggatgatgttagaacaagaaaagaatacctggagtatggggggataggtgatgtgtttacatgttggttttgacattgttagtgcctcttcatgcttaggcattctaatatcagtttaaagctcagtgaagaattcagtgctaaactagatttgggagtcattagcatggaaatggtgattaaaaccgtaagagttacaatgaaaataccacttatcaaagtagccaagcaatgtctatagataaatacttatcattaaaaactgttactattaaagaaggataacaaacattcctgtcaaagaaaaaaaccccacaactctggggaaaaaaacactaaagataaaattttaatccaaaagatttttaaaagagtagaattgataaacctaagaactggtccttatctaaacataaatacaaataagagcattaagaactaaggactatattgtgtgttttgtttgtttgttttgttttgtttttcagatggtcttgttctatcccccaggctggagtgcaatggctcgatctcagctcactgcaacctccaccactgggttcaagtgattctcgtgcctcagccacctaagtagctggaattgcaggcacacaccactacatttggctaatttttgtatttttagtagagacagggtttcaccatggtggccaggctggtcttgaactcctggcctcaagtgatccacctgcctcggcctcccaaagtgctgggtttacaggcgtgagccactgtgcctggcctatgtttttatttttctaagctatcagaaaatatcgtaggttatagtattgggaaatttgaaaatttcagatatattaaagttttagaaaataatacaaaatgataaaaattgacttgaagtagaaaacctgggtagaccagtaatcagagaagaaaactgaaaagttatcagataacaggccaggcacagtggatcgcttgacattaggagttcaagaccagcctggccaacaggatgaaaccctctctactaaaaatatgaaaaactagctgggtttggtggagggcgcctataatcccagctacttggaaggctgaagcaggagaattgcttgaacccaggaggcagaggttgcagtaagctgagatcacgccactgcactccagcctagataacaagagcaaaactctccaaaaaaaaaaaagttatcagataacaagctccaaaaagctctgagcatagatggtgttctggaggaatcctttctaatgttatgtcatgtcatgttattgttttgagacaaggtcttgctctgttcccaggctggagtgcactggggcaatctcagctcactgcaacctctgcctcctgagtttaagtgattctcgagcctcagccacctgagtagctgggactgcaggcatgagccaccacgcctggctaatttttctatttttagtagagatggggttttgccacgttgcccagactgctcttgaactcctgggctcaagtaatccacctgtctcagcctcccagagtgctgggattacaggtgtgagctaccacgcccagcctaacatcattcttgatgttctggccagtgtaatgagataggaaataagaaatatttctgtgttgcacttctaggccattttgtacctaggcaactcaagaaaatcacatgaaaaacgtatagaaataataaaattcaagtaagaggctgaaagaagatatatattttatatagttacacagggcaactatttctttctttatgtatttatttatttatttatttatttttagagacaggttcttagtctgtcacccaggttggagtgcagaggcatcatcatagctcactgcagcttcgacttcctagactcaagcagtcctcctgcctcagcttcccaaggagtaggtgggactacaggtgtggaccaccatgcctgcctaatttttttttttttttaactttctgtaaagacagggtctcactgtgttacccaggctagtctctaagtcctggcctcaagtgatcctgaaggtatttttgaagtaaagatgattcagtaagttatactggaacaattagttaactggaaaaaaaatcaagtcatctctgcctcaagtcaacataaaatatagatagatcaaaaagataaatatttagataaattatttaaaaaataaaagaaaatatagataagttatctgtttaaacagtgaaagcgtatactgcaattaccattatgtttgtaattgcaagaaacttgtaaattaattgacatgattagacatcttaacgatatttgtttattctattcagaaatatggaagggaacatgagtcaggcatggtgattcatgccttagttccacctgcttgggaggctgagctgggagaatcacatgaacccaggagtttgaaaccagcctgcgcaacatagctagatcccgcctctaaaaaaataaaaataaaataaatagactggaacatgaagcatataaagggcaaaaaataaaccaagaaaataattgcactgagggctgttacacacatactaataagaaaccactaacaccaaaagcagcctaggcaatggacaggaatagatacgactaataaatattttaaaaacagttttgtctatcaaaatagtacaaagcatatttgttttaactgttagaagagtacaatgaaacgtgtgttcatatatcattgtcaggaatgtatcatggaaagagttgattcttaactgtttaaaaccttttacctaggtaaatgactattttacctctacgaaaacttaacaaacattttggcacagtggtgtttattacagccttattttaaatggggagaattggaaagaaccaaaataactaacaggagaaagtagataaattatggcatgacatcaaagctagaaatcatactaaagaatatggatagatttaatcacatacaaactttaaaccactgtatcataaaatatttgaccaatgacgaagcaggaaaagtgttataacatgataaatatatgtgcatatatatgttatatagatacataacaggttttaaaaacccatatgcagtaattagtgaaagacagacatcccaatttttaaaacaagcaaagacatgaattaacaaaagaagaggccgggcgtggtggctcatgcctgtaatccaaacactttgggaggccaaggtgggtggatcacttgaggtcaggagttcgagaccagcctagccaacatggtgaaaccctggctctactaaaaatacacaaattagccgggcgtggtgacgggcgcctgtagtcccagctactcgttaggctcatagagaagaattgtttgaacccaggagatggaggttgcagtgagctgagatcgtgccactgcactccagcttaggtgacacaatgagactccatctcaaaacaaaaaaaccccagaagaaatacaattgaccaataagcatatgaacacttttagccttgcaggtaatgaaggaaattcaaataaaaaaatgagatgtcatttttcaactatccagatgcatatttggctaaaacatatccagatgtttttatttccaagttttaactaggcttattaatgttaagagagagaataccaaaaaagacaggttatattcagtgttgataagacataagaaaatgcttttataatgctggtggccactggtgaatctttcttagggaaaattgtcagtgtatataaaagcctttatgaaattttacttaaatgaacaaattcaaggaaaacaaagtgtgcatatagtgttatatatataacactattatttcatttatagttcaaaagttcaaaagcacaaaaattatattaagagtacacaagtagttaaagtaccaagcaaatctagacagaaatttccctctgtagggcagagatgggtaccaagttgggaagcttccatagaggactacacaggtactagtagtattctttctttctttctttctttctttttatttttagagacagggtctcactgtcatattttggttctttccaattttcccctattataaataagctgtgataaatactactgtgccaaaatgtttgttgagttttcttagaggtaaaatgactgggtaaaaggttttagacatttacaaatcaactctttccatgaaacattcccaccacccaggctagagtgcagtggcaggatgatagctcactgcagctatgaactgggttcgagtggttcttccacctcagcctgctgcgtagctgaggctacaggtatgtgccgcaactcccagctaattttatttttttttattttttgtagagatggggtcttgctatgttgcgcagcctgatctccaactcatagcctgaagagatcctcccactttggccctgcaacaggcataagccactatgcccagcccttttatttttagaacttttgtacaacatatatattcttttgtatatgtgccatactgtatacacacttttaaaaaaatgttttacacaatgaccaggtgtagtggctcacacctgtaatccacacctgtaatcccagcactttgggaggtcaaggtgggtggatcacctgaggtcaggagttcgagaccagcctggccaacatggtgaaaccctgtctctaccaaaaaaatacaaacattagccaggcgcagtggtgtatgcctgtagtcccagctactcgggaggcttaggtgggagaatcacttgaacctgggaggtggaggttgcaatgagccgagatagcaccactgcacttcagcctggtggcagagcaagaccatgtctcagaaaaaaaaaaaaaatgtttacacaagatgttaaagacagcatgggtcattatgtttaaattcaaaactggaaacttgtaagtgaaaatcaatcctgaactatcttgtattcagtgatattctctttataactattttacagacatctgtgtaactggctaggacaatgataatcatatgacaggatcagtcattttagtcttaaaaaaatggcaagtttttaatctatatgtgtacactggttataaaattccactttaggattttgaagtcccaggagttacatagttccctttttgaactaataagttgaacttagtggtccttaacctttttgtaccatggatatatattagaaaaaagaaaagaatttgtttcatgggacttctgtaccataaagcataactgaatgtttgtccaaacttgatatttagtaaggttaaatttttttcccagagattgaatgttaacttttttaaccttgtaatttccctatgaatcacaccagtgaggaggccatagatacagaatccaggctcaatgataatgtttttgccactcccagccccatcatccagcagttggaaaaaagtggtaagtataagaatcaagttacttctcaggaacatttttcccaaactatctttgaacaaaattgatttcatcatcttagacattctaatagttttcttcatctgtttaattcctaacattggattacattaagtaccatttcattcagcatgattttgtccaagagaaagaaaattttctggtatgtttttaatactcttgattatgttcaatatctgtcagcttgttattaacattttaatttgaaacttacatattcaccaatattttgatgtagagccttagtactttttcttttaacctattgattagagttgtacattatcttatataaaccacgcacggaatacatcagctgccaatttaaattttggtttcttttaaatagctcagtaacttaaagaaaattttcatacagtgttttcatatttgtcccagcaaacatgaaaacattggtgttcatgaaaaagcaagataaaaaaatcctagagttttatgatttttttgttttgttttctttgagacagggtctcactctgttgcccagactggagtgtagtggcacgatcttggctcactgcagcctcaacttcccaggctcaagcaatcctctcaagtatccgagactataggcacacaccacgacgtccagctaatttttgtattttttgtatagatggggtttcgccatgttgcccaggctggtcacaactgtagacaactcattgcaacctccgcctcttgggctcaaccagtcctcccacctcagcccccacgtagcagggactacaggcttacaccaccatgcccagctaatgtttgtatttttttggtagaggggtttcaccatgttgccaatgctggcctcaaactcctggactcaagcgatctgcccaccttggcctcccaaagcacttcatcctttttaattgataaatagtattctactgtatatatgagccatattcatttgctgattaggaggtagtgttttcattttttattattataggcagtgccttaaggaaattttcccttgtgcatatgcgtgtttctcatatctaggagtagaattgccaggtcaaagggcatgcacatttttacttattctagaaaatgctgaatagtcagctaagagtagctgttaagatttatcttctcactagtggtattgagttcctgtttctccgtcttttccagtacttgatgatttttagacttcagatattttgccagtcagattgtttttctaacatatttaccttttctctttgttgttttttaaggttgcctcgatgatactatgtgttctagatagcaattgtctatatatgcatgggtctctcttgtctatatatgcatgggtctctcttgttcttatctttaatttttccatccctggttaatgttacactgtttttaactactgtacctttggagtaagtcctgccatcttggaagacaagtgacctgttctccgtcttcctcctcctttgtcagaagtttgataattttcttcataaaggttttacaccatttttaatagatatatttgtaggtatcttgtctttcttgctactgtgaaaagtatcttttttcaaattatatgtgtaatagtttgttgcttttatgtttaatatatattacaacacaactatttgttattgtgtattactcttgcatccttgctgaattttagtagtgctaatgataattacatatgtaaatatgagattttcttcctgtccagttaagcatactatagttatagttttttaatgaccattttatgtgtcttttagatgccgaatataccaactctcctttggtacctacattctgtactcctggtttgaaaattccatctacaaagaacagcatagctttggtaactttccataaaattgaaagccacagtctttctcctaaagactcaaatacactactgcttgcaggctcaaagagtctgtttagaagacatggatgaatccagcttttagggatgtatttacagtgcatttctggagggtagcttggcagcataaatcaattgctctaaaaaatatttttcatacctttaaaccatatctctgaattttttctaaggcaaattgggacaaagatttaaacaagttatagagtaaggaacagcattatttataagcacaaaacatgggaaacagtataaatatcgaatgatatcaaagaactaaaacacagcaaggcatatccataagatcaggtgttacatatactatcatgttttgaaaaacagatgagagcatataaaaagaatgttttcaagaaatattaatcatatggaaaatgatgtgtgtgtatgtacacacacacatatatatacacatattttaaggaaaaagtggatagaaacagcagtgtagttatctctgggtgataaattatgggtgattttgtgcttttttcccctaaattttaccaacaaataaatttaatcagatttcatcaaatcaaaaccttatccctctttagtcagtatggtcacttaaccaatgctatagaaaaccaatactgtattagggtatccaatagaattttctataatgatggaaatgttttatagtctgcactgtccaatatggtagcctctaatcacgttattgagcactgaaaatgtggctagtatatctgaagaactaatatttacttctttaaattttatttaattttaattagcttaaaatttaaagagccccatgtggctgtggctactatattggacagtgcagctatggatgaacacagggctgtgttatcagttgaagtatcaggttatctgcctgttagtacctgccatttacaattcatctactccttatgttcacgtggaaggtaccctactgaggtgacactctatcgtctctctctcttaactctgacctgagagagatgaagcgacttacccaattggctgatttagcatgaataatctgcatactaaacttacctctgatctgctttcttccttttgggagtgcatgtggtaacatttgttcatgctgtgattttcgtctgactacactcactgttgcctgagatggggtgggagtatccatctaaatctttggttcattctatatagttatgacattaagcgtttttttggtttttgttttgttttgttttgtttgtgacggagtctcactctgtcacccaggctggagtgcagtggcgcgatcttggctcactgcaacctccgcctctgggttcaagcaattctcctgcctcagtctcctgagtagctgggattacaggcaggcgccaccacacctggctaattttttgtatttttagtagagatggggtttcaccatgttggcgaagctggtctcaaactcctgacctcatgatcggcccacctcggcctcccaaagtgctgggattacaggcatgagccaccacaccttgctgacattaagctttaactcagcctttattagtaatgagatgatattttgtcctctgtatgccatttgttcttgattttgtttagaacttggtcagagaagatggggcatatgggagcctattagagaccccaatagaagtaacaaatgattaactatttttatttactacattatgttatattaccataatttaatggtctatttttattcaataggtatccacaaattacccattatcaaaaacaaatagttcatcaaatgatttggaagttgaagatcgtacttcgttggttttaaattcagacacatgctttgagaatttaacagatccctcttcacctacgatttcttcttatgagaatctgctcagaacacctacacctccggaagtaactaaaattccagaagatattctccaggttatttttccaggctatttttttttttttttgctgatattcttttcaatatgaaatatttaaagacctgaaactgcatataaactgtcttatttatcattgggctagtgtgctaattttggtgatgagagaatctaaattctgagctgtcaggaccttattttctaattcttgttcaactgtggtttccatgtcgatcatggttccattagaagtgttgctggcaaagtcagaaaagtcatttaccctacaatttcccagagccagggtatcatgaataacataccagtgtttcttgaacttgaaacttcttggacctcagtttaagaaacactgattgatgtatgttagaatatagtcatgtgctgcataacattttggtcaatgatggactgcatatgccacagcagtcataagattatgatactgtatttttactgtacattttctgtgtttagatacacaagtgcttatcactgtgtagcaagtgcctgcactattcaggacagttacatgctgtacaggtttgtagcctaggagcaatagtctataccatatagcctaggtgtgtggtagggtataccatctaggtttgtgtaagtactgtgatgttcacacatgatgaaatcacctaatgcatttctcagaatgtatccctattgttaagtgatgcctgactgtatctgattctttagtatttaacagcagttaccattggcctactaatgacttataacaactgccaattctaaataaccagtctgattctttgacagtccccctccttaataggagttacagtgtttggcaattattacttacacgtgtggaattctttttttttgttttttttttgagacggagtctcgctctgtcgcccaggtcggactgcggactgcagtggcgcaatctcggctcactgcaagctccgcttcccgggttcacgccattctcctgcctcagcctcccgagtagctgggactacaggcgcccgccaccgcgcccggctaattttttgtatttttagtagagacagggtttcaccttgttagccaggatggtctcgatctcctgacctcatgatccacccgcctcggcctcccaaagtgctgggattacaggcgtgagccaccgcgcccggcccacgtgtggaattcttaatagccattctagaagtcttcctgacttatggagacccatgagaaggataaatcacttcggaaaatactcagatgccattagaactgactcatgctaggatatcaataaagtacttgttatccttttttctctgtcttttctgcttttctggaagatataataaattgcatgaagaaggagcatcttctgtctttatgaaaattatatagtttccacttccctatggttgcttcatctctccttatttctttgtaaaaggaaggaagccttatatttactatatcacccctttatgcatgaaaaaattatagctgatacttcatgttctcctttcataatttttataattgatgaccttccttttgagcattcgttttacatctttcctttgtgtattttccctaacatctttgttaaggcttaatttcctctcagggatatattgctacttgttttcactaacctcagtcagaatacattttaagctttaaaaatcagtccttcacatccaagttaaatttctaatatctccatcttttcattgcagttagcatgtcttttttttttttttttttagaccaagtctcgctctgtctcctaggctggagtgcagtgacatgatctcagctcactgcaacctccgcctctggggttcaagtaattcttgggcctcagcctcctgagtagctgggattacaggtgtgtgccaccactcctagctagtttttgtatgtttagtagagacgaggttttacctgttgtccagcctggtctcaaactcctgacctcaagtgatccacctgccttggcctcccaaagtgctggaactgcaggcgtgagccaccatgcccgccccatagcttttattgaacattttgtaacttcttccaaatttaggttatattattcatatggctcgataaaaaggaatttccttttttttttttagcttttatcaaaatacaactcaaacctagctactccaatagcaattaaagcagtgccacccagtaaaaggttccttaaacatggacagaacatccgagatgtcagcaacaaagaaaactggtgagtatgttacctttgtaaagaaagttcatgtgttatttgaggaggacatttaaaaattaacatttgaccatcctgaccaacatggtgaaacctcgtctctactaaaaatacaaaaattagccaggtgtggtggtgcacacctgtagtcccagctactcaggaggctgaggcaggagaatcgcttgaatctgggaggcggaggttgcagtgagccaagatcatgccactgcactccagcctggcaacagagcgagactccatctaaaaaaaaaaaaaaaaaattaacatttgaatattggtaaaaattttgtttttaattgacatttgccagcttaagttaatagcctgtctctatcttttgatatagaacttgtgatccctgaatctcagattcccgaattatccagtttaatgatatcagtgggaatctatcctcaattattttataagtgtaaaatatatagccacagtattgtgtcatttgtcttaatggcttttaattttattaaattgatatttgttatttgtatctgttgcagaaattccagtggatctatccaacacagaaactgaacaaaatgagatgaaagccgagctggaccgattttaacattcacattgccctgcctctgtccccctttaaacgttgacccattttaaagacaaacatgaacattaacatcataatatgctttttatgaagtttcaataaggtttaaccttagtcttgttgacatgtagcccagtcattcactctttaaggattattagtgtttcattgatactaaattacccagcttaatcaacagaatggtttaagtagtaccaggaagtaggacaagtaatttcaaaaatataaaggtgtttgctactcagatgaggccgcccctgaccttctggccagagagacattgctgccagccagctctgccttcccatcatctcctttcaggaccgtcccacaccttttacttgctcagtgctgtctgaagatgcagttgctgtttgcaaacaacaggaacaccagttaaactaattaggaaaagagggagatttccaggcctgggtaactatatactgtgaccattggaggtagagacaggtctcaacagttggaaccaggaactctgctgtcaggttgagagttttgtttctcttccagcttttcactgtgtgggggtcttttctcttatgtcagctctttctatcacatggcagctgacctctcacgctccactctgcagcttggacacccagtagaccctgaatttcactctctctaaaaggttctgagggctcatcctgggccaggggccctcctgtgcactgttagctatggccacgggagcctccagagctgcctggtagcttcaggttgacctgcttatcaggcctacgatccttctgatttaagtacagctggaaagtattatctaattaagttcatgatagtgcttttggagaacttgtcaaattacagccaatgagaaaataaggacctagcatactgtggagaaccattaaaaatttgagaagaaacaacaagtattatgtcaacttacttcaaaggcgtagttttgggaatttgatgcagtaaagattaccctgttttatgattgttccttgaaagtcaaatgggggacctgtccattgtgctctattaatcttgtcagaaaactgtcaccaaaacaaaacttgagtttgtccttgttctaggagttactgggtagttgtaagtattatttttattaaatataatgtaaaataaaatgttaagatacttagttttgtttttcaaagtaaagctgtagtcagccttatgtatgccattgactctgaaatgtataccagcctttcactgtgtaccgtgtgtatataaatccacagaaccggatgagctgcttagggagggaatatattcaaagtgtaccaaggaccaaatcctggagttctcccaactttagaggatggaaaggggcagagtaatctagcaaaggagactgaggccagtgaagtaggaagaaagtatttcaaggagagtgatgattctgtgaatattgctgagaattcaaataaaaagaggactgagaactg

SEQ ID NO: 127 - DNA, 32744 bp, Homo sapiens
  source 1..32744: mol_type = other DNA
tccggcctcagaggctgtgacaatggactatgactttaaagtgaagctgagcagcgagcgggagcgggtcgaggacctgtttgaatacgagggctgcaaagttggccgaggcacttatggtcacgtctacaaagccaagaggaaagatgggtgagtgtgtgtgtctgggccggtgtccgcgctgggcggcgctcccgcaggccgaggcaggtagcccggagggagagcgggccgccggggtgccgggctctgacttcctcgacgccggcctctggctccgccagccaggtttggggaggaagtggtgtacgagggatccaaacccacgagaaatcctgcgtgccgcgtctgtgttctgctctggtggtaagaggcaagatgagcctctgcaccgtgggctgtatacttttcaaggatttcaaagctgattcatgaaaaaattcgttctaaaacgccgggttaaatgttttttgtttttttttttccttggtcgatttattatggtaaccttctggggatttcctcacccgcctctggagtgtcatccatcggtctagaaggaaggctgtgatcctttcccccaccagtttgtgatcgattttttatcaaatttgtattttatttgaggaaaggaaggcagcgagtgaatgtggttctggagagagttccccatagtgatcatctgcaacataaatgttgcaattgctatttagatattattagctgtgaatttttacatagaacaatgggggtttggtgcagggtgggtggtggggaagaaggcaagtgacatagggactatctcgttcaggcggtttcccccaaatttagcggctggcagtgaactttaaataatccctttgctttaaatattcttccctagtaacaacttaattaaacctatgactggtaatgcttccaatttagtttcttaacaggcaagtgaattgttcattttttctctttgtcagtagatgaatgtcttgtaatattgacaaaagagaaggcaattcttagttggggggaaaatatattttattaactccatgttttcttgtaaaatggatgttgtctctgttgcctttgacagaatagaaaattattgaaaagtcaaagcttattatataatccttggattttattagaaacgaagtagctttacttgagcatcccagtttagtcacctgctgtatgatgtttaatcacttaaaatttccaattaggtaggagagtatgttcagactacattagcacgaaaaaaaaattcataaagctgaagttccctactgtggggtaggggggcgcatatttacaaatactttagtattctggatgttggaaaggaaagtgtatatttattggacatttttcttagatttactgaaatgtctttctaaaagtatttacaatggactctacgaggaagataggagttctaattaatttagaatgtgtattttagtgcttttatgcaacagtaaagtggaacagatcggcagaaggtagggatttggatttgaaaacttgatattctgggcgccgcacgtatttaaaagtactttttagcggaatggatagtctggtgacactggagaaatcagcgtctggagatattgctgactctgttgttgtctaattagacttattgttgaagttttactctgtaatgacatatatttttaaaattatgtttgttaactcaccatacaatatttctcaaaagctttaaaccatctccccttcccccagtattatgtaattttgggcatattcataaaatccccaatcccatgagattagacattacagtacatttgaccaaactgacatgttatataaaattctagcgcctttgcattatttttaatctgtgtgagagaagccggttctgttttcataaattaccaatttaagctaataaaatatgcatatttgttttaacgttgtacattttattagaaaactaatactgtgtattggcagggggtacttaagcacattttatatctctatggtcaggttttaatttaggccgttaagaataatttgaaagaataatttcaatatctttgaatttaaagatagttgaaggtataatgtatggacattcttagtcatctgtgacagctgaaaagtaacattgcattttggaaaaaagaacttattatttgtaatccttggagtttgttttccatcagtctttaatgattctctttatgtgatgaacttctatttttaatggatcaaatgtcaagagagttttaaaattactatcttttagagatagttttagagagttttaaaattacagggatttttttcggtttgacttctctttgtaacctcactctggtaaagtatcgcatagtatttatgaggttcttttgatcttatgtcagtgaaatgtaatttaatgcattttagtcctggtaaaataaaatttgtggctgtttaatctttcataataagatgatgatcaaataatttgtttctagtattgatttactttcaaattacattatatattctgcagctgagatttgttctctaggaactcagacagtaacacctttaaggagaacctgagattttctataaaaggaagtaacgcaaataagcttggtttagacatatttgactattgaaatgaatgtatgtaaacgttgtatcctttcagttgcccagtgagcatagaacatgaataattggtaaaataatttagaccagagaagttagctgcttaaattattaagttttaggaaataaaatagcttcaaagattcatttctttgacttacttgaggcatgattgcatagtagggaaaagggaccttttataactttgttaatttcacattataatagagtttaaagaaatgcacaataaatcttgggattaatttgttctcactcgtgtcgccgtaaatgagatagtgtcctttgtgtctgaacacttaaagagtactcagtgggaagcaggggggttcattttctttctgagttgattgtatctcctctttgcagagtttaggcaaccaaactaattttgttttaaagagtaagagagcgttagaagacagaaaacaatttgtgtttttaaattctagacttcaatatttgcactgaatgtttggataatttaaaatatcaatttgggataagaggtttttcttcaaaaaagaaaaacaaaaggcattttcttagcagggtttttaatctgttataatctatgttccaaagaatagataattatgagtgaggaatgagtgtgtgtttgtgtgtgtgtgtgtgtgtgtgtgtgtgagagagagagagatactgccaactttctttggggcacatttgttgagagcccagagattagtaagtaggcagtgataatggcaataatagctaaattactgagtaattaagtttcaggtcctgggcaaagcactttacattcatcatctagttagtcctcacaagaagtatatcaagtcaattctgttatttttcagttttccagttgaggaaactgaggcttagaaaggttaagcaaatttacccatgagtacacagctaattaaatgtcagctaagattagaggattaggcgcaggtttttcactccagagcccatgctcttaaccattatgcttcctataattaatatattgaataagtaaaaaaatagttatggagtttgatttctagtgggttattcaaaaacataaataccttgtagaactattaatatttgcttcaataaactggtgtactttctgggtatattgctgaagcaccctttttttcaagtgctataaaactgtttatgtagatatatgggtgtgtctgtacgtatatacacaaacatacttgtgtatctagaggggtgtgtgtgtgtgtgtgtgtgtaggactaaactctaatgaaagccatgtggaagcacttcatctagtggaaagaactctagatgagcgatcctggaaacctgaatttgaattcagactgtgcttctgatagcagtatgaccttgggcaagtcatttgcccttatagctcttagtaggggggtttcagcatataatttttagggtcttttctagtattatgatttgaggaagtaaaaattatgaacataaaatgtaatattttttgcaagattaggcaaacaaccactaaaaaattttactttagatgatggtgcatttccatattttttagtctcatgctttaacgttggttctcatcaactgccaaaaagcttggtaactcccaaagacctatcagttacttaacccaacatgtcttacgctaccttgccattcctctgtatttatctcttaagatattgaggatttatggactagtgcctgttcccactcccttgaaccattcagttggtgggcagcacaaaggaactcttctgattcaacctgcattggagcatcccattacctttttccccttctgaatatggctgaatgctgtatctaagttcattttgatttaaatatttctttagatgtcagaaatgccaaatacaatatgtaatttctatcactggaatagtcatgtatacaataaagagtattccttataaccttctaaaaatgtgacagaagaggacagttagtcccctgtgtctgcaggtcctgcatctgtagattcaagcaactgtggttcaaaaattttcgagggggtagggggaaggatagttgcatctctactgagcatgtacagattttttttcttgtcattatttccttaaaaaatagagtataacaactgtttacatagcatttacattttattaggtattataagtaatctagagatgatttaaagtgtgtgggaggatatgcgtaggttatatgcaaataggacaccattttatattagaaacttgagcatctgtggattttgggggacggtcctggaacgcaccccttgtggatactgagggatgactgtatttgctgtgtacttcttatttccatgtggttgaagttacctaccttagatatcagtgcattcagatccgctatttaggccacgttgagatttcatgcttaaatttcatttttttagtagcaatactggaaaatcaattcatttgggatttgttcatgtgagttattacttttactgtgtctttgaacatttgaagaagtcaattactcattcattcaacaagtatttattggacccttctatgtgccaagcactgtccaaggtattgggaatgcaaagacgaatgaagtattccattatttggggagataactactggggaaacaaacatgtaaatgttgcaattcaataagcactataataattaatgcaaggtatatggcaacacagagaaggaagtccccaactggttaaggtttttaggaaaagcttcaaagtttacagtatttgatttggatcatagaagacagggaaggtctcatcagaaaagacattccaacaggaataggacaaagggattttttttaaaattgtattttctgcagaccccagcaaattttgtgggttttaatttttccttgccatgcctttcttttccccttgttttccctggccagcattttttgagttcttgctgtacgtgtagtagtatatatatgcactacaaatgttccattgtacccgttggacatggtgaggtactcattatttaacagtggagataaatttatcagcgtttgcaccgaacaccataattgtgtgtgtgtcagttttcaatcatgagaacattggccattcaagaaaagcagcctctgaaatccaggggtctgatttaagactctctcatgtgtaaaactgccatggcagaactctgttttgcctggggctctggttggcaaatgattctgctttggcctcacctccatgaggtgtaaggagtcagaatttcatatgctgctgaggtgatggatggtaacaaattggaaggggaaagaagttcttttgctacttagagtttaggaagtaatggaatttctcttgttggggctctgatgtgtggaaagatgaaaggtagggacagggcttctggcatgctgaatttcagctaggaaaacagaaataatgaaaaattataattattataggccatttgcaaacgtaactactttgacaattaattctctgggcaaatgtgttctaattctgatttataaacatttgaaatgtgattcatttgttagatgggaactatgtatggcaaatcagtgttgataaatacatttgattccctgtgactggtgttaatctttcttgtagtgcctttcactattgaatccaatcctcattgtctcttgactctttttctgttcttagctgctgctagaaaataaaactcctactatcctttcctccttcagaacactttgtgaattttttccttcacaccagattacgtagccttggtcatgttacttagaaattatcttttctctttagcaatcttttatcacctcaaggcagctcttgatgtcactaaaaggtggcttttacctgttgttttgaccttagtacttaaagactgttggtatcatgattctgaatattctttaatatagttattgtcaaagtcccaaaaccagtccttgctgtagtaagctgcctttactgatggagttatgttcttcagatgtattgtagcagaaaaaatgctgagagctcctttttaaaaattgagatataagtcacataccataaaattcacccttttaaaagtatgtgatcagtatagtgttttttagtagatcgacgaggctgtgcaaccaccatcactgtctaatcctaggacattttcatgaccccaaaaagaaacccattaagcagtcagtcccattcccctctctccccagccgttgacaagcactaatctactttctgtctcagtggatttgcctgttctggacatttcatataaatggactaattcaacatgtggccttttgtgtttgtgtttctttatttaatgtaatgttttcaaggttcatccatgtggtacatgtatcagtacttcatacctttctatggctggatcatattgcattgtatagatataccacattttgtttatatattcatcaattgggcgtttgggttgtttccactttttggctaaaatgaataatgcttcgataagcaattatgtgtgacttgttaggtggatgtatgttttcagtatatacctgggagtggaatttctggatcatatccaaagcagctgagaaccaattttgagtgactttacattgactttggtttaggaccaagttctttgttctttgtgtacaagacctgactagtctattttattccaggacagtgctcacaccataatctattgcagtaattctgaaacagagattcatacagctgctctcctccatcaacttagaccactctgaccttttcctcaggcagcaccttgtgctggaattttttttgtctcaggcagcaccttgtgctggaaatgcttttttctcagttgaaatgtactgacagcctcagaaaaaaatcctaactacgtatcttaacatacaactccaataagtcccactttacccgtcaccctgcaaaacatagtcattcactgatatattatgtaactacttcagtgtatatgtggttaatgcttatgtgtcctttgggtctttcaggtgaatgtttatgggttaaaattatagatttcctttagggcaatgattgtgttctccccagctcttggcatattgccaaattttgacaggtattttgtacttttgtgtatgtgtgtgtgtgtgtatctgaaattcatgtttgaaaatcttttttctaaacttgctaacattaaaagcttgaggcatattacgggaagagtagaaaagtaatacctgtgaaaataccaggagaagcaaaatttgatgggtttcctatgtttttacccagaatggcactgaacaataccaaaatcaatccaaaggcaagagcaagctcggtagttggctgaatcgaaatggaaggccaaggtatttgaaaattgagccactagaaataatatttttttgaaatatactttgaaaatgaaccctttaaaatgtggatcaaatctgtatttctaaaattaaggaaaacgtaattagtttctgaatcacagttggcatttaattttgcctaaaatcactggtctgtatagcatgatcgttttatttgaaatttaccttttgttacatgagtaaaaaattatttagactaacttctattcaaggtaactcagttactcatctcactagacaagttctttaaagtctataactttattgtaatccatgaattctaacaaataatcatcctacagagaggaatttttacatcatgatgaagggcctactctgggtgtttctagacatttgaatctataggttgtttagaggactaaagggattgaataaaaagaaaacttgtcaagtcgtgctaatgtagtttatattaaacaagtcatatttttgaggaaagaaggagtaggttttttttgtttttcggttttttttttgagacggagtctcgctctgttgcccaggctggagtgcaatggcgcgatctccgctcactgctagctccgcttcccgggttcacgccattctcctgcctcagcctcccgagtagctgggactacaggcgcccgccaccacacccggctagttttttatatttttagtagagacagggtttcaccgtgttagccaagatggtctcgatctcctggcctcgtgatccgcctgcctcagcctcccaagtgctgggattacaggcgtgagccaccgcgcccggccgggagtaggtattacctttttttttgagccagagttttgctcttgttgcccacgctagggtgcgatggcacgatcttggctcactgtaacctccgcctccttggttcaagagattctcctgcctcagcctgccgagtagctgagattacaggcatgtgccaccagcctggcagattttgtatttttagtagagatggggtttcaccatgttggtcaggctggccacaaacttctgaccttagggatccgcctgcctcggcctcccaaagtgctgggattacaggcgtgagccaccgcgcccggctaaaagactcccttttttttttttttcgagacggagtctcgctatgtcacccagcctggagtgcagtggcacgatctcggctcactgctagctccgtctcctgggttcacgccattctcctgcctcagcctcccgagtagctgggactacaggcgcccgccactacgcccggctaatttttttgtacttttagtagagacggggtttcatcgtgttagccaggatggtcttgatctcctgacctcgtgatccgcccacctgggccccccaaagtgctgggattactggcgtgagccaccgctcccagccaagactccctttaagtaaatgagtctcctaatgttttattatgtgactttctttgcaaaaattaagtttatacctaatttccaagaaaatgtcagacagaaagcaagacatacttgtaatttattttttaatgctgacttaatgttgattttttaaagtgtaaaattaaattatttaaatatttggcatttcattatggtttgcctttagctgccgttcttttttttcttaaaattaattaattaattaattttattgagacagggtctcactctgttccctgggctggagtgctgtggtgcaatcatggctcacttcagccttgaattcctgggctcaactgatcctcccaccttagcctcccaagtgggtgggactagcacgtcacccctcccagtagctgcagttctttttgtaaatttgtgtgcttataatttatttggtaactatttactgaatgtctcttatatgattggttcttgtacaaatttatggggcacacgagaaattttcttagatgtatatatgcatagtggtgaagtcagggtacttaggaagttcatcaccagactgcagtgcatttttgtttagtactcctactctactatcaaacattgaatttatttctattacgttaatctatatctgcaccctttaactcacttctcctcctctcctccctccccactcacccttcctagtcccctttatctatttttcactgtctacatccttgtgttcatttttttgtagctcccatgtatgaatgagaacatatgatatttgtctttttgtgcctggcttatttcacttaacataaggatctcaagttccattcacgttgctgcaaatgatatgatttccttcttttttgtggctgaatagtattccattgtgaatatatgccacattttctttatccattaatctgctgatggacacttagattgatgccatacctttgctgttgtaaatagtgttgccataaacatgcgagtgtaggtatccccttgatatactgatttcttttccttggggtagagatacccagtatctctttgattgctggattgaatggtaattctatttttagttttttgagaaatcttcgtactgttttttatagtggctgtactagtttacattcccaccaactatgctaggttctgtgccagatgtaggtgattcagcagtgaacagcccatggtctaataactctttagggaacttacagacttttgaggggcataggcaggtaaacaattgtaatatagtaggataagggctgcagtagggaaaattgtaggttgccatggaagtacctaatctgcccttggggagctcaagtatatttcacttgtgacttgaaagataattagaaattgtgaatgggcaataaataagagttagtgggggcttgaggagttatagtgcaggtgagagaggtaatatcactcgtggctccagaattactttataaggaagacggtgctgtctagatgaagaggcagtgcagtaatgtgtagtaagcaagttgcaactgaaattgtttatttgaggtaattttgggagcttgtgtattatggggggaagctatcctttgcagctgccactgagtagcatgcacaaagacatgaaggaaagatggtatgtacggtgagacaattgaaagaatttccatgccagatcttggaggggtggagggagaggtataaataatcaaattggggaagtaagcagattgttgtaaatcaagtcatggattttgtactttcttccgaagtcagtgggaaccatgcttagggtcttaagcagatagtaataagttccgatttctcatttaaaaagattgcttggtaacacgatcagaatggccataggaagctgtggttaggagaatgtaatagtaatccaggtgagagatgctagtgacttgaattagggaagtgagagaggggatgaggagggagaaatgataggacttgttgatttattggatatgatagatgaacaagtgagaaccaaggatgatgcccaggtttctggcttgggcagctggatattgccattcacatagccaaaacagaaagaggagcaagcttgaggtggaagatgatgattgagctttgatatgttgactttcaggtacctgttaaacatctgagaagaaatgtgcattaggcagatatgtaaatttaatgctcaagagaggagtctggctagagttagactatgtacttaaagtacttaaagtggtagctttcagtggtgatgaaattgcctagggagagtgtatagagcaagacaagggccttgtataaagtgcgaagaaagagatgtctacctaggaggccaaaaattgagtctagaaaggagaaaacccaaggttgccatattgtataacaggaaccgtggagtgtacagcttactggctgtacagggcagcttggagaaatactaggaccttgtaggtagaataacagccaggaagagtctttccaggagtcagagataggaagtgtcacatgtggctcagagggcaagggagataaagaagtgtctgggttaaataaaataaacgaaataaaacttcagctaaagatttttggataccaaagcttaagtcataacacactttgtaggttttattcagtgtttttggtactttgatggttagccttattcagagcaaagcaatgaaaagcatcactgccattcctgtttctctgctggctgtgttactgaagtgaaacctgtagatgccatttatttattttgtactccatgctattcaggatatttctcattttttaataaaaagaaaatggctttttctttttctgattataaaaataatgactcttcattgtgatgaattcaagtagtccagaaatgtattcttaaaaccctaactctataattaggagacaattaatattttccttgtctttccagatgactttgaatatatgtatacattaataacatctatgatcttacattttttcattcaaaaatattatgcatctttccatgttggtaaacgtagctctaaatcagcatttttaattattgctgaatatcagatgatacatatgcatatattaataaatatgtagtcaaccagtttttagggatagatgttgaagtaatctccaaattacagccattgcagttagcaagggatgtcagtaaatatgcgtgcagttctccagtgtcatatgaagtccttgaagtagaatttcaggtcaaaggtcatatactttcaacaactatatttcattatgaaataagatgggactatgaaattaatatagtctcatgataaaacatttaaattgtacataagagtacccaggaaaatctaagtcccccttttacctcagattgagcttccactttttagggataattattaccagtggctccttgtgtatctgcatatagaagcaaatatatgtatgggtagacttcaaaatttactttagtactttattctttttgagcagataatgcatgaccgtggaaaaaaatttaaatatgtgttattctgtgctttgcttttttcagttcatatgttttggagatctatatcagcacctgtaactcaattcattttatcagttcatcgttttgttttatgtgtataatatactggtccagtgcaaggacatttaggttgttttcattgaaacagaactgcaataaatgtcctttgcgtctgtctttgtatacaacatgctgtcagatggaggtagaacttcccaggctcccaaagttctccatggagacatttgccatggatgatacactggcagaaagtgaggtttccatcaagcaagagaagctccctttgctaaatccacagggagttttatccctcctggcttccttcaatggttctagaaactctgatcaccatgctcaagtacaagtaactggtaacaaccctagcagatcactgcaagcaggtcagtttcctaggaatatctcttcccaggcctgggccagactcttttgaggtctaatctttgtcctctaaaaatgttgcaccaattacactcacatcaaaactccaaaaacaaaactttttggaaagaagaaatgggagtaaatatagtaatgacatgtttgaatcatggggttaaatacattgtaaagtcagaattgttgagatttttttttgaaagttttgctcccccctcccccaacacacacacacacacacacacacacacacacacacacacacacacacacacagtcctgtgtatgttattttattttgagacaaggtcttgttctgtcacccaggctggagtgcagtagtgcagtcatggctcactgcagccttgaactcttgggcttaacccattctcccacctcagcctcctgaatggctgggattacaggcatgtgtcaccacatctggctaattattgtattttttgtagagatgtagttttgccatgttgcccaggctggtctagaactcctgagctcaagtgttcctcctgcctcagcctcctgagtagctaggactacaggcacaggctataggactatgccaccatacttagctaatcctgtgtattttagattactggtggggattaaaaaaaactcgagagccatataggtatttaaaattacagttatttcattatttttacatcttattttatgtttactttcatcagatttctctattccaacttgataatgttgctacaatttgtgacaaatgattgatgctcttggtattctacctccatgcagtttatttagcactgacctgtagttctcttactcttgcttagatcatctttctttccatttcttgttggttggccttggtcatcctctcatttcctacccagcactgacattcctactcctgatttttttcctttctcctcactttttggcttgctttttctgtttcatactgatgttggctttgacattgtttattgttgcctttctcagttgcgttcacttatggacttgcctccatagaatgagaggctggagccctttctgttgccagtagaattgcttgacttcatgtttaacagaagtactcattcatgttaggtaagcagccaggtgattgtaagacagctctgatgtattttgttaattctgaagaaacttttaagtactgctaaacataattcttgatagtatggatacaatgactgcttaatagactttggaaagtactccttatagataggaagctgaaatacacatatatttttatctttttatctaaaaacctattttagtacaaatgagtccagctgtgcttgagaatttaaaccagatatcctggagctgaaagtcgatattgtcagtgttttagccaagactagctgacctctgcagatcccctttaagtttgtggcataagctaaattcggaagtaagtaaaaaacttaaggaaatcgatcaaagtagcacatacctctcttacttgatctatttctctttagattgtttttttttttatgggatcattctattctaaaaggtgattcagtctgatgttcctaagtacatgaaaatttcaatgcaagcaaaaaatactgagtacatgtcactttaaaacaatcttgctttgactttgatcatgtagtgtcttttctgtatttctattgcactttgagtaactggactcactgaatttaaaatgtgcttggtggttttcaaatgagaatgtagtgcaattaggtttttttcttagtaaaattctgtactatattcttgaaaagttttggaatagaagatagcatttgctactagttacttattatttatttatttatttattttttagagcaggagaacttgatagttaagtgtttaagaagtaattttgatttagttgcagtgtgcaaagtagggatattaaatcccaattgtcttcatggaaaaatattagtaataccttccaaaaagttatatacatttgtggttcataaagtttttcttaatatggcttttttgagatataattcatataccatacaattcatctatttaaaatatacagtttagctaggtgtggtggctcactcttgtaatcccagcactttgggaggccgaggcaggtagatcacctgaggtcaggagtttgagaccagcctaatcaacatgtgaaaccctatctctactaaaaatacgaaaattagctgggtgtggtggcaggtgcctgtaatcctagctactcaagaggctgaggcaggagaatcatttgaacccaggaggtggaggttgcggtgagccaagatcacgccattgcactccagcctgggcaacaagagcgaaactctgtctcaaaaaaaaaaaaaaatacacacacacacacatacacagtttagtgctttttgatatattcacagggttgtgcagctattaccgcaatctgattttagaatatttttggtccctctaaaagaaaccccgtacccattagcaatcactccttgtttcctctaatcctcagtcctagacatccaggaatctcctttctgtccctgcatttgcctgttttggacatttcatataaatgacgaaatcatacaatatgtgctcttttgtgactgacttccttcacttaatgaaacgttttcaaggctcatccatgttgtagcatatatcacattttgttcattcctgggctggtgaatatttgggttctttctactttttggttgttatgaataatgctgctatgaacatgggtatacaactatctgagtctctgctttcaattcctaggtattcattataaccaagagtggaattaccggctcatgtttaactttttgagtagcctccaaactgttttccacagctgctacaccattttgcgttcccaccagcagtgcaccagggttgcaatttctccacgttcttgccaacacttgttttctgcctttttgataatagacatccttaagggtattaaatggtatcttattgtggttttgatttgtatttccctaataactaatgatgttgagtatctttttatgtgcttattgaccattcatgtatctttgtgggaaaatatattcaaatgctttgctgtttaaaattaggttgtctttttagtagttagttgtaggagttctttgtatattctggatactgaacccttatcagatatatgatttgcaaatacagttgtgtgttgcttaatgacagggatactttctgagaaatgcagcattaggcaagtttatgattgtgtgaacatcatagagcatactcagacacctagatggtatagcctacaacacacctaggctatatggtgtagcctattgcttagtctacaagcctgtacagtatgttattgtattgactattataggcacttgtaacacagtggttagtatttgtgtatctaaacacattttaatatagaaaaggtatagtaaaaatatggcataaaaggtaaaaaatgagctgggtacagtgactcatggttgcaattccagcattttgggagtctgaggtgggaggactgcttgaggacataggagtttgagaccagcctgggcagtatacttgataccccatctttacaaaaaagttaaaaaattaactgggcttggtggtatttgcctgtagtcccagctactcaggagaccgaggcggtaggattgcttgagtccaggagcttgaggcggtggtgagctctaattgtaccactgtagagggcctgggggacagagtgagaccctgtcttttttttttttttttttttttttttttttttttttaagagagagacataaaaattggtatacctgtgtagggtacttaccatgaatggaacttacaggtctagaagttgctctgggtgagtcagtggtaagtgcatgtgaaggcctaggacattgctttacaccactgtagactttataaacactgtacacttaggctaccctaaatttatttaaatttttttcttcaataataaattaaccttagcctcctgtaattgagtactttaaacttttcagttttttaaaactttctgattcttgtataataacttagattaaaacacaaacattgtataggtgtataaaaacattttctttatatccttattctgtaagcttttttctatttttaaaagtttttggctgggcgtagtgggtcacacctgtaatcccaacacttcgggaggcttgagatgggaggattgcttgaggcaggagttcaagaccaaacttttttttttaaagaaaaagaaaaaaaagtttttattttttgctttttaaacgtgtttgttatgttagcctaggcctacacagggtcaggatcatcagtatcactgtcttccacttccacatcttgtccccctggaaggtctgaggggtagtgcagacatggagctgtcatctcctatgatgataatgccttgatgtggaatacctcctgaaggacctgcctgaggcagttttacagttaattttaaaaagaataagtcaaactggagtacactctttactttttattgacctcttggggatgaagaaagaagtacactcttaatgataaaaaccatagtatagcatatacatacaccagtaacatggtcatttattatcaagtattatgtagtgtacataacggtatgtgctatacatgacgggcagtgcagtaggtttcttcacaccagcatcaccacaaacgtgcctgtaatgctttgcactatgaagttacaatggctacagtgtcactaggtgagaagaatttttcagctctattttaatcttatgggacaacctccctatgtgctgttgtcttcaagtgaaacatcattacatggtgcatgactgtatttggcttgtctttttactttcttgttggtattgtttgtagcacaaaagtttttaattttggtgtagtccagtgtatctatttttgcttttgtggctgtgtttttgatattatatgttaaagaaacattgcttaacccaaggccacaaaaacttctatgttttttcctaagagttttatagttgtaactcctagatttaggtctctaaggggttgaacttctttcttttggtgatggatatacagttgtcccagcctctgaattgtttgggcatactttgttaaaaatcagttggccataaatataggatatttttctggtctctcaatatgtctgtccttaagctggtactacactgtcttcattgctgtagctttgtagttagttttgaaacttggaagtgtactttcttttttgccaagattgttttgacttttttgtagttcatgaagtttaaacactacatctggtattatttttcacttttctaatagattataatgttggatatgttagaaatgtatgtctagttccaggtaattaaagttttctgggtagctgattcactttttattcactaaatctttattttaatcactgtggatgaaagtcatttatttggtattatataataaaaattatacatacacatatatgatatacttggaacacagtttaactttttctgtgcagttcagactaactattgtaaaacattagccatcatatgttatttccaggtgctttaaaaaatatatatatatatagtactattggcttttgtactaaatagctaggtcttcggagttcatctacctatggtgttttcctttattcttctccttattgtcagctgttacttaaaaaaaaagttttatacttttaaattacagaataactatcaattgtagaaaatacaagtaaagtctaagaagaaaataaaatttaccctaatttggccacacagacttttttaaggcatgttttaaaattagattatattgtgcacattgttttgaaacctgcatagactgtgtatattccatgtcactaatcatctttctaaatctttctgttgttttaatgtctgtatttattgtattatatgattgtactttaaaaaacatttagcatagtttcactttttcattacatttaaaattttgttgctgcatctttgtagacactcatgattttatccttaggaaagatttttagaagtgggtttgctggatccatttttaaggtttttgatatatgaagctagattttctcctagaaggtttgaactaatttgtaatgtctttcataatgacaaaagtaatgtttgcctcctccttgatcaatagttttattattgttttctttgatctttgcaaatttgataggcaacctatggaattttggttttatttacatttgtttaacatttaaatttttaatttcatatttattcatcatttaatttcttttcggaattacccaatcatattttgcgtgttttctgttatgttttctttctttcttttttttttttgagatggagtcttgctctgttgcccaggctggagtgcagtggcacgacctccactcactgcaagctctgcctcttgggttcatgccattctcctgcctcagcctcccgagtagctgggactacaggcgcccgccaccacgcctggctaattttttgtatttttagtagagatggggtttcacgatgttagccaggatggtctcattctcctgacctcgtgatccgcccggctcatcctcccaaaatgctgggattacaagtgtgagccaccgcgtctggcctacattttcttaaatatttctttttgttaagtgctttgtttattgggatattcatttttttattcatgttgtaagaatttccaattctttgtttttatatttatgacttcttaaatgtgtaatcaaatgtatcagtcttttattgcttctgagttttctccattatatgccttttacttacattttcacctaatgtttttatgggtttcaaaattacagttaaaattttatttaatcttaaaatgatttgttaaaacttgttaggtagggttctaactttaatttttctactccttttaatgctgttgaataattctttctcaattgattcgaaatgctgcttttatcattaccctacattcccaacttggaatttatttctggactttctgtgttagtccattgatctgtctattcctgtgttactccctttgttgttttacgtcttttataataaagatctacaatatctggggtaagactggaaccttgatgttagtctttgaaaaataaattacagtttttcttatccatttattccaggtaagctctaaaatcaacaactcaaggtctaaaaagtattttgagatttgggttgaattgtattaaatgtatagatagatgaattactctccatactcagcaatatggttatgttttttattcagattttatcttaagaaccttaataaagccttgtagtgtttttcatatgggtcctacatattgcctactacaaggtattctatttaagtagtgttgtgcacaagtttgtgcacctgtacgtctcatgtaatatttgtgacatatgaaaattttttttatgtttatctgaaatgcagatttatctggacatcttgtatttcatttgctaaatctagtaaccctgtgcatattttttaactattacagaatttaaaaaatgtactccaaagtagagacggttcaataaatcctcattaacccaccatgtatctcaaatagtcgtaaactttctgcatttcttataaaggtagtttaaattttttattgctgattttttagcttgctgtcttagatattcatgttatatatattaagagttttattcttttctagtacttccacttgaggaaactttggtgttattgcattggctctaacttttttttttgagacagtctcactctgtcgccaggctggagtgccgtggcacaatcttggctcactgcaacctctgcctcccaggttcaagcaattcttctgcctcagcctcccgagtagctgggactacaggtgcatgccactacggccagctaatttttgtatttttagtatagatggggtttcaccatgttggctaggatggtctcgatctcttgacctcgtgatctgcctgcctcggcctcccaaagtgctgggattacaggcgtgagtaaccggctgtaccttttaaataactttttaataactttacattcttactggcagtgttggagatatttttgtcttttgatttttaaatggaaatatttctagtgtttctgtgttaggtaagtaagagttcttactaaattttgttttcctaatattattagatttgggattgacatacatgatttacaagctctgtttctgtcttcctaatattattagatttgggattgacatcttatatgtgatttatgagctcttgagcttgagcagttcattcagtctctctgagcacttctgatttttcatctgtcaaatgaattcatcccacagagatctttttgtaacataaggcaatggatgcaaaacaagttttccagctatcataagggcatataagttacatgtactttaatatatttttttaattaatctctcttgttcattcatttatgattacctatttctccagtgcccaattatcctgatttatattttttaagaagaatttaagatgcttagtggtagacgattatcctaaatatgtctgtttacagatagcaacctatggttgtttctgctgtaatatcatgtttgtttttctgccaaatctcttattatgaaaaatctcttatgaaaacagaagtttcattggagaaagaggactggagagtttctgtaggactgacataagtatttatgtagctttactctaaaaataataaatatgctgactaaattcaataaaaacaaccaaatttttcctccttcacccttgagtccatccacattctcagaaggttcttagcttctcctatcacatttgtccttgaccatgcagttttacttgcagaactgttcacaactgccagtggtaaacaaaagaataaaagaatgcttgagtaaacaaaacaattctatttcagaagaacacacaaacaatgcagctctgtgtgcctattctttgatgcaactattatttttcctatttacgttgtgctaattcctgttggtgttgtagtaataatgctttagtgtactgagttttcccccaattgatgatgttatatctacattatgttataaaagctcatgctgtaagagacttgcctatatttgctagtacagggtaaatagtaagtattgtattaataaatacttgttgattgcaaatggccagatgacttatttcaaatattgaggctcattgaggttcactgttattgccctggctaggtattcaagcctggctcagtaaactgtacttattggatactggttcaaaacaaagtaaaaaatgtaatcctactattgtgcaaagtcatagtacctttttacttttggcaagtgttgttacattataggaagataagaactagagcaggtttggagaaaggcacacaaaatgacaaggagaaaggtaccatagtatataaactaaaagggtttgggtgtttcaacttggaagttaaagggatgaatttgaagtatagaagactgtgatcatataggtaagttgaacttgtttttaaatctcagcctgatgaactgttgtttatttttacccccagtgttgaaataagacagttggatagaagcactttattttgaaactgaaaatgtaattaattctctaaaagtttaggtatatttatgaatgatagattcgtatttagttactaaatggaattaagctattttaagccttctgaggtataaatcaagggggcagcataagcatattctcccatatgggtactagttcaaatatttgctttactgttacgtagaatagggacacaactgttttgtgacccccaagtgtagaactgtgaccaatgactttggcactaaacatagggaggaactttgtaacaaagtactccagattatggaatggaaaaaggggaatttgttctttctacaaatggtttcaacatgtcctaaatgacaatttggtggagttgttgtggaagaaattcaagtagtggattgatgtttgaattgggtgacttgtatggtcctgccagttctgagattttatgataaagtgtcaggaatcactatttcttagagaacatcagcctgaatgggcaataaatccagaaaaagtacaagaaattttgctaaaatgtggagatggctgttttgcctttaaaagttgatgaaccatagcctcattttacatttttaaaataatgctctttaaaaatgaaatggtcatgaaagaaatatagacagtgtagaagggcatgagctagaaagtaatagtgctctaatcctccgaccaccgtttccctttccatctagtagtgagggaaagggtggtgttgagaattagtctttgttttttggcttgaataattgactccacagtggcagtgccattaactgagagatgggataaaacttgcaagaacaggaagctatgcggagcaagcttcctgaactgtcttacattgtttgtctgattgaattatttaggccttgaattctgtttgtgctctagtgacattttgtcttcaaagatgttaaattattccaaaagtaatagacactgacttggagaggtttttattggccagatttgggataatttgaacattagacagaatatacagttgaccctgtgtatctgtgggttccatatatgcaggttaagccaaccacagattgaaagtgttctgtagttgtgtccgtactgaacagttacagacttttttcttttcattttcccctaaacaacataacaattatttacatagtatttacattgtattaggtatcataagtaatcaaaagacgatttaaagtatatgagatggtgtgtgtaggtttcatgcagataccacgtcattttatgtaagggacttgagcatctgtgcattttggtatctgctgggaggtcctggagccagtgtgtcccatagatattgaagagggctgtgtattataatttgtcctataacgaacccgtgaatccatctcgatagtaaaaaaggtagggtgggggtggttctttacagaaggatgccagttgataaaatgtagaaggaatgatggaatcagaaaaaccattttgtaactctcagtgtaaaaattgattcaggcaaaaatcattgatggtgaaaatttgttgggaaattaaatattcattggtttaaaagtatcacctcacaaattatttactaattgcaaaaaagaaaatgtacctttgtaattgagagtctggcaatcatcagcttaacaaaatgatcaatcttagcatcatgaacggtgggacagcccattgtttttgcctttcatggggtgcagtaagaaaaaaaaaaatcaccggtatagttgtcccaccaaaaatatttaatttaaacctaatcatgatggaataatcagacagatctagaatttgtgctgttttaaatgaccactggcctagtctcttcaagaaagtatcatgaaaagctttgtggtagtggcgtagggattcaattaaaaaaagactaaggagacttaccaaccaaattcagtggattaataaaaattaagttcagtaaatttggatttaataaaaactcatacaaaagacatttttggaacaatttgtaacatttgagtatgaattataaaacagatgagtttatgaaaatgttattttgggggtgttatataaatgatattttgattatataggaaaatgtccttattctcagaagaggtatttcagaatgaagtggcatgatgtctagaaattacttttgttttcttctgacatcaccacattgatcgtatgctaaaaattactttcaagtggttcagaagaaaattgtgtgtgtgtgtgtgtgtgtatgtgtgtgtaaagatacggtaaaatgttaacaatatagatgaaggatatatagatgtttattatacatccttcaatttcttattaggtttaaacattttaaaatattacatttttcaaaacatgatttttaatgactacattgtaattccacatggctgtgtatgacaatttgttaaataattacgtgtaaaattttcagcgagaatacttaggggctattttataaatggtggctaagaaacttaaataaactttcaaatattcatttaaacctatactgtaactgaaatagcacgaaaagtaaccttgtgtgactttataaccttattaaacattttgcccatttgcctctggagtcaagatcttaatctcattcagaagactgagtggacaaggatttggtatgcatagatggaggcactggcaaccggagaggtcccagggctgcataacactaagtagctcatagtgactcaacattggaacttggtataacttgtctatgattaaagccattccagtgataccacagtgatatagtggtaccacaaagtagttttagttttgtttcactgaaaaataatgaatgtcagcatcttttcatatgattaatgaacagagtatcttcttttgtgaaatacctgttcaagtgttttgcctgtttttctactgtgttgtctaccttttccttattgatatgcgagatttcctgtcttgttgaatataaaatgtatacacagctttcttcctccttctctgtccacgtagtcatgcccgattcctctttgccttctggcatgattgttcaagatggtggataggagacagggctgacctgcagctcttaacttggatggacagaacagcatgtggagactcacactgtggacttcttgctccaggaaccaccacaggagtgtactagaaaaactgaaagaattcacagatgctttgaaagaagcagcaggctgctgcaaattctgtgagaccggcagaaatctctggtgctctctcaaaactgccaccttctggctggaggccaaccacaatattacagcaactcatgacagaatagccctgcttcaaggtaggagaaaacaatagctaattccactgcctgcaacatcctgggcaaccagtggtcctgagtctctccatgtgacaacactgctagcataaccagcatctgagaaagccagcacactaaacatatctacatccaaggactctcacagagtctacttcactcccttaccatctccaccagaacaggtgctggtatccacagctgggagacctgaagacagattgtatcacaggactctatgcagacatttgcaagtaccagctcagagtctggtagccccacggggtggttaggcccagtagagcaataacaatcactgcagtgtggcttgctggaagccccatccctaacggggagtgcatcacatcaagggaccaccaacgtggtacaaaagaatctgaacaacagcccttgagttccagatttttccactgaaatagtctacccaaatgagaaggaatcagaaaagtaattctggtaatatgacaaggtaataaaacaaggttctataacatccccaaaagaccacactagctccccagcaatgggtccaaatcaagaagaagtctctgaattgcgaaataaataactcagaaggttgattattaagctactcagggagataccagggaaaggtgaaaaccaacttaaagaaattaaaaaaaaatacaagatatggatgaaaaatgctccagaagatatttactccagagaagtaaatatcgtagagataatgtttattctagagaataaataaatattgtattccagagaaataaatatcataaagaaaaaaagaatcacaacttctggaaatgaaaaacacacttagagaaatgcagtatgcactggaattcccacaatagactagaacaaatagaagaaagaacttcagagctcaaagataaggcttacaaattaacccaatcagacaaagacagagcaaaaagaataaaaaaaaagaacaaagcctccacaaagtttgggattatgttaaatggccaaacctaactataattggtggtcctgaggaagatgagaaatataaaagtttggaaaacatatttcagggaataattgaggaaaacttcctcggcttcacaagagatctaggtatccaaatacaagaagctaaaggaacacctgggaaattcatcacaaaaagatcatcacccacacacatagttatcaggttatctaaaggcaaaacaaaggaaagaatcttaagagctatcaggcaaaagcatcaggtaacctataaaggaaaacctatcagattaacagcagatttctcagcagaacccctacaagccagaagggatttggatcctatctttagcctctacaaacaaaataattgccagccaagaatttcatattgagcaaaatgaaccttcataaatggaaagataaagtctttctcagacaaacaaatgctgagaggattcaccatcaccacaccagcactacaagaaatgctaaaaggagttctaaatgttgaagcaaaaccttgaaatacaccaaaatagaaccttctcaaagcgtaaatctgatgacctacacaacagtaacacaatggaagcaaaaaggtattcaggcaacaaatagcacgatgaataaaacagtacctcacatctcaataccaacattgaatgtaaatggcctaaatgctcctcttaaaatacatataatggcagaatggatacaagtccaccaactaagtatctgctgtcttcaagagactcacctaacacataaggactcacataaacttaaggtaaaagggtggaaaaagatatttcatgcaaatggaagccaaaagcaagcaggaatagctattcttatatcagacaaactttaaagcaacaacagttaaaaaagacaaagaaggacattatataataataaaagaatccagcaggaaaatatcacagtcctaaatatatatggacctaacattggagttccaaatttataaaacaattactactagacttaagaaatgggatagatggcaacacaataatagtgggggattctaatactccattgacagcacaggtcatcaagacagaaagtcaacaaagaatggacttaaactataccatagaacaaatggacttaacagatatttacagaatattccacccaacaactgcagaatatacattcttgtcagcacatggaacattctctaagatagaccatatgataggtcatgaaacaggtctcaataaatgcaacaaaattggctgggcacggtggctcatgcctgtaattccaccactttgggaggccgaggcgggcggatcacaaggttaggagatcgagaccttcctggctaacacggtgaaactccgtctctactaaaaataaaaaaattagctgggcgtggtggcacgtgcctgtagtcccagctactctggagactgagggaggagaattgcttgaacctgggaggcaggggttgcagtgagccaagatcgtgccactgcaccccagcctgggcaacagaatgagactccgtctcaaaaaaagtagactgggcacagtggcttatgcctataatcccagcactttgggaggctgaggcgggcggatcacaaggtcaggagtttgagaccagcctggccaatttggtgaaaccccttctctactaaaatacaaaaaattagccagccgtggtggcgtgcgcctatagtcccagctactcgggaggctgaggcaggggaatcacttgaaccctggaggtggaggttgcagtgagccgagatcatgccactgcactgcagcctggcgacagagcaagactccatctcaaaaaaaaaaaaaaaagtaacaaaatcaaaattatatcaggtaccttctcagaccacagtggaataaaattggaaatcaactccaaaaggaaccatcaaaactgtacaaatacatggaaattaaataatctgcttctgagtgatctttggcttaacaatgaaatcaaggtggaaattaaaaaattcttgcaactgaacagtaatagtgacacaacttaccaaacttctggaatatagcaaatgtggtgctgagaagaaaggtcatagcattaaatgcctgcatcaaaaagtctgaaagagcacaaaatctaaggttacacctcaaggaactaaagaaacgaagaacaaaccaaacccaaacccaaacgcagcagaagaaaataaataacaaagattagagcagaactaaacaaaattgaaacagataaacaaaaacaaaagataaatgcaagaaaaagctgtttatttgaaaagataaacaacattgaaagaccattagtaagattaaccaagaagagagatgtaaataagctcaattagaaatgaaatgggaaatactacaactgataccacagaaatataaaagattattcaagtttactgtgagcacaaactagaaaatctagagatggataaattcctggaaatatactaccctactagattaaattggaagaaatagaaactctgaacagaccagtaacaagtagcaagattgaaacagtaatgaaaaaactgccaacaaaaaaaattccaggactggatggattcacagctagattctatcaggcattcagagaagaattggtatcagttttactaaaactattccacaagatagagaaggagggtaccctccccaaataagtctttgaagccagtatcaccctaataccaaaatcaggaaaggttataataacaacaacaaaaacaaaaagaaggaaagaaggaaggaggcagcaagtgggggagggagattggggagggaggaaggaaaagaaaaccacataccaatatccctgatgaacataaatgcaaaaatcctcaaaaaaaaaaaaaagtctgggtacagtggctcatgcctgtaatcccagcaatttgaaaggctgatgtgggtggatcacctgagatcaggagtttgagaccaacctggccaacatgttgaaaccctgtctctactaaaaatacaaaagttagccgggcgtggtggcacacgcctgtaattccagctactcaggaggctgaggcaggagaatcgcttgaacccgagaggtcgagtgagctgagatcatgccactgcaccccagtctgggcaacaagagcgaaactccgtctcaaaaaaacaaaacaaaacaaaacaaaacaaaaactagctaaccaaattcaatagcttatcaaaaagataatacaccataatcaagtgggtttcataacagggatgtagtgatgaattaacacatggaagtcaataaatgtgatccatcacataaacagaattaaaaacaaaaatcaaagatcgtatcaatagttgcagaaaaagcatttaacaatatgattaaaacccttagcaaaatcagtatagaagggagatacctcgaagtaataaaagccgtctgtgacaaacccacagccaacattatactgaatgaggaaaagttgaaaacatttcccctgagaactggaacaagacaaggatgctcactttcaccacttccattcgacattgtactagaagtcccagccagagcagtcagacaagagaaggaaataaagcggatccacattggtaaagacaaagtcaaactgtcactgttcaccaatgatatgatcatatacctagaaaaccctaaagacccagaaagctccttgatctcatgaatgaatttagtaaagtttcaggatacaaaatcagcgtacacaaatcagaagcattgctaaacaccaacaataacaaagccgagaatcaaatcaaggactaaaacccctttacaacagctgcaataaataaataaacaaacaaacaaataaataaaatacttacgaatatacctaatcaaggaggtgaaacatctctgcaaggaaaactgcaaaacattgctgaaagaaatcatagatgactcaaacaaatggaaacacatgccaagctcttggatgggtagaatcaatattgtgaaaatgaccatactgccaaaagcaatctacagattcaatgcaattcccatcaaaataccatcgtcattcctcacagaactagaaaaaacaatcctgaagttcatatggaaccaagaaagagcccacatagccaaagcaagactaagcaaaaagaacaaatctggaggcatcacattatctgacttcaagctatatactacaaggctatagttaccaaaacagtatggtactggtataaaaataggcatgtagaccaatggaacagatgagagaacccagaaataaagccaaatacttacagccaactgatctttgacaaagcaaacaaaaacattaaatggggaaaggacatcccattcaataaatggtgctgggataattggcaagccacatgtagaagaatgaaactggatcctcatctctcaccttatacaaaaatcaactcaagatggagtaaagacttaaatctaagatctgaaattataaaaattctagaagataacatcggaaaaacccttctgggcattggctcagataaggacttcatgaccaagaatccaaaaacaaatgcagcaaaaacgaagataagtagattattaaacgaaaaagcttctgcacagtaaaagaaataatcagcagagtaaacagacaacccacagagtgggaaaaacaatattctcaactgtgcatctgacaaaggactaatacccagaatctacaaggaactcaaatcagcaagataaaaaacaatcccatcaaaaagtgggcaagggacatgaatagacagttctcaaaagaaaatatacaaatggccaacagacatatgaaaaaatgctcaatatcactaattatcagggaaatgcaaatcaaaaccataaggagataccaccttactcctggaagaatggccgtaatttaaaaaatcaagaaacaacagatgttggtgtagatgtggtaaaaagggaacacttttacactgctggtgggaaagtaaaccactatggaaaacagtatggagattccttaaagaactaaaatagaactaccatttgatccagcaatcccagtactgggtatctactcagaggaaaagaagtcattatttgaaaaagacacttgcacacacatttatagcagcacacttcacagttgcaaaaaaatggagcccacttaaatgcccatcaacaaacaagtggataaagaaaatgtagtgtctatatgtatatatacagctctgtcgcccaggctggagtgcagtggtgcgatctcggctcactgcaacctccaacacacat

(The sequence listing continues in the following parts.)
